United States Patent Application Publication US 2006/0134663 A1 - sequence listing, part 105

SEQ ID NO: 321292 - DNA, 674 bp, Homo Sapiens
gggaaaggtaatgattttctggcaggaaaagcagcaatgacaagattacttaagtcttgtgaaataacacttctcttccttgacctgctgcttcccttttttaccacacacacacgcacacataccacagcccttttatactgaaagcagctctattgagaatagtagtgtcaactgtattatgtagaaattctaaagtttttgggattatttcatagccctgaccttgctacttctctccactttatgtggcaggtttaatctcaggtctccctcatacacttctcagcctcagcacctaaccctcacacaacactccagtattgatgcagtcaatcttgtataacattttttgaatgtccaatgtgcaaagcacgatgttggaaattatacagaggtgaataagacaaaaactcttgctctcaaagatgtcagtctttttctttgcaaggataacacatgtagagtaaaatgcataaaggggactaattttaaatgtacagcttaattaatttttatgtatgttaacacccatgtcaccaccatgtttaggacatttccagcacccctgaaatttccttcatgccccttcccagtctgtacctacacctcttaatctattttcaatcttaatggccttttaaataactgggcttctcacaaccatagtgaac

SEQ ID NO: 321293 - DNA, 581 bp, Homo Sapiens
  misc_feature (505)..(505): n is a, c, g, or t
  misc_feature (552)..(552): n is a, c, g, or t
tttaacaagtctagtttcttttattgcagaaaattctttacatctaatatatattccatggctacaaattccaacccgtttcccccatgattccattagagatgtcttctattttccaaacatcaccaatgagaggcataagacagtgcattaatagttcatctggagattccctagtggtggttaacaagatttcatcacagtaaaaaactgtgataacaggatccaagagaagttgccgaaaagtttaagaaggaactcaagtgatgtccaactttgcaaaccgtgtccaatgacaaaagaaagaaaatccaatttggttcctggaacactttacattgtaattcatttcggcctcatgagactatggaaattggtaagcctgctactgtgaagagaatggtatgcaattaaacatgcatgttactgctttttgttttggaagaccatgctggccaatggtttctattggatgtgttccaaaatgactggagagatcaatacnaaggccaacaatggtttacttctgtgaccaccgaagactactgagtnggctgcagagcaagtcctggattaatttc

SEQ ID NO: 321294 - DNA, 932 bp, Homo Sapiens
gaagtacttgctaatggtgtggctaccatattttcagctcctgcttttagtataattaagtaatagtaatttgctgcatctggtttctgaaccgtactgcagacaaaatctgcttttagaggcaagcggatttctgacaaagtaactgatcctttggatggcataaattcactttggggactagccttattcttcctctgaggtccttcgttcttcaatttattcaattcatcaatcaaaagtgttctcttcccagttgcaattagaagaagtctttctgcttcagcttcttctagggacccttttccatgttcttcatcaacacagcagttaagagcctggctagcttgatagatcactgtctgttgcatatttatttcgttattgagttcctgcattttctgtttgatattaacttgacaaggaaaggcattatttttttcatccagttttgaagtaacatcttccttccgaacaatcacctgctttattgatggacgttctgtttctttgaatctttgagatctatatgcatcaatgctgtaaagaagatcacgatcttcagaaccaaggctatcaccagattcagctcgagggacacgagttctttggaattttcctggttttggactttcatcacttctgctggtgtctttcaattccagtctaggtgtggacactaaactctctggacttaccacaccaactgtttgtgccaatggtgcaagtaaagacattgaggagatattcagtgcatcttcctgttcttcgctgctttctgctaatgcttgatccatctcctcttggctcttctccatatctagttcaccttcctctaggacatcactgaagaggtcattaattactttcgaactattgatatcatcatcatccacactcatctcaatttcacgtatcacttcaattttccc

SEQ ID NO: 321295 - DNA, 1146 bp, Homo Sapiens
ttatgtttccaagaagcctctttctgctgttcactctcgtgtgctgcagcctctacaaattgcacacattgtttggcatcagccagttggcgctctttctgtcgtaccaccctctggagcttctgtatttcaagttggctgcagaataaagcactctgaagatcaagcagagctacctgttgctgagctggagaagtaccctctgagctgtgaagttgtccaagctggcttttggtgcagcatttctggaaggttttgccattgtgtcattttgaccttcaatttcctggtaccactccctcagtctcacgtttcctgcttttcagagtttccttgaggttctgaattgtcccatcttgcttttgagacgactcctgagcacactttagttcatagctcatttcattaagtttctcttgaagaatcttgttggtggcctctgtttgctggattttttcctggagttctgccaagtgggaatcagatacagactgctgagttatagtggtctcatgtgaattcagcttttgttgtttcagcaactcttcagtcatgggctggacccggagcggcaaataatcttcacagagatcatcccacagctcctgcaggtctgaaagctccaagggataactcacaggtgtcttgtaaaggggtttcaaagacctgttaaggaaaccggaactaactccatctgtcatgctagggccaggcttggctccaggtaggctggatttcactggaatcggaagcctgctccctcgggggctctggatgggcttataatcaagacctttaatcatgctaagagctaattccagcttgtgattacacccatgctgcggagcctgatcatctgaacaacagtcacactttccaagttcctttgcacttctctcagtctcctcatctttctgttgtggagggctagcctggacgcttgcatccaaagattccacagaggaaccaggcgtctcttcctccatgctttctccatctgggggtacctttgtgcttgctaagtcgggtggcccaacctcagacaacgctggttcttcagtgcaaatgctggtcgaccacctgctagaagggccgcaggagatacttctggccacctttcgcctcgtgccgaattcgccacccagc

SEQ ID NO: 321296 - DNA, 639 bp, Homo Sapiens
  misc_feature (597)..(597): n is a, c, g, or t
cggcacgagggaaatttagaagtgaagttgtctatttgatatttaactctttattaaatctttctttaaatttctgcctgtcagtctatattgctgtttttattatacatcagtttctttgtataacttgtgagttccatgtgttttgtttttattatgtaaatatcattataaataaacttatttataaatcaaagatttgttaatttttggaaatcatgcttttcaaagcatcctaacttgctaagatgctaggtagtacgaccctctggatttggaaggcaaataaaactcttacagtgattatttagatattaaagactgagaactcacggcttaaccccagtcttgatggtatattgaacagactgaatatattttaccattacagggctaaaaggagtcttcgtgtgttaatactacctccttgtacatcactatacccaaatcagttattcaaattgttaggaattttaccttttaaaatctcataatggatatctcatgttttctgtattaatgtattttcaatgataggctgtttctttttttgttgttattgttgttgttgttatatccatacttttatctctaatngaatgtagttgggttcttcctgtaatgcgctattatgtcttg

SEQ ID NO: 321297 - DNA, 503 bp, Homo Sapiens
  misc_feature (14)..(14): n is a, c, g, or t
  misc_feature (21)..(21): n is a, c, g, or t
  misc_feature (400)..(423): n is a, c, g, or t
tggccccttacccnacaatgnacccatccaccaggcacccccacccagaaattaaggtacctgtggtccatttatccttatccccagaataacaggagtgtgtataaacaggaagctttagtttagataaataagattatcccattacaaaaattttatattgaataacctgtaagtaatttgaaaaagagacttctggctagttttcacttatgtccaagtcagtgggggtaaatgcattgtgattcactgtaggttttagactcttacagccttaacaaccttgtaaatccataactagcatcttcctatctggcagaccctttacaaatgcattatctcaagcctcacaacaattctttgaggtagacatagaaagtgaaagttcagaaagggtttnnnnnnnnnnnnnnnnnnnnnnnncttgtccagagacatagccaattagtggaagagggtttgaacccaggttcctaactacaaaatccacgggtttaactgct

SEQ ID NO: 321298 - DNA, 384 bp, Homo Sapiens
ctcccagaaatttccgcatcaaatatgctcatttgtaacgatccaattcaaaatagacatgttctgacctctggcgccacctaatggcataaaacaaactcatcaaattcatattgctttgaaaaaacggcagccattcaaatccagtattttttaagcctcattattgataagacagagacatacatcaaacctcaaaaaattttatgaggtaaaattctaacttaaaaaaaactattatcctatgtctttaggtaattgaaaacatagaagaaaattttaaaaaaccatttaaaataacacaaagcctgacagaaacaaatttgaagaaacgttaaaagatcaatctacatctactgccgaaagaaatgaatcttatttcct

SEQ ID NO: 321299 - DNA, 795 bp, Homo Sapiens
cccacttcccaatagagggtaagctggctcccacgcatgctactggggtgctccgagccatcgcaggcggagtctcttctccacccagctttgatggtggggcgacttcccgtgtctgcagctgtggtccaaaggggtttctgtgctggatacagaagttggccgtgacattgggcacataccatctgcagcatctctttcttcttgcagccctcttttgagcaacggtatgtaaaaatcttctctttcttcttcccagggtgagagtcacagtctctgtcaatgtgatcaccaaccaccacgtctggtatctggcccttttttactgggatgggggtattacagagtgggcatactgggacgtgaacatccttctggaatgcaaacggacacttatgtgcagcgtatggaaaatgatctttacagaaatcttgtttacatgcatcacattttactggaagaaaatctagctgcttgcaagtcttttctgaacaatgcttccccaaatcaggaaactccattatgagaacagtgctcaaaacgcagatggcggagttaagtgtcacctggctctcgtcggggacccaggcagctgaggtgagcagcagatggaagagacgtaaactcaggtgtcctcctccgtagtcggctccgggtagctaagcagaaagaacctcgacactggcaccgagacgccgtcggaggcacacccacacccacaccggaacgcaacatctccctgcccgcggcctacggggatttatccgcagcccccggatctgagagccgtctccc

SEQ ID NO: 321300 - DNA, 345 bp, Homo Sapiens
cagacgtcctgccatcttctcattcagacttttcttagcaaaggtagtccatggcaagtaatgaattcccagtaactaggtctgtaacagaagtaaattctgtttttatgtttataaactcaaaaagtaacatgaagtgcaaacacctttagttccttcccctcggtaaccttcttttgatgaaccagtgtgcagcaaaccaggatgaagttggatttgggtgggatccacacaggtcattttcaggcaagatgagacttcctaagttctatgtatagattcatattatcagttattttatgcattcatttctcctctgtcttcatgtctctcccttggcaaagt

SEQ ID NO: 321301 - DNA, 1187 bp, Homo Sapiens
tctgggggggctgggacaacagggcggggggcctgccactccggcggtcatgaatcgtgcctcggggaccttccattttaaaaaggggccccggtacagggcgcccaaaaaattaccgggggggaatttggcccaaacatcttcgggttccccccggtgggggtttttggttttttcgcaaaaccccgaccccttaaccccggccccggggtttccctagggagaacagggtagggccctgttcccctttccctactgggggcccgcgcgcccaaaccgaatgttttggaaaggggtgttgaggggccgaggggggcccgacatttttttcggggggtagcctggttttctggtgggtactgttctgcagttaactccacatttgccacaaactgtgttcttaattgttttggccctttggccaaataagagtgtagattttgtttcagactcatcgtatgatgatggagagcagcaaattacaatagtggttctacagttgccacctaatgaatcttgaaggattcttgtcattttactatctcgatatggaacatatgtactaccctcagccaaagcagaaataacatttccaagagcagaaagtgacttgttgatgtttttagcttcatccagcacagcaccttcagctccagttttactaaccttttcactaccagctaaatcaaccagataaagttttccactcagcttttgttccgtttgtgtgttctcttgtttgacattaataagaaatatactgtgactcctagagctatgttcattcatatttgtaactgctacatgtctgttggattttccttcatctatggtatccataacttcatctggactacatacaaaacgctctgtgcacccctttacatagggaactcggtttttgtcttcatgaactgaaaggttggtctttgaaacatctaacaggtcccttatcttatccaaatatatttcaaaatatgaaaccttaatatgaaattccaaattttcatccatggagtaaatataattaaaaatatcttgcactattcttggaataattcccatgccttctggatcatgaagtttaccctccattgtgtgtgtcttcccagaggatgtttgtccatatgcaaatattgttccattatatccttcaagtacatctttaacaatcttctttgcacagt

SEQ ID NO: 321302 - DNA, 669 bp, Homo Sapiens
  misc_feature (70)..(70): n is a, c, g, or t
gtctaatgattcttgaagatccacactggtctgatataagtccacgtacatgtagcattgcacagttacngttcagcatgatctgagtcttttatctcatgtttgaaagccaaaccatttattgtcacccatggatgatgactgctgttacgaaacacaccaatccatgaggaaggtaaaatgctggccagaaatttcatttcttcttcattatctatagaaagcagactagaagagttctttgaagtacaggcctgcaaactcttttcccaagttcttctttccttaccaatgtagtaacaacctgttggaatatgtaatccactcctcaggacaatggccacaatgacgtgctttctgcgttcttgtattcggggaagaattgttctgctccaggaaaggaataagaactattgtttttaacacagtggccatcaggacaatgcaaatgattcctaagacctcggcagtgagcttctctggaggtggcagtaaaccttggcagtcatatattttatcaatccattgatgattcagggaaggattttgaagatttaattctacttggaatatttcctgttcggttcctgaaatggagcttttattgcctttaggtttcctttgctgccgctttgggtcctgggccagactcacttctgagaaggttcc

SEQ ID NO: 321303 - DNA, 947 bp, Homo Sapiens
  misc_feature (128)..(128): n is a, c, g, or t
  misc_feature (185)..(296): n is a, c, g, or t
  misc_feature (333)..(333): n is a, c, g, or t
cattgatttattttccaatcataacggtctgcattttaatattaatatttgttgtaaatgactaatgcttaaatcaaactatatagagagggaaaagtaatttttaaaacatcatctagttaaaaatngggagggcagaaaaagtagatttttaaaacacaagctaaatgggtacatgagcactnnnnnnnnnnnnnnnnnnnnnnnnnnnnnnnnnnnnnnnnnnnnnnnnnnnnnnnnnnnnnnnnnnnnnnnnnnnnnnnnnnnnnnnnnnnnnnnnnnnnnnnnnnnnnnnnaatgattcttgaagatccacactgggtctggataatnaagtccacgtaacatgtagcattgcacagttacgttcagcatgatctgagtcttttatctcatgttggaaagccaacccatttattgtcacccatggatgatgactgctgttacgaaacacaccaatccatgaggaaggtaaaatgctggccagaaatttcatttcttcttcattatctatagaaagcagactagaagagttctttgaagcacaggcctgcaaactctcttcccaagttcttctttccttaccaatgtagtaacaactgttggaatatgtaatccactcctcaggacaatggccacaaggacgtgctaataaacatatgaattactatctttctgcgttcttgtattcggggaagaattgttctgctccaggaaaggaataagaactattgtttttaacacagtggccatcaggacaatgcaaatgattcctaggacctcggcagtgagcttctctggaggtggcagtaaaccttggcagtcatatattttgtcaatcccttgatgattcagagaagcattttgaaggtttaattctacttggaatatttcctgttcggttcctgaaatggagcttttattgcctttaggtttcctttgctccc

SEQ ID NO: 321304 - DNA, 116 bp, Homo Sapiens
tttcctttttttacttacattaaatacatcggtaaatcagcagtcgcattctgttaccacgattgttatgttgggagaggaagaaaggcaaatgctttctcagaagcaaaacaaaa

SEQ ID NO: 321305 - DNA, 636 bp, Homo Sapiens
aagaaaagtatattccaattatgaaaatattcttaatttacattaagagatcactttttgtaggatgcacactaatgtgacaaggagcattttccgaatctttagaaacttctttagaaacattcatttcttatcaagttacttctgaatatttgttctactaagtttcaaaaacatcaattaaaaatcaacttctgttttctttttattatccctggttatacaaaatccccatgttcttttattatattgaatgttcagtctactgatttactggccccaagtaaccctcctatactttatccaattttttcaaagttattttccagttttccatagtttctagtaacgcccaacaggaacacattgaatgaaagatcatctgaacagaagcaatacaatttgagtcaaaagaaacaaatgattttacgttgtgtagtgaccgaagaaatcaacactgagtataacatttcagtgttctcagaatgagttttttcattataacaaggtaatatgtataaaccgaatcatatacaatgtgctgagttggcactgaaaagcaaaacaccaaaaacagcaacaacaacaatgcactgaactgtttctccccagccgcccagtctaatcacaggtccc

SEQ ID NO: 321306 - DNA, 842 bp, Homo Sapiens
  misc_feature (808)..(808): n is a, c, g, or t
  misc_feature (810)..(810): n is a, c, g, or t
aaatgtttaaagataatttattctatagagtgcattcttgcatctataaggtgacagaaaaacaaactgtgctttaaataccaaacaagtaaatcagaaagcttattttctatttaaaatatatctaagacacacttatataaaaagaaaaccgaccctcctaacatgtaacattaccgttcgtggcaattgttctcaacctttcactctccttttgaccttagcattaagctactttgctcacttctgagctctcagttacagttcttgaggtggcatcctaaccaatttgcactatctttcaggtgaagcgctggatatttaccagataattgaactcaccaaaggctccttggaaaaacgaagccagcctggaccatagcactgcctggaggctctgtatttgctcccgtggagcttcatcggggtggtgcaggctcccaaactcaggctttcagctgtgctttttgcaaaagggcttgcctaaggccagccatttttcagtagcaggacctgccaagaagattccttctaactgaaggtgcagttgaattcagtgggttcagaaccaagatgccaacatcggtgtggactacaggacaaggggcattgttgcttgttgggtaaaaatgaagcagaagccccaaagttcacattaactcaggcatttcatttattttttccttttcttcttggctggttctttgttctgtcccccatgctctgatgcagtgccctagaaggggaaagaattaatgctctaacgtgataaaccctgctccaaggcagtggaaataaaaagaagccncnccccaaaaaacaaacaaaccaaacaaccctgt

SEQ ID NO: 321307 - DNA, 2013 bp, Homo Sapiens
cacagataaggaaggagaagagagagaagatgcagatgtcagtgtcactcagagaacagcattccagatccggcaatttcagaggtccttgttgaatttacttagcagtcaagaggaagattttaatagcaaagaagccctcctgctagtcacggttcttaccagtttgtccaagttactggagccctcctctcctcagtttgtgcagatgttatcctggacatcaaagatttgcaaggaaaacagccgggaggatgccttgtttgcaagagcttgatgaacttgctcttcagcctgcatgtttcgtataagagtcctgtcattctgctgcgtgacttgtcccaggatatccacgggcatctgggagatatagaccaggatgtagaggtggagaaaacaaaccactttgcaatagtgaatttgagaacggctgcccccactgtctgtttacttgttctgagtcaggccgagaaggttctagaagaagtggactggctaatcaccaagcttaagggacaagtgagccaagaaaccttatcagaagaggcctcttctcaggcaaccctaccaaatcagcctgttgagaaagctatcatcatgcaactgggaactctgcttacatttttccacgagctggtgcagacagctctgccatcaggcagctgtgtggacaccttgtttaaaggacttgtgcaaaatgtacaccacacttacagcctcttgtcagatattatctccaggtgtgtcagagctccggaggaattccaaaaaatatggaaaagctggtgaagctgtctggttctcatctgacccccctgtgttattctttcatttcttacgtacagaataagagtaagagcctgaactatacgggagagaaaaaggagaaacctgctgccgttgccacagccatggccagagttcttcgggaaaccaagccaatccctaacctcatctttgccatagaacagtatgaaaaatttctcatccacctttctaagaagtccaaggtgaacctgatgcagcacatgaagctcagcacctcacgagacttcaagatcaaaggaaacatcctagacatggttcttcgagaggatggtgaagatgaaaatgaagagggcactgcatcagagcatgggggacagaacaaagaaccagccaagaagaaaaggaaaaaataaatgaaatgcctgagttaatgtgaactttggggcttctgcttcatttttacccaacaagcaacaatgccccttgtcctgtagtccacaccgatgttggcatcttggttctgaacccactgaattcaactgcaccttcagttagaaggaatcttcttggcaggtcctgctactgaaaaatggctggccttaggcaagcccttttgcaaaaagcacagctgaaagcctgagtttgggagcctgcaccaccccgatgaagctccacgggagcaaatacagagccttcaggcagtgctatggtccaggctggcttcgtttttccaaggagcctttggtgagttcaattatctggtaaatatccagcgcttcaccctggggaatcccgtatctcctttccatcccagttgggttggaaggggttttacaatccatggtcacttccttcctgaggcaccggtcaatatcgactgcactgaaaaaggcgactgactggggcaagtcattcagacccagcttgtaggcaaacatgcacctggtcaagaggttggtgatctgcaaggccagggcagcgcggtagcggtcctcctcccgcaccaggtagcgaacctcgtcatggatgctgatgcagaagcgcccatctatggcaaactcttcaaacagccacttcatggccacaagcatgaggtgtaagtagtcaacagcagagctctgtaccacccaattcacacggctggtcataaactcttcctggaacagccgagggctccagggctcggctgattcagcagcccagcaccggggtacgtggtatgtcagacgtagcaatgctctcaag

SEQ ID NO: 321308 - DNA, 430 bp, Homo Sapiens
ggtttttccttctttttatttccactgccttggagcaggtttatcacgttagagcattaattctttccccttctagggcactgcatcagagcatgggggacagaacaaagaaccagccaagaagaaaaggaaaaaataaatgaaatgcctgagttaatgtgaactttggggcttctgcttcatttttacccaacaagcaacaatgccccttgtcctgtaggtccacaccgatgttgggcatcttgggttctgaacccactgaattcaactgcaccttcagttaggaagggaatcttcttgggcagggtccctgcttactggaaaaatgggctgggcctttaggggaaaggcccttttttggcaaaagggcacaggttgaaaggcctgaggtttgggggagccttgcaccaccccgatggaggctccacgg

SEQ ID NO: 321309 - DNA, 1051 bp, Homo Sapiens
ggctgggtttccccgcggccctgccccgttagcccagccggtgcatagtaaagggaagatgggtttttcatgctggatgccctttcttggcgcagcgctgctgttagatctccccaaggggaaagggaagaggggttgtccttccacgagggggcatctgggggggaaactggccccaacccggggccactgtgaaaaacaagtgcctcttggtggtctcctttctcttctcccaaacaggggttcagcagacgcagcagctgcaacacacgctcctctcgccgtgactctgtgaggcaggcgtcgttcatgacgaggtatgggtagatcttgccattgtgtccccggatgtacagccgccgggctgcggtgttgtgcttctgcacaatctctacccggggcatgaaccgtgcaatcttgatgtaataatgcgttggctttggcatcagaaactccccaggaatttccacttcagctgtctgtgccgagaaattgctcaagaaccggcacttttcctctatgaggaagaatttggggagttgcttggtcttggcctccaagattttgatccactttttcaacttagaaataagattatgaagcttcatggatcctggaacgctgaagtcaaaatccgtcgtgaactggcctttcagcttctgaaagacagggtcttgtgcagtggcctgcgcccgccgggccagagactcagaggctgcgctggagaacatggtcgagacgttggacacattctccaggcccaccccaaacgtgctcaccaacttcttcacaaaattgagagtgtggggggtgattttagcatcggacaccgctccacttttctcaaacgccacggagtaacatttcgccaggccctgttggagctgcctgagaacctcttcatgccaattttctctgaaccagaccatctgatcgacgatgccttccagggaagacagaagggtggggtggagctctcgctgcatgtgcatgattcggctgcagcgccacatgggtgctgcctcgtgccgaattcgccacccaggcgtgt

SEQ ID NO: 321310 - DNA, 1030 bp, Homo Sapiens
agtaacggggagaagggggttttccatgtctggatgccccttccttggcgcaaggcgctggtttgttagatttcccccaagggggaaggtgaaagaaggggttgtccttccccgagggcggcatcggtgggggaaactgcccccaaccgcggggcaatgtgaaaaaccaagtgcctcttggtggtctctttcttcttctccaaaacaggggttcagcagacgcagcaggtgcaacacacgctcctctcgccgtgactttgtgaggcaggcgtcgttcatgacgaggtatgggtagatcttgccattgtgtccccggatgtacagccgccggggctgcgggtgttgtgcttctgcacaatttctacccgggggcatgaaccggtgcaatgcttgatgtaataatgcgttggctttggcatcagaaactccccaggaatttccacttcagctgtctgtgccgagaaattgctcaagaaccggcacttttcctctatgaggaagaatttggggagttgcttggtcttggcctccaagattttgatccactttttcaacttagaaataagattatgaagcttcatggatcctggaacgctgaagtcaaaatccgtcgtgaactggcctttcagcttctgaaagacagggtcttgtgcagtggcctgcgcccgccgggccagagactcagaggctgcgctggagaacatggtcgagacgttggacacattctccaggcccaccccaaacgtgctcaccaacttcttcacaaaattgagagtgtggggggtgattttagcatcggacaccgctccacttttctcaaacgccacggagtaacatttcgccaggccctgttggagctgcctgagaacctcttcatgccaattttctctgaaccagaccatctgatcgacgatgccttccagggaagacagaagggtggggtggagctctcgctgcatgtgcatgattcggctgcagcgccacatgggtgctgcctcgtgccgaattcgccacccaggcctcgctcctt

SEQ ID NO: 321311 - DNA, 508 bp, Homo Sapiens
  misc_feature (318)..(318): n is a, c, g, or t
  misc_feature (428)..(428): n is a, c, g, or t
  misc_feature (448)..(448): n is a, c, g, or t
  misc_feature (456)..(456): n is a, c, g, or t
  misc_feature (475)..(475): n is a, c, g, or t
  misc_feature (490)..(490): n is a, c, g, or t
gccaagattttagtagtaaattcataaatataggaaatactttcactccttcagtgttaaaacagaaaaccaaacagtgccaacagtagtggcttaattattggtatacaagaaaaacacaacaacaatgggttttcttaattacgcattttaaatatcaatatgtgcatttgtttttacagttataaatttttttctcacctgttttagacaacagcttgtaatagttttgaatccattaagatgttgctttcaatttgaaatattttgtgtatacatgtatataaaaaataacccaatgtatgactcatctgaccngatgtttaagatccaataaccggcttatttttcaccatgcagttagggagagaggggagcaagcccacctctctacagtatctttttgctggcttgtttttgtggtgggnatcaatagtgggtttttggnggggaccntgtgccttcagcctatctngtcaggtcagatccncggtccacagggcggtgg

SEQ ID NO: 321312 - DNA, 961 bp, Homo Sapiens
tgaaccaccgtgcctggccggaagtctttaaaaaataaagtgattctactcttctaagcttacagagaccagaccaggtgaatgtaactggggaaaatcaagatggtacctctctgcattatcccgccagacactgtattttatgcattcatgtctaggatacagtgtgaaaattaaaaagtttagagggcagatgcaattgtggcaagtgacctgccaataaagcaggtgcagctatagaagctggcataggtatatccttaatggtgctttctccctgggcttgtctttttgttgtttttttccccctatattcagagctccttgagaagtgataaacacctccagctttctaacatcctccccacaccatctcaccatatccatctcccagcatccatctgcattcagctaagggcgggaaactgacctagtgcctgtgttgcagaccatttctgaggtctccaccatccaaggaggcacagccgtcattactgtcctccatgccttcagcagcccccctcacagctaaggtacataccaccccttctgccgcgcctccacccctggcaccaaggtcttctgctgcttatgtctaaagggatcacctatatttaactgcctcagtgacctaacctctttcttctcatgtgccagatgttaagatgaaggaggaatacaacacatactcaagcctcagcctgtttagttgttttcactggggctcgcttttctgggacggtatttattatcagactggcaagcctaactccataggtttacaggaagtagggatatttttataaaacaattgtgtcctccccacattttgctatgttaatatttgcttctaacaatttgcagctgtttcacttttttctcctttgtcctctaagttgaaggctttgtttggaggggacagagcacaggaaacagccctttgacgtcctgtaaattattg

SEQ ID NO: 321313 - DNA, 982 bp, Homo Sapiens
  misc_feature (100)..(108): n is a, c, g, or t
  misc_feature (390)..(390): n is a, c, g, or t
taacgccggggaggcgaagccacctggcaggaagacctcccacctctttggaggtgtgttggtcggaggaactccgatatcaggggttcgacccctcccnnnnnnnnntgatgtcgttcacatcagcgggcgcgaaaattccccaagggccgctcgtggtgccatgggtccgccggggtgtcctcccgctggagggaaacccacggtgtgagtagcccccacgcttcgcgccgtcgccctgtagtacggggcccccgccgccaccccccaacaggaaattggtgtcctccggaaaaaggctttccttcggagggagccccgaagggacggggccccggacaaaaagggggatatgcggttagggcgaaacgcgccggacgttccgttcgngggagttaggtttagaatggagttatttcggctttatgggggtaagaaaggggtcaaccattgggtgatgggcaaaaccagacgccagctgccaggcccttgtttccccccttgttgcagctcaggggccgctgtccccagcagccatcggcgccagcatgaggaaggagtctcaggatgcccctccagcgagagccaggtcgggcctcactccttgaacttccattcctggcggcacatggggcagtgctgctgcacctgctgtgcgtgcagccacttgaggatgcaatgcatgtggaagcagtgggagcactggccccacaccagcgggcagtcgtcgccgggcaccttgcagtcagggcagcatccgttaaatgccatcctgcagatgccacagttctcatcgttggccacccagagccaagtggccacgccgttccagcacttaatcttcaccttcatggcagcagagccgccctacccgcccttccgttggcagcgccggcgtccgcgcgggaaggtataaaaacgaccacagtcgcggcccgactccctcaacagcgcccgccgagtctcgcacgccagtgcgcac

SEQ ID NO: 321314 - DNA, 961 bp, Homo Sapiens
attgaatttaggatttcccacgtgtaaatgggccccctcgaagggagctccacaatttgttgagtttttggttcaagaaaccgtcttcgggttttcccgcgcccggggctgtttttttattgtggtgagggaatcgccaagccacttatttcatgggcccagggggtttcctctagggaaaccaggttatggccccatgtttcactttagcctcaatgtggggcccgcgcgcccaaaacgaaatggtgtttagaaagcttttttcgggggcccgagggcgggcgaacaagttaggttttgcttggttatcacaggcggtggtttcgcgtttttaagatttgagtagtttaatgagttttcacttattggataaaagtgtcaacatagtgatggcaaaacaaacgcagctccagcccttgtttccaccttgttgcagctcaggggcgctgtccccagcagccatcggcgccagcatgaggaaggagtctcaggatgcccctccagcgagagccaggtcgggcctcactccttgaacttccattcctggcggcacatggggcagtgctgctgcacctgctgtgcgtgcagccacttgaggatgcaatgcatgtggaagcagtgggagcactggccccacaccagcgggcagtcgtcgccgggcaccttgcagtcagggcagcatccgttaaatgccatcctgcagatgccacagttctcatcgttggccacccagagccaagtggccacgccgttccagcacttaatcttcaccttcatggcagcagagcctcacgttgaggatatcttcaaagatctcaaatgggcctggccaacatgacgaaactccgtctcgccctacccgcccttccgttggcagcgccggcgtccgcgcgggaaggtataaaaacgaccacagtcgcggcccgactccctcaacagcgcccgccgagtctcgcacccc

SEQ ID NO: 321315 - DNA, 986 bp, Homo Sapiens
ttctcctctgtccggcacgaaatgcgctaacacacatttcccacacccgcctcccgcgatacactgccccgggacgtggggggagaatttggatatcggacgcccggctggagacgcccccgtgtgatttagatcccatgtaacgggctcctgaggactccccctccgggatttgttccaagaaccgtttacggttggcgcccccggggcctttttttattgggagggggatgcccaagcgccctagtccgggcccgagggatttccctgggagcaccgctatgcgcccatgttccagttgccttaatggggcccgcccccgcccaaccgaacgggtcctggaaacgtttttccgagggcccgaggcgggccgccaaagggggatcgcggctcccctcgtgcccccagggtggtttttcccaagatttgagtagtttaatgagttttcacttattggataaaagtgtcaacatagtgatggcaaaacaaacgcagctccagcccttgtttccaccttgttgcagctcaggggcgctgtccccagcagccatcggcgccagcatgaggaaggagtctcaggatgcccctccagcgagagccaggtcgggcctcactccttgaacttccattcctggcggcacatggggcagtgctgctgcacctgctgtgcgtgcagccacttgaggatgcaatgcatgtggaagcagtgggagcactggccccacaccagcgggcagtcgtcgccgggcaccttgcagtcagggcagcatccgttaaatgccatcctgcagatgccacagttctcatcgttggccacccagagccaagtggccacgccgttccagcacttaatcttcaccttcatggcagcagagccgccctacccgcccttccgttggcagcgccggcgtccgcgcgggaaggtataaaaacgaccacagtcgcggcccgactccctcaacagcgcccgccgagtctcgcacccc

SEQ ID NO: 321316 - DNA, 961 bp, Homo Sapiens
cccaagtttcctgtctatttcagttagatcctttaagaaaactttaaatcattatggttcattaatgtggaattggacatgatctctgatcttggggctgcaggtacttgaccaaactattaagcaatctgtatcaaaggtttatttggaagcttctgagtatgagggttcttgcattaaatgaggattcaaggggggaggaaaaaagtgtgcttgtcagtttggaaagtcacagggagtttaccatttctataattagattgggaggaaaaatgagaactcactggtagaagaagaagcaacagtctttctagggtctggccatttgatgagataggtattcagttactgtgcatttccattgtttttccatggcagaacatacggcagagatttgggaactcgcatgcctgaagccaggttattcttatgttctgtaactatgttgctcgcagggctgttgttgtcagagtagtgagttgtgccccagacaaatggggtgctggtctgctcccacaaatctttatcccagtcttcatcgcaaggagggcactgccaagtgctctcagccagagtctcttgtctaaggctcctggtttggttgacaacatcttgctcaatacaacttctgtcatcacagcttgagatatgatgactaatttcagctcgaggaacctggtggcgagcattgaagggacaagtagccaatttgcttgcaacatcaggatgattctttctgcacttgataagatgataaggaaacctgcaagccctgatttgatggtttttgtcataggggcattgcaatagcttctcagggtccagggagtcggtgtaagtttcttccatgttggaaatgaagaagctgaatccaagtgctcggtggacacacaccttcctcacagtcaccttcctcccacgcaagccccagcaacggccacttccggcgcctaacgttccc

SEQ ID NO: 321317 - DNA, 359 bp, Homo Sapiens
  misc_feature (12)..(12): n is a, c, g, or t
  misc_feature (81)..(81): n is a, c, g, or t
  misc_feature (106)..(106): n is a, c, g, or t
  misc_feature (113)..(113): n is a, c, g, or t
tttttccctttnaaattttctaacccaagtttcctgtctatttcagttagaacctttaagaaaactttaaatcattatggntcattaatgtggaattggacatganctctgancttggggctgcaggtacttgaccaaactattaagcaatctgtatcaaaggtttatttggaagcttctgagtatgagggttcttgcattaaatgaggattcaaggggggaggaaaaaagtgtgcttgtcagtttgggaaagtcacaggggagtttacccattctataattaggattaggggagggaaaatgaggaacccactgggtaggaaggaaggaaggcaacagtctttctagggggtctgggc

SEQ ID NO: 321318 - DNA, 394 bp, Homo Sapiens
cacatttgcggagaagaagaggtcgtcttccaagaagagcactccagactcagaactcagaaattgtaaaagatgatgaaggcaaagaagattatcagtttgatgaactcaacacagagattctgaataacttagcagatcaggagttacaactcaatcatctaaagaactccattaccagttattttggtgctgcaggtagaatagcatgtggcgaaaaataccgagttttggcacgtcgggtgacacttgatggaaaggtgcagtatcttgtggacatgggaaggagcaactgcatcctgactgtaggactgaacattatgttcactgcactctgattttctgtaggtacagttcaaagccctaaaggagtctcgcttttactatctttctt

SEQ ID NO: 321319 - DNA, 1543 bp, Homo Sapiens
  misc_feature (1145)..(1198): n is a, c, g, or t
  misc_feature (1289)..(1289): n is a, c, g, or t
  misc_feature (1433)..(1433): n is a, c, g, or t
accaagttcataattttattatactctgaatagagatgatatttaaggagcagagaaaatgactatacaaaagatttatagaacattcatttacatactggatatattctttacagtatcagaaaagtaaaaatatgcactaacaaggcagagaagacgttacaaggtatttgatgctgagaataaatgcacagtgacttttaacatggctatagcttaacactggaggaatacaacaatacgttcttttactgagtagttagtaggaccctgggctataacatgcgttgggcacagttcgtgaactctccgcatttactccccagggcagtacgtgcctgtccagcgggagccctggagacaaaatgcctggaaacgttccttttcctgtggccctagagccggtgtccacggtgggggctctctcacggtttctgagcccacagtacaatctgtgatgacacacagcttgttctgtttaatgcacatgtaacacaaaaggaagaaagaaacttcctataccagctcttcagaaatcgtggaaacttgcttcctttggttcctcagagggagctatctgcttggagcaaattccccgatgcccttgaccacgtttaccttgtgtaaaaatcacacctggccaatgagttcaaaaagcacgtttgcagggcttcctgaatgccgtcgaggcatggcttcatgagggccatcgcgggcaccccgatgtctctgtgattccctggcaggctgcgtttctcaatactgagaccctagtttgctctgacttctaaatgagctctctcatccttcatcagaaggataaggaacctggcctgcactctttgggttaaacatgggtagagaccgtctcaggatgaggacctcttggggaaagtacaaacctctgctccctgtggccacattcttgcagtggatgaaaaaccgagatgctagaggcctctgctaaagacatcagggtcaacacatgaggatctgctgaaaatgccagcacctcctgacagtcatgccaccgcaagttagagaaggaggtccacaacgaccaaggcaaacatttggcacagaaatgaggcacttggtttggtgcatcaataggagctaaaaagtggaatggtccacctgctttnnnnnnnnnnnnnnnnnnnnnnnnnnnnnnnnnnnnnnnnnnnnnnnnnnnnnntgtgatttggctgcttccaactctgcctgtttctaagttttcctcggcccctcactttaaagcagagttcacaaagcacattcccaaaccnccagctccctgacaggagcttgtgacaccagtgtggcctaagaatgggggatttgacttttgaaagcagaggagggaatttcgggctggatcgcaatcaggacagtcagcatgcctgcagagcacctaggctgtgagaggatgnggccaaggccttattctgatgtggcccagctccatctttcactctggggatgttccagggtcacaaattcccccaaacctttgaccacgaacagattcaagcaggaaaac

SEQ ID NO: 321320 - DNA, 397 bp, Homo Sapiens
  misc_feature (380)..(380): n is a, c, g, or t
ttttaccaagttcataattttattatactctgaatagagatgatatttaaggagcagagaaaatgactatacaaaagatttatagaacattcatttacatactggatatattctttacagtatcagaaaagtaaaaatatgcactaacaaggcagagaagacgttacaaggtatttgatgctgagaataaatgcacagtgacttttaacatggctatagcttaacactggaggattacaacaatacgttcttttactgagtagttagtaggacccgggctataacatgcgttggggcacagttcgtggaactctccgcatttactccccgggggcagtacgtgcctgttcccagccgggagccctgggagaccaaaatgncctgggaaacgttccct

SEQ ID NO: 321321 - DNA, 655 bp, Homo Sapiens
  misc_feature (28)..(28): n is a, c, g, or t
  misc_feature (256)..(256): n is a, c, g, or t
  misc_feature (555)..(588): n is a, c, g, or t
tcttaagctccaggaagcgaaagagganaggactcttttcagactgccctctgtagcctacattgcagctttccaaaacaggcagctagcactgggaaagcccatgtggtgaccccatatttttctgaggttcttcttttccatggtgttactttattatcagaaagtaaattcagaaaacaggtcttgcccttagcagacaagaaccacaccagtttcttgtaaaggtaacggatacattggggattcaggagtngacacagaggtccagccccagaacttgttaagggttttgttttggaacactgaggcagatgcctccttccctggccacccatcacactagttagggctggccatgaattctatgccagagtcactcctgcagtctgctagggatgggccttcttatcccactctcgcacacatcccagtctagtctttgccttcacagagtcctccttgacacccctgacttaatgatagttgctgttttggagtagaattgatcaggtttaagtcatcctgctcaggttgggcatagtggctcatgcnnnnnnnnnnnnnnnnnnnnnnnnnnnnnnnnnnaggattgcttgagcccaggagttccaaaccatcctgggcaacagagggagaccctgtctctaccaag

SEQ ID NO: 321322 - DNA, 887 bp, Homo Sapiens
  misc_feature (14)..(14): n is a, c, g, or t
  misc_feature (39)..(39): n is a, c, g, or t
  misc_feature (45)..(45): n is a, c, g, or t
  misc_feature (50)..(50): n is a, c, g, or t
  misc_feature (66)..(66): n is a, c, g, or t
  misc_feature (83)..(83): n is a, c, g, or t
  misc_feature (104)..(104): n is a, c, g, or t
tcggaaaccctacngggcaaaaccacaagtttggaaacncggaantcctnctttcggcctttggcnggatggtaatacaagantgcctgaactgaaaaaggaancccaactgagtgtccagttaagaactctcctccccactgaacacctgtactgccataccccaccgtctgggttgacgttaggcaaagacagtaagtcggttgaccctaacaaagaagtttcccatggaaagtatgaatggaaagacctttggtgcaccgaatcctcatgactgcctcaaagccaatcttccgagtaaggtatctctgtagttccttctgtaatttctgtacttggacttagttgtgctgatgatggtaagagggatagtaatagacactacctgctgaataccgagaaatacaacccagagaagccaaatcagaatactgtccactgagaaggaataagtcaacagcaacttgctgaccagaacagtccaaggctaatttcttatagaagtcagtggatggtgtcatgtgtatatccttagcagatgacctgtggtttggttcctctcgtggtttcagggctcccactccaagagttgggagttgtgtttgaaagacagacattcgaccaccagttggagacatcagcttaaaggcagcctgcagtgcaggacccaaggcactctgggtctccagagtcttggtaaacatttgtggcaaagttttcagtaaatcttgcacgagctctttactttcatttaagtttactaataagttctctggcataggtataaaaacatcttcaatatctgaaactattagcatctgaggttgagagagactttcctgaagaccgtagaaatggattgtactgtcaaatgttatgaagccaat

SEQ ID NO: 321323 - DNA, 810 bp, Homo Sapiens
gcttcaattcttatttaagcttcatggaatgcaaacataggaggctaaagcagaaataagtattgcttcagtgatcatgagtccagccagcttagtaaacaaaacaggggttaccttcctaaccttctaagttcccatttacctacaagtctgagggttttaatctgccagggtcccttggcaaaagggtcagaagtcattgtcactctcatccaggggttcagatttccggacccttcgattgggcttggttggtgagagagaaatgctctcgtcttccaaatcgtcatcctcgtcatcatcatcttccatgtcaatttcactctcctccgagtcctcattgtcatcggagtctccaccttgcatcgtgcccacaatgcgtttgccaggtcttccttgcatgagcatctccatggctgtctgtggcttgggcagccgcctttcttccaactcactgtcggattcatcgtcctcctggatgtctatgtccgagtcatcgttacttccactcttgagcaggcgcttctcttcctccttgagcttgttctgtatcaggcagagagtgtttttagcttcctcaaacctttcttgctccatcctatgatggtcttcaagctgttgttccagataagtcagattttgaaatttctccagataagtgtcatactgcttttgtaattcttcctcagtcttctcatactcatccataaaacatggcctgacactctgcagagtctctagtcgcttccgatttctttccagttctaattttctcttttcgattttggcttctaaattagcttcatcaga

SEQ ID NO: 321324 - DNA, 650 bp, Homo Sapiens
  misc_feature (78)..(78): n is a, c, g, or t
  misc_feature (82)..(82): n is a, c, g, or t
ccgcctctgcttctctatctccagattctgacattcctgagcagaattggtaggcaggccaatccacttgatttcttntttntcctttgaaattatgttcattgccattagcacatttaaagcatcataaactcttcgcctaatgttcttctgatcataagccgaatcagcagccaaatggttatttgaattggtgaactctgacaccagctcatcagcgacttcattgtacgatgttgtaccttttcgttgaactttctcacacactttcattgaaaagtgtctcaagcctttcccatttttatctccttttttgcttcgtttactttctgaaaaatcagagtctataaattttctagcccgttttctatcaccagggacccagccagtagcttctgctatgtgtgtctgagtaaccattgctggtgcaggggtatatggactcccaatcagaacacttcctgaactggttagtctctgtggtgtgcttataatcatttggggtccaacattcacatttattggtcctaaggtttttggtaaaatctttgtaggtgagttggtattggaaactggaaatgcaacaaatgaaatgttgcctggtctaaggaagcatgcctctcactgcagtaccaacaacattctacccc

SEQ ID NO: 321325 - DNA, 1563 bp, Homo Sapiens
  misc_feature (184)..(184): n is a, c, g, or t
  misc_feature (287)..(296): n is a, c, g, or t
  misc_feature (451)..(451): n is a, c, g, or t
  misc_feature (475)..(475): n is a, c, g, or t
  misc_feature (524)..(539): n is a, c, g, or t
cggggacggcggcgcgtctcacgcgagccacagccgctaaaaggggacaacatcgtgcgggcgaaaccagcatgccccgatacgagtgggagtttcacaacaatcctcgcgcggggagtggacatatcaccgggctcctgcctcgctagtctctgttttacgctccttcggcccgccgccggcntataggtgggggtactcgtctgggtcgctccccccattgtgtccccaccctcgtccccgcgttgggttaggggagccgccgaagctcacgggaaggggggggnnnnnnnnnntagatggggcgcgctcccccgggtgggcggcgcgaatattcacccgaaaatagcgcgacgcgtgttgttgtccagcgcgcgccgcgggggctcacatagcgtcgcctgggcatttgcgtggggcgtcgccgcgtcggggtgcatctacatgcatntcccccgtcacccccatcgtgtgntgcgacagacgagtggggaggggggattcccttgatacggctcatcgtnnnnnnnnnnnnnnnngggcggaggagagagaggtcttttcgtcgcccatcacttgcggcgccagggttgtggtggggctgagtcccgagcccgtggtctagggtgtcctcccccgccgggggctacatcttgtgtggggtgcggcccagccccgccgctccgatttgaaccccagggctgtggcgccaggatcccggcgccggggtattcccttttgccaggggggggtttggccgcccccagattcggggccccgctgctcttcaaggatttccgttaggtgttgtaagggggaacttcacttaaccccccggggccacgtcgcgggctgtagcccaagttctccaggcgcgcgctcagggccaggtagcggtgcgtcagctcgcgcagcttcctctcgtccacggagccgtccagagacttggtggaggtctgctcgatcttctcggggatgttggccaccgtgaagccgtagagccgcgtcacgcccgggaacacgtaggccaggatgcggcggtccagctggaaggcgatctcgcccaccacgcgcgcgtccttctcggcgcccgcgaagctctggatctcattgaggtagtagctcctcctggtcctgtccccggtgggcaggctgctctccgagaaacacaccttcttaggccggaccatctccctgggctccagcagggtcttgtccaccagtgagtcttgcaaggggctcaggagcggggacagcttcctgtcggtgcctcggtggctatgtggctctgggggactgaggaaggccttgaagggtgcctgggagggggctgcacagcccggggaggtgtcgtcctcgctggacaggggggcatgtgagcacagcaggtcctccagggaggatgtctgcagttgggagggcgtgtcggcaacactcgtgaaccttccgaaatctggaactcagtgttgtttcttggctccgagggtcttgttttatcagcagccgggatgcaacagatgggtcatctcatcctcatgggaagggatgtacggcagaaagcac

SEQ ID NO: 321326 - DNA, 780 bp, Homo Sapiens
  misc_feature (60)..(76): n is a, c, g, or t
  misc_feature (466)..(475): n is a, c, g, or t
agtttacagacaaaattagagctttgttttatttggagaagggggatgcattcatttgannnnnnnnnnnnnnnnnaattaattgaatataataggatacctagcaaatgttttcacaaaagtgaatctttgtgattttcattctagaaaacaatgttttaaatcacccaaatttaatcacatgtctttatatcataccagataactggtgtagtgtatccttttactgtttcaataacctctgcctcccccaccccttaactttaaaagaatgtgaaaaactagcatcatagtgcatataaatactcaaccacatttcagcttaagcttctaatttctcaagaagttgaaacagttagttatgtagttgaagcaatttgtgtgcaaagcctacatctaaacacttgagtgaataatcattaactgctccagtaccagacgtggcaaatctcaagtgacagtggannnnnnnnnnaaccgcccagcttatcaactcgtcccctcttccacaccttcccagcatcacagtcagaggtcagcaggaagctgagtcattaccttcttggtgacctcccccaccatcttgtctcacttggaaaccgttgtcagtttatttactatgcaatagacattcattgttttgtatccagctagctttggtttaatatgccactgctttgtctttctgttacacatacagttttgatttatttacaatatatgctgtgccattttgatttttatattgtttggttggttgaataaatttgcgacactcaa

SEQ ID NO: 321327 - DNA, 483 bp, Homo Sapiens
  misc_feature (366)..(374): n is a, c, g, or t
ggggatcacagaggctgttatgtttattgtgcagaacagacagtgataatacactagaagaaatattttcaacaagcaagcgattcaaagtacaatcatagacagcaattctacataaagaacaaagaataaagttagaagacactcaaaggaacagggagaaagtcaactgcagttaaacgtcttgatacttttctcctgcaaacatacctaacttgcagaaatggtagaaaagttaaatgtccagtcttatttagctgcgaccaacaacagcaaagaacagtcctataaaatttatctcccacaaaaataaactatatatataaaaattttatgatgttcttactgttccattggccacaagcnnnnnnnnncagtatgaaaaatgaggtatactgggacttaagaggtagtagtgtgttttgattgtacaacatacaggaaataaaagtgtaactttaccagagatggaaatcactcggt

SEQ ID NO: 321328 - DNA, 652 bp, Homo Sapiens
actaaatgcagctatgtaaaaataaaattcaaacgcccaggattaaaataaaatataatctgaaaacctcatgttctctctttccccaaactaagaaagtgcactgcatgctgttttcacttattcttagaaaacaagcatgaaagattcctcccattcagataatgccaaaaatatgtttaaacttttttttattcttttgaaaaatgatttgtaaattgagggtcatagttcagcatcagtttcatcttctgggattattgttcaagaccagcctctaatgggaggtgaaacggtacgatggtctcaacacctttcttctgaactgtaatacatatcacaaaaagtacatccataattcagggcaattgtcagtctttttagagaaggggccagggtggaacaatcccagtgagtaaattatttctcagcgtggacttctctgcatgtcgggcttaaggtcaccagccgggcagggtggaaggagcttgcctctttgagaaaccaaggagtcccagtgatctgttaccatttggttatgacttctaaagagccaaatgctattccttcaagcctgttttgcaggcagaaaataccagcagtgtcatttaggggttcctttgatgatgactactgctgttaactgacctca

SEQ ID NO: 321329 - DNA, 690 bp, Homo Sapiens
ccaattcttctatttcatgattaagtgcttttatttttttatcattgtcagacaattcttcctgaagctttataactttatcttgcatttcttttaattcctcagctgagcgtactttggtatcttcagccagcaaaaactgataagcaatatataaacgactcaaatgttctatttctctcattactttttggtactccaagtaggacgatctttcctcttttaatttttgaatggttggagtaatctcttcttcaagtatcgtcttaatttctttcagcttagcctcctttttttctatagttttctgtgcagctattcttttgtattcatacatcctggttccagctgcttcttctatcatggataaaatctctggaggtttcatattcaatacttttgtaattcggccctgcatgatgagaaagtgagggttgttaacattaaggccaacagaacagaagagatcctgtactctggtgttgttggcattgactccattgattaaatatttatttctaccaccaataaccaccccaaaagctcctccgggtcacaaaggcagggaacagaacaactctctagccggggccgctacaaagcgaacttcaccatagcggctacaacacctgccacaccgctctcaacacccgcgccggaactatttattcctttgaatttcggcgcgcc

SEQ ID NO: 321330 - DNA, 709 bp, Homo Sapiens
  misc_feature (481)..(481): n is a, c, g, or t
  misc_feature (500)..(500): n is a, c, g, or t
  misc_feature (558)..(558): n is a, c, g, or t
  misc_feature (577)..(577): n is a, c, g, or t
  misc_feature (597)..(597): n is a, c, g, or t
  misc_feature (637)..(637): n is a, c, g, or t
  misc_feature (671)..(671): n is a, c, g, or t
gaatggttggagtaatctcttcttcaagtatcgtcttaatttctttcagcttagcctcctttttttctatagttttctgtgcagctatttttttgtattcatacatcctggttccagctgcttcttctatcatggataaaatctctggaggtttcatattcaatacttttgtaattcggccctgcatgatgagaaagtgagggttgttaacattaaggccaacagaacagaagagatcctgtactctggtgttgttggcattgactccattgattaaatatttatttctaccaccaataaccacctgagacaggttggagatgcccagcaaaaagcagatggagtccaatatgttggatttcccactaccatttaagccagtgatagcattgaagagggggtcaaaaccattgacttcggtcctctgagcataggacttgaatccctctagaataattgacttaatatgcattttcgatantgtcttgggtcagcaaacntctgacaggaatcaaacaggccacaaaccagttacgggtcaccgcctgcctcaggcgnggggcttgacgcaccccgnaagctctccgggtcacggangcagggaacaggccaggtctctagccggggccgcggcaangcgaacttcaccagggcggctacaacacctacgnacaccgctctcaacaccggcgccggaactatttattgg

SEQ ID NO: 321331 - DNA, 479 bp, Homo Sapiens
ggcatctccaacctgtctcaggttcgggcgtctaatctacaagatttagtttacaaaaatgggcaggctgatattaccaaagcctctgtgtcaatcacttttgataattctgaccaaaaagcaaagtccctttaggatttgaggttcatgatgaaatcacagtaacaaggcaggtggttattggtggtagaaataaatatttaatcaatggagtcaatgccaacaacaccagagtacaggatctcttctgttctgttggccttaatgttaacaaccctcactttctcatcatgcagggccgaattacaaaagtattgaatatgaaacctccagagattttatccatgatagaagaagcagctggaaccaggatgtatgaatacaaaaaaatagctgcacagaaaactatagaaaaaaaggaggctaagctgaaagaaattaagacgatacttgaagaagagattactccaaccattcaa

SEQ ID NO: 321332 - DNA, 1106 bp, Homo Sapiens
tgttttgcccatggttttctttccctgaagcccttgaaattgggcttctgccggtccaagggatgataacccatacgaacttttggagtcaggtgtttcgggtggtgcaatcttgatggaggcgctggcaaccggggagagctgtttgatgtgctgccccttcttgccgatgatggcgcccactgcctgggcgggggataaacacctgcaccatctcctgctcgggagcctgcataaaggagctataggggagcagccccagttaacgctgctgggaggcggcgggactgcgctggatgaagctgggaaaagacctacagcagccaggttcaggccagggatcaggtgagactgcaggctcatggcagccacatcattctcataggcctcccgaactttcttcattatttcctgctcggccctgcaacaattctcgatggcccccttcacagtgatggtcctctcagggttgtaaagggtaaggtcttgcaacgaggagatggtgatttttgtctcggtatcttgctctaccttcttcaggttccgtccttccttgccaatgagacgccctacaaagttattatgggccaggatcttcaggggaacctcgtcagccgttttggtgtccttagcctctttatgcataatctccaagatcatcttacaagcggaggagcagccctcaggggtggagtgcacactgatggctttttcagctgcacctgcgttctccttcctatgcacgtctatcttggactgggtctgttttgtgatgttgcggatggtggccccctccttgccaataatggcacccacatactgggtgggcaccaggagccgaagggggatgtccacttgctgctgcttggctggggcccccgctgccacaggtgagccctggcggggctgaccccgagagccaaagccccctcggcgcccattctcaggtccctgtgctatctgctcatcggggatgtaggagaccttcagggcatggttctccaactggtggccattcagcttcatgatggcttgcctggtctgccctcgtgccgaattcgccacccaggcctcgtcccgggggtggcggcggcccggaggagata

SEQ ID NO: 321333 - DNA, 1421 bp, Homo Sapiens
  misc_feature (272)..(272): n is a, c, g, or t
gggtttcccagggttcattcctccctggggccaaaggagttttcctccctgaattgcccatagattttcccctgagcctggaattgggcctttgggcgttccaggtatggataaccattcgaactttggagtccgggtgtttcgggtgtgcaatcttgaggaaggcctgggcaaaccgggagagctgtttgatgtgctgccccttcttgccgatgatggcgcccactgcctgggcggggataaacacctgcaccatctcctgctcgggagcntgcataaaggagctatagggagcagccccagtaacgctgctgggaggcggcgggactgcgctggatgaagctgggaaaagacctacagcagccaggttcaggccagggatcaggtgagactgcaggctcatggcagccacatcattctcataggcctcccgaactttcttcattatttcctgctcggccttgcaacaattttcgattggccccctttcacagtggatgttcctctccagggttgtaaagggtaaggttcttgcaacgaggagatggtgatttttgtctcggttatctggctctaccttcttcaggtttccgtctttccttgccaatgagacgccctacaaaagttattatgggccaggatcttcaggggaacttcgtcagccggttttggtgtccttagcctctttatgcataatctccaagatcatcttacaagcggaggagcagccctcaggggtggagtgcacactgatggctttttcagctgcacctgcgttctccttcctatgcacgtctatcttggactgggtctgttttgtgatgttgcggatggtggccccctccttgccaataatggcacccacatactgggtgggcaccaggagccgaagggggatgtccacttgctgctgcttggctggggcccccgctgccacaggtgagccctggcggggctgaccccgagagccaaagccccctcggcgcccattctcaggtccctgtgctatctgctcatcggggatgtaggagaccttcagggcatggttctccaactggtggccattcagcttcatgatggcttgcctggtctgctcccggttggaataggtgacattcaccactgccgtctcactctcggtgttcacttgctcacagttctctactgtaccatactgagccagcaggctgtccagtacttcccatcggagctggggtggaatatttcggatttgaattttccggctcctttgttttttgggcaccgaatgttcaatctctaagcgttttccttgtaattctactttcccggagaaagtttcgatggccttcatcgcccagtgctcgtccgggcagtccacgaaggcgtagccggattgaccaagaaccctcgtgccgaattcgccacccaggcctcgctcc

SEQ ID NO: 321334 - DNA, 965 bp, Homo Sapiens
  misc_feature (18)..(18): n is a, c, g, or t
aacaaaatgtgttccaanaaacagctcctgtcccaagatgctggaacccatcagctgtagttgctttttggtgaaggcatccagcatggcagcaaattccttgaaagttgatttccctctgatgatcctatctagatacattttctctaggatcccataggcagcaagttgctggcacctttcatccttaaaaaggagtagctagcatccgagaacgctgctgccctgctgatgctaagatcgtacagtgcaaagcatgttttaaggcctctagtctttcactttcgtggactattgtcttgtaagagagctcattgtacctttgtgcagcttcaatgaattttcttctataatcaagaacacgtgcatagcataccttataatgtatctgtaattgttcattggttgattcattctgaagcaacgatgctcgatttatgtaagcctctgcctggactggatcatcatcctccagatatagcctagcaatcttcaagtaagtctccagtttataatctacattgtactgtttttgtcctgtttccaaaggaattcccaccaacacttgggctgcatttctccaatcttcttctttctcatatatagatgcaagatgctgtcttatggaagcaacctgctcctcaaatgaaatgactctaggctggatcttttccaaggtgaagtgatagatttctttggctgtgctatcaggcaagttaggaagatgtgtgcaaaaatcagtcagcaactgccgcgagatcacgagactgacattctcatttaccattgcttccacaaaagctttcaaagcttctagttgttctgctccagataactgaatggctttttccaggatctgacgatacttgccagccagatctttatgagagccgctcgaattcatgagctgggccaaatcctgtcgcacggctgccgccatctttctcccagctcagcggtggatt

SEQ ID NO: 321335 - DNA, 953 bp, Homo Sapiens
ccgctccaccattttactgggtctaggatttcaaatattacagttggcatggtatggctttggttcagaaccttggatgatgtgggctgctggggcagtagcagccatgtctagcatcacctttcctgctgtcagtgcacttgtttcacgaactgctgatgctgatcaacagggtgtcgttcaaggaatgataacaggaattcgaggattatgcaatggtctgggaccggccctctatggattcattttctacatattccatgtggaacttaaagaactgccaataacaggaacagacttgggaacaaacacaagccctcagcaccactttgaacagaattccatcatccctggccctcccttcctatttggagcctgttcagtactgctggctctgcttgttgccttgtttattccggaacataccaatttaagcttaaggtccagcagttggagaaagcactgtggcagtcacagccatcctcataatacacaagcgccaggagaggccaaagaacctttactccaggacacaaatgtgtgacgactgaaatcaggaagatttttctatcagcacccaggtcttagttttcacctctagttctggatgtacattccatttccatccacagtgtactttaagattgtcttaagaaatgtatctgcatgaactccgtgggaactaaaggaagtgggaacttagaaccagacagttttccaaagatgttacaatttcttttgaaaaaccttttgtttattagcaccaatttcttgccactaagctatttgttttattatacatcctttaattaaaaactatatatgtaacttcttagatattagcaaatgtctctgctaccatttccttaaggtgttgagctttaactctatgctgactcagtgagacacagtaggtagtatggttgtggacctatttgttttaacattgtaaa

SEQ ID NO: 321336 - DNA, 341 bp, Homo Sapiens
ggtgggcaatacatatacaaacatctttattgacaagtgagccaataagggcacatttagtttacagataaccaaaaacatttgaaatgcataacattaaaatttccaagattcatgttgcagtacaaacatgtggcaggttaaacatcaggcataaaaaggacaaatactgaaacgcaaagggccagagatcccaagtcgcttaacactatttaaaatgttattcaactgcaaacttcagcctctggaaccatcccagatagctactggttaagtgatatgaagtaggaaaaaagaaggttctggaaggtctcaaggaggctgtgcagaaaacagcaccc

SEQ ID NO: 321337 - DNA, 374 bp, Homo Sapiens
  misc_feature (191)..(199): n is a, c, g, or t
tttttaaaaagtttatttctagccctgaaagaacaaaattattgaacaaagtcaaaatacagcagttaatgtcaatgtataacaattaaataattgaacgggattaaattaaaaataaaaggctttttatttgaagacaacagaaaagacaaaaactacttttgcttaattccatttctatcaaaacaagnnnnnnnnngccaatgcgttccaaccaaagatgttgaattccacacgtaactgtttctcttattacttctgttctcttagaaacacttctaagttctaagagaacagaagtgtgcttgacagaactatcatccatttctttctgcctctgtcttggcagctttctagagaagtgaatgggaaag

SEQ ID NO: 321338 - DNA, 502 bp, Homo Sapiens
ttttggtagagactgggtcttgctatgtttacgaagctggtttcgaactggaactccttgcctcaaataatcctcccacatcactgtcctagaatgctgagattatagacatgagccaccctgcccagccagctgatccttttttttaacctatctatgcttttgcttgcatagccacttaacatttctagttgatcatctttggtgaaaactacaaaaacaaaggagaaaagggcagattgaaagctccactctcctaaaaatgtaaacttatcacaagaaaatgccaggttttgtatgtaccattcacattttggtgataattaactctctgtagaaaattttggaaatctaattaattagtaccttcaatacctttagttgtctcccacacacgcgtgtgtgtgtgaaatcttctacaatatcttcccttttttagaccatgttcactgtcaaaaaggtgctttaatagcagtctttggctgggcacggtggctcacac

SEQ ID NO: 321339 - DNA, 927 bp, Homo Sapiens
  misc_feature (173)..(182): n is a, c, g, or t
  misc_feature (895)..(895): n is a, c, g, or t
  misc_feature (913)..(913): n is a, c, g, or t
aaaaatgcaactacatcccctccatgtgcatttcatacactaaaggccattttgtggtggtgtggtgggttttcccagggttttctaaaatccttttcaggtacatttcctgccccgccccctgcaggtcttccaggatgcaaagccagtgtgctcactcttctccaaatgannnnnnnnnncaaccccccgggggtggggttcttcagcagtgcacaggatgtgggctctggcttcttcaagtaccgtggaccacggcccttgggtcaacagcaccggcggctggcttgcatggttggcttctcaactttgattgtttcattgtttccattttcatgggggtccaagggtgggatctggcggctgattccttgaaagagctcttcgatattaatagcattttttgcacttgtctcaaccacgatggcacctatggattcagcgtattccttagcatccttcaggggaacctccctaatatctgagaggtcgcacttgtttccagcgatggccattacaatgttttctggaccatgttctttcagctccttgacccatttcttcaaggtataaaatgaatcctgcttggtaatatcatacacgataacagctgcagctgagcctcgatagtacatgggagccaatgaatgaaaccgttcctgaccagcagtgtcccagatgaggaacttgtgaagttcatttccacaaggcacagttttggtcataaaagatgccccaatagtagggctgatgttgtggtcaaagtgatcctggacaaatcgacacacgatgcttgatttcccaaccccagtgtccccgagaaggcacactttgagctcccgtatcgccatcatgtgctcgcagccaggcagtgccggggctcagcagcaatccntccggggccgccgcccgnccccgccggcgtct

SEQ ID NO: 321340 - DNA, 1058 bp, Homo Sapiens
  misc_feature (993)..(1001): n is a, c, g, or t
  misc_feature (1005)..(1005): n is a, c, g, or t
aaattctttttgacttttttcctcgtggtccttctgttatcctttctgcaggtcgcttcttcaaccccttacatttttcctggtttgtagtttgcttaggtcttgctttctgcatatgaatccttccataagttgtaccaaaagtatcatgggaaatatttttctttttctttggcttgagagcttttggcattttcatagataattataaaggtcatccgatgccaggtgtgtcttcctcagaaccagatccaatgagggtcccatctcttccaattcaatccgtggtgttctgcaaccagatttcttcaacagcaacttatagcttcgaaagtaaatcttcccattcagtgcagtgaagtgcagaacatactctaatccagccaggcggatatttgatactggtggggcctctgaagaaatcaataagaagactttttagtcttctataatcttctgttacatcgaaatcatcgccagcaaatatcagcatgggttttgttccctcaggacatttactgttcttaatgtcttttagagagacaaaattctcaatacctaattcaatcatatccagcacatggtagtcatacatacgacctattactagattatttggccgcttcttattatgggagccaaacatgaataaagaacaatctgacttctttgaaaagaattccagtgatgtctgatcctcaaaaggtcttgtaatatttttctttttatatagtacaccgtatggttttttcagtgcatacacatctttaagtacttttgtcactgttgcatttgcatttccccctttaatcagcatggcatttttaatattttcattgagtttcggttctctcttctcaaggaatctcttggctcttttcgttttgggctttactactcgatccagagtgtccatcgctaccgctacctgcaactcttaaccagggggcatgcacgtgccctcggccgtaatggccgaattcccgggcatannnnnnnnnccanaaaatttttcacttccgtataatgtatgctatacgaagttatgcggccgcttc

SEQ ID NO: 321341 - DNA, 720 bp, Homo Sapiens
  misc_feature (420)..(432): n is a, c, g, or t
  misc_feature (642)..(642): n is a, c, g, or t
  misc_feature (651)..(651): n is a, c, g, or t
  misc_feature (675)..(675): n is a, c, g, or t
  misc_feature (691)..(691): n is a, c, g, or t
ctctctttagctcacaattagtaaaaggttcagtttaatgtgaaactgaaacacacgacaacataatgcgccttcatgtaaatacgctaacaactttgttttcttgaagtttaaaaggatagtataattaccttaaatttacacaaaacattaagaaacatggtagttgtttatgattaaaataaaatagcaacgtaaattaatttaacacagtgttaaatatattcacacgatcaccactgtgattcaaaatggccactaatgcagttacatatcaatatatgtacataacatttgtcacaacagtttttgtaagtttgactttctgcagaccaggtttacgagacaaatagccttgtatcaattctttcatattatgaaaggaattaaatgttgtaagtacgtttcattcctctgcannnnnnnnnnnnnaagaacctctaaaaagtcagtgtaaattggaggagagttctaccttcttgaatatttgaacctgttgacctggagagattcctataagctgaggataaacacatcttaagatagtaatgaatccccataacattgtccagtgggcatttagcaggtatctgccaccaagaggaacacccggggccctatagcagagccttctggagaatntgggttgcngtggctgaggtggctgttggctgnccccggggctgaagcngagttgatgatggttaagttatagtttgg

SEQ ID NO: 321342 - DNA, 506 bp, Homo Sapiens
cctctttttgccaccaatcccttcgatcaggatgttgagaaagcaaccagcgagatgattacctgctgaggactggggcctcaattttggatatctgtgataaagttggtcagtctcgcactggacctaaggattgtcttcggtctattatgagaagagtgaaccacaaagatcctcacgttgctatgcaggctttgactcttctaggagcatgtgtatcaaactgtggcaaaatttttcatttagaagtatgttcaagagattttgctagtgaagtaagcaacgtattaaataagggtcatcctaaagtatgtgaaaaattaaaggctcttatggttgaatggacagatgaatttaagaatgatccacagcttagtctaatatcagcaatgattaagaaccttaaggaacaaggagttacgttcccagctattggctctcaggctgcagaacaagcaaaagcaagcccagctcttgtagccaaggatcctggtactgtggctaac

SEQ ID NO: 321343 - DNA, 550 bp, Homo Sapiens
atatttttaaggaaatgcagctttattactttcaagtacaaacaataacttgggcttggctaaccaaatttgcctaattgagggaatctgctttaatgtacagatataaatgatttatagttaacacaatcactcacgggtaaaaagagtgcttctatgatgcaagaaaataacttctcatcttagagacatcttgttccacaatcaccccactatttgcttaagcaacctcttcttccccctaccccacacagttcaaatataaactttatctcatgccctctaaatcacaacatacatcaaattcgtgaaatatgagttgattactttttccacattgctatagatgttggattgctgacagaactatctcttcaacctgagcattctcatcaagtatactaagtctaaatcagtgaaatatgcctgttcacaatctgagtacaaagacaccaaaacatgagcttttatcatctgaattactaattttccagggttgaatattaaaaacacatatttacttgggcacatttatgaagagtagaagtcc

SEQ ID NO: 321344 - DNA, 971 bp, Homo Sapiens
  misc_feature (595)..(615): n is a, c, g, or t
tgcgtgcactttcaggtcagtactggggaccaagtaccctctggtcttttgtgaatggatggttttgtttcctatgggaattttggcaaaggttttctggaaagaacaagtttctcaaaggactttcttcctctagaatgttcattttatgagatcgcctactctgtaagtccagttggattaccgggaataccttgaaagttacctttcctacccactattagaaaatatgaagtcgcatgcactggatatcctatatatcattaggtttttgttgtgtttttggttatgctgtcccccttctccttggggagatatttgggagcaaacttatttagatttagagtaaacttttcattatagagcaagtaaaaacagacaaatgaaacaacctagtgtttcacataaaaatacttctgacataaagtaccaagagcagtgtgaatatacttggcatagtcaaaaaagaaaatacatttaatattagttcaaaattgttaaaaatacctttagaaggtctagtctattattgaaaactcaattttttcacttatatggctttaaaatggagctattttgctacaatataatgtannnnnnnnnnnnnnnnnnnnnaatgttaatatacatagctagacttaaggtttttcagaaagatgtccataataaatattaaaaacaatggtattttttaaaaaactgccttagggttttaaaaccttccctacagttataaccacgtgtaattttgtggaaatgatataacagctattaatactactataacataggcataaatattttcgtgtttatatgcatatacaagttaaaataattagaaactatgactgcgcctagtaaagtcatctaggtttatagttcagtagcttaggcaaggcacacactgctcatctccgctttttagggtcagaggaacacaagctcgtgttctgagtgaagggcgtacactg

SEQ ID NO: 321345 - DNA, 572 bp, Homo Sapiens
  misc_feature (496)..(504): n is a, c, g, or t
tgttttctattttcttttcatgaaaacactgtttttccccctaataaagcatattttactttggtgcttatttttcctccttgcagtctaataaaaaaatctggacaatcaaaccttaaaatagctacactctgccctctgtaatgtagcattcataaaaatttggaagtatttacatcctctttcaagatgagcttatatgacacaattattatttcgctgatacatgaaaatactgcactttaagtttctcaagactctgcaatatgtaaaattcaatatttttatcttcccagaaattgtttcttacaggttgaaagtcttttaaggtcatcacaaattaacatttactcctaatgcacgcctagaatgtattttaaatacttactaagaagaatgaaaattctttggttgttttatatataaataaggcatatataatgacactgtgttctgtgagggagcaggccctgtgagaatcaattcaggacagtannnnnnnnngtcctttctccatccttgatcagagataaactattaaaactttaaaaaatactcaaaaatatgtaagt

SEQ ID NO: 321346 - DNA, 1303 bp, Homo Sapiens
  misc_feature (976)..(987): n is a, c, g, or t
  misc_feature (1190)..(1190): n is a, c, g, or t
agctctgcacttccctttgttgtagtctcacagtataacagatattctaattcttcttaatattcccccataatgccagaaattggcttaatgatgctttcactaaattcatcaaatagattgctcctaaatccaattgttaaaattggatcagaataattatcacaggaacttaaatgttaagccattagcatagaaaaactgttctcagttttatttttacctaacactaacatgagtaacctaagggaagtgctgaatggtgttggcaggggtattaaacgtgcatttttactcaactacctcaggtattcagtaatacaatgaaaagcaaaattgttccttttttttgaaaattttatatactttataatgatagaagtccaaccgttttttaaaaaataaatttaaaatttaacagcaatcagctaacaggcaaattaagatttttacttctggctggtgacagtaaagctggaaaattaatttcagggttttttgaggcttttgacacagttattagttaaatcaaatgttcaaaaatacggagcagtgcctagtatctggagagcagcactaccatttattctttcatttatagttgggaaagtttttgacggtactaacaaagtggtcgcaggagattttggaacggctggtttaaatggcttcaggagacttcagttttttgtttagctacatgattgaatgcataataaatgctttgtgcttctgactatcaatacctaaagaaagtgcatcagtgaagagatgcaagactttcaactgactggcaaaaagcaagctttagcttgtcttataggatgcttagtttgccactacacttcagaccaatgggacagtcatagatggtgtgacagtgtttaaacgcaacaaaaggctacatttccatggggccagcactgtcatgagcctcactaagctattttgaagatttttaagcactgataaattnnnnnnnnnnnnttagactccaccttaagtagtaaagtataacaggatttctgtatactgtgcaatcagttctttgaaaaaaaagtcaaaagatagagaatacaagaaaagtttttgggatataatttgaatgactgtgaaaacatatgacctttgataacgaactcatttgctcactccttgacagcaaagcccagtacgtacaattgtgttgnggtgtgggtggtctccaaggccacgctgctctctgaattgattttttgagttttgtttgtaagatgatcacagtcatgttacactgatctaaaagacatatatataacccttt

SEQ ID NO: 321347 - DNA, 1351 bp, Homo Sapiens
  misc_feature (432)..(432): n is a, c, g, or t
  misc_feature (781)..(868): n is a, c, g, or t
aggtggatgtagactttgaaaggcttcttgttccttaacggcatcggctcatagaccgttgtcatggactccctctagaccggaacaattttctccaggtttagcaagagcccacccacacggttcagcctcttcctgctcctctctgaaggaaatggtcttaagggcccctctcagccacggcacggcctttctcgatctcccgtggcctgcaaggttggaaaaccaatgtactgcagccacagaatggagctgttgggggagctcagcaccagtcggtcaaaatcatccgcggactctggctgccgcccaggatccatcagcgcctcctcaatgcgggacagttccttctctgcctgtctgcttctccaactccctttctttcttgcttttcttgtatgcgtggcttggtgtgggtttctcatcctcctncgctgtttgagctctctgctagaggtggcaaggccgggttcagagagtctagtccccacattccaaggcgaagcctgaagacagctgcagcccggggcgcttctgctggcttggtttgcttctccttgggcagcacattcgtctcttctgcctcctcttttccctcccgatagtacacgtccacaaggctgtcgtcctcctctgacaggccggctttctttggcttcttgctcactcttatcctgctcactcccagactcccggcactcccgcccgccccagcttctgcgcctgtggcttctggggctgttgcttctccttgctgggcatctccacctcctcctgcccnnnnnnnnnnnnnnnnnnnnnnnnnnnnnnnnnnnnnnnnnnnnnnnnnnnnnnnnnnnnnnnnnnnnnnnnnnnnnnnnnnnnnnnntttgtaagttgcccttccaaggaagcagaaagcacgtctggcttcccagtgtctccggggaggaaagacagctctaccaggttcttctggtggttaaggcgtaggaccctggctgtgagcagcttcccttcagggaggtgtttgttataaagggctttcttggacgggctgtgctgggagacatgggagtaccgagccaaacccacaacggaggggccaaggcgaaagaacacaccgtgtggctggatggaccctacatagcccctcagaagctgcccttccttaatgtcctggatggagttaatctctggatcttctactttgcttttcgtctccgggtttgttctggatgatcgcagcgacaaagtcaatacgttgtctgcagtggacaggatgtaacatctgacaaccttctgggggacgcagtcttccaggggcgtctcggagtaggagcctcgtgccgaattcgccacccagcctcgc

SEQ ID NO: 321348 - DNA, 1401 bp, Homo Sapiens
  misc_feature (64)..(64): n is a, c, g, or t
acgcgttctgagctctctgctaggagggggcaaggccgggtccagagagtctagtccccacatncccaggcgaaacctggagacagctgcagccggggcgcttctgctggcttggttgcttctccctgggcaagcacattcgtctcttctgcctcctcttttccctcccgatagtacacgtccacaaaggctgtcgtcctcctctgacaggccggctttctttggcttcttgctcactctttcctgctcactccccagactcccggcactcccgcccgccccgcttttgcgcctgtggcttctggggctgttgcttctccttgctgggcatctccacctcctcctgccccttctggttcttcttctcgttccttttctgatttttcttttcccctttttggtctctctcctcagcctctgttttcctctcctcttgctttgtaagttgcccttccaaggaagcagaaagcacgtctggcttcccaggtgtctccggggaggaaagacagctctaccaggttcttctggtggttaaggcgtaggaccctggctgtgagcagcttcccttcagggaggtgtttgttataaagggctttcttggacgggctgtgctgggagacatgggagtaccgagccaaacccacaacggaggggccaaggcgaaagaacacaccgtgtggctggatggaccctacatagcccctcagaagctgcccttccttaatgtcctggatggagttaatctctggatcttctactttgcttttcgtctccgggtttgttctggatgatcgcagcgacaaagtcaatacgttgtctgcagtggacaggatgtaacatctgacaaccttctgggggacgaagtcttccaggggcgtctcggagtaggagtcactcatgtgaaatatactgactgttcctatcttcccaaaggggaaggagacggtcagcccctcgttgggagtcaccttcaccactcggcccatggccacttccccttcctcaagcttgtgaggacctgtgagggacagacataagagggtcttggaggaatctgggccaacaacggtggccctcagggcctggccaacccggaacttcttatctggatgcttcagaaccttgaagctcagagaagtgagcaataagggaattctcccccggatgtctggggcaatctccacctcaagccatttcttcaccacattgtatttctttaagaagcaagtaacagtctggccggcctggtactgtttaatcttctccatggggctaacagagtgagtgttaagagcagtgtggccatcctccagctcacttggccgaacactcagctccgggatggttcgacgacgcgtgggtcgacgatatcccagattccggaccgtaccacctgcattt

SEQ ID NO: 321349 - DNA, 401 bp, Homo Sapiens
gcgtttaaaacatttgggctattccctgacgatctatacatgtaaatttgattgctaaacattgtcactttgaatgtcaaactatttttaatctattgattttgattaaaaatcataatacaaacagagctaaaatcacgctaacaaaataaactaaatatgaaaagttgcattgaaagggcatcacattattcttaataggatcgtgtagaaacattccaatggcagtgttctcaaaataaaacaaaattacattagaagacctccagcctggccacttttgggaccttacctgtaactctggctggtgggtgtctttactcttgtactacatggctcacttacatcagacatcatatttgtataccctgagaaatctgacactgaagtccttactctat

SEQ ID NO: 321350 - DNA, 1182 bp, Homo Sapiens
  misc_feature (91)..(99): n is a, c, g, or t
  misc_feature (158)..(168): n is a, c, g, or t
  misc_feature (270)..(279): n is a, c, g, or t
  misc_feature (412)..(537): n is a, c, g, or t
  misc_feature (826)..(826): n is a, c, g, or t
ccccgggggggaaatatattttgcccaaaggcgccccagaggtttttaaatctccccccgggacattccggggttcgtcaatcccccgttnnnnnnnnnttccctattggggcaaaaatctttttgagaattctcccccctcctgggaaaaatgccannnnnnnnnnncaatttgaatttcaagctcgggtgaccccccgggggaagaacccccaatggccctcggacccccctggggattgttcccaaccctctttttcccccgggggnnnnnnnnnnggggggatcccagccctttttcgggcccgggttttcctgggaaacattatggcccggttcccgtccccaagggggcccggggccaaaaaaaagggtttgaaaacttttcggggggcgaagcggccccccaagnnnnnnnnnnnnnnnnnnnnnnnnnnnnnnnnnnnnnnnnnnnnnnnnnnnnnnnnnnnnnnnnnnnnnnnnnnnnnnnnnnnnnnnnnnnnnnnnnnnnnnnnnnnnnnnnnnnnnnnnnnnnnnaaccaaaacactgaaactttaattgaatgagaattacatctgtcaaagacctgggcagtacactcctctctcctctctatagcactcattccttctgaggtgtcatttcaccagccagctgagtaagtgctccagctatccccagaccagctagagacatcccaagcatggtcatgttagcatcaatgtccaggcatactcagggctcagaatcgtgggttagtaccacttttcgccactacccccttatattccacaagggactcacagccagcaggttaactctccncctccctacccccaccaaaccctggaaaatcacagacagcctttttacagctcctctttctcggcccccttcttctggaaggcagtcaggatgtttaagctcttctggagctcctccttcttcccgtcactcatcttgttcttctcaatcagcctggcgatccgtgtcatctctgatgctgggaagtcctccccttggtctaagatcttccccatgatcttcaggtattgctcggcccacttcttctgagtctccttcacacttgagaggttatcttgcccctgcttcaagagggcctggcgggcctccacaccagaggccctgatgaactccccggccagggcgtcgtataccgg

SEQ ID NO: 321351 - DNA, 902 bp, Homo Sapiens
aggggactctcccagcccggcagggttaattttttccccttcccttaccccccaccaaaccctgggaaaatcacagacagcctttttacagctcctcttttctcggccccctttttctggaaggcagtcaggatgtttaagctcttctggagctcctccttcttcccgtcactcatcttgttcttctcaatcagcctggcgatccgtgtcatctctgatgctgggaagtcctccccttggtctaagatcttccccatgatcttcaggtattgctcggcccacttcttctgagtctccttcacacttgagaggttatcttgcccctgcttcaagagggcctggcgggcctccacacccagaggccctgatgaactccccggccagggcgtcgtatacaggcaggcaaccaggcatacctaggtagaccccttgccccttcagccagcgctggatggctccaaccttaactgccccagtgtatgggactgggttctcaaagtccccatcccggaagaggtagaagactgggtagctctctttgtccagcttgtatttctcactcagctccatgttcagcttgtcaccataatctgagatccccacctctgccaccaagagatcatcgctggaagccgagttttcagcaagacgcttgaactcatcctgcttctcaccgtaggggtactgggtgtcgaacttcaccaagacgaacttgcttttgggaatgaccttgtagaaagtgaccgtatccaggggaagggcgcccttggtgtgcaggccgctgccgccatgcggagcggagaggagcaggaagcccaggagaaggggaagcagcggggagagaaatgcggcgcggggcacagcggcagccatatcgccgggttcctgcagagggaggtagg

SEQ ID NO: 321352 - DNA, 985 bp, Homo Sapiens
  misc_feature (12)..(12): n is a, c, g, or t
  misc_feature (50)..(50): n is a, c, g, or t
  misc_feature (81)..(81): n is a, c, g, or t
ggcccccaaagnaaagaaacattcccaaatttggccctttttccggtcanggaggcggacctaaagaaaacacctacctanggaataatttaagactgaagatgccagccattaatccagactggttgtgcaataggctccccggttccaactgcgtggtcagttgcctatcctcctcagattgggagctttatataggcagactatgcctgccttgctcactgctttctccttagaacgagtcccatgcctggcacacagaacacacaaatatttgaataaagtgaatgagtcttagtatatgcttttagaattatttattcaaaaacactttataataaattcaggtaacagtaaagtaatacattcaatagtactaaaatctatagaaaatagataatttcattaaggtgcaattaaaatacttgaaattgggacacatctctatatttcaaaccaatatactggctttctttttaaaagactattctagtctttacgatgtccaaagtttttcctctttgcttttatttgctttagaccatatttaaatttttagcattcctaagtgcatacattttaggcatatactataatgaccaagagtttgtgaacctactgattaggtaaacactttggggaggtatgacctgcacaaagtagggtgggaaagctattatctcccttaatctggacacaactgttcaagcagtctataatttattagcttctctgatagcttcactatttggttttcattgaccttttgagcaactgactggcaaaccccagattcttttcgcctgaaatcttttcaagttagatactgtccatattacacttgtacttataatttactatcttcttgccttggacaacttatttctccaaattctgatttctccagcagtgtattgggatagtatcactaatcttgcaaagtaaagatcagaaatgctgtacataatatgggtcagtgacttag

SEQ ID NO: 321353 - DNA, 1078 bp, Homo Sapiens
  misc_feature (47)..(82): n is a, c, g, or t
  misc_feature (132)..(143): n is a, c, g, or t
  misc_feature (147)..(155): n is a, c, g, or t
  misc_feature (299)..(300): n is a, c, g, or t
  misc_feature (302)..(302): n is a, c, g, or t
  misc_feature (305)..(305): n is a, c, g, or t
attttggaggcgcgcgggggggacctcctccctttttggaggggcgnnnnnnnnnnnnnnnnnnnnnnnnnnnnnnnnnnnnttgggggaatttttctccaaaaaaccctttggggtttcccccccgggggnnnnnnnnnnnngtgnnnnnnnnnaacccccgccccttttttctttgccccgggtttttctttgggaaacaaagttttgccccattttcccctttcccttttgggggcccggggccccaacggaatggttttgaaaagtttttgaagggcggagccggccgacaagcnntnatntccttgttgagccggtcgtcggcaggatgagacacatttattctacatctggtcacagtaaatctcacccagaccacaggcaggatgccacgtggctacaggcagctggcggaaatggagatcatctgttctggtgctcatggccactctgggcagaaagcaaaggtgcctcatggcacctactcagaggcactgaggccacattcccatctccaggcaccagggatgtctctgaagggtgattccatttggagtttccaaaatccaggacttctgagagccaagccctagttccaagtcatcctgagtccaggctctgccagaatcttgagcacctggagctggtggcaaggcagcctgggggctgaaagggcctcagactggaccacagggcagcccaggggccctgggcctcagggtcgacgatcctttctgcggtttttgtgtcccacctgggaacctcgccgggcagccttcaccaggcctttgaactgtccctgcagcttcatcttcttcctgcggttgagcttggttctgttgagggggatgtaggcatagggatccggccggcctttcttcttcacatcacaaaaactttcttggccttgtattcagccccaggcatagccttcttggccacagggcgatgaatgccagagcctccagcttggtactgagggggtatctccagctcctcctcctcagcctctttctggtgcttgagcttctggtgctttttattcctgatgatcacatcttccattgggtcagcc

SEQ ID NO: 321354 - DNA, 982 bp, Homo Sapiens
aataaaatcgtacattttcacgaaatctgtttaccactatacctgatttaattccgtggcttatctctgaggatttgccaatgggccccccagaataaggtccttcacaagtcgcaatacacgtgttcccaggtcacgacgtgtaaaacgcggctcagtccttacttataatcggctccctataggccacactggacaagaaactggtacggttaacttgggcccctcgagggatactctagacggccccccttgttttatttttggtttcacaatacatttatttagaaaagcaacatacagtaataggtatttcagagaattcagcaaagtataaagacaaatacaaaagatgcttgggatacaaccgctagcttctgccttccacacacagtggattttactgtaactgactagagttactctggtgccactaagttccgagccaagtctacggccaccactggaagctgtggctatttctgtggactgacgttacactgggcttcattgttctttcatttaacaaatgtgacagggaccgggctggggacacacggggaacgacagtgggtctctgcccatgggaactcacaatctaacagcgagacgaggcacaaacggctagcacaggatagcataacaagtgccacccaaggtacaggctcagggtgctacggggacctgcaagaaggccacctgagcttcgggtagctgggaaggcttcctggaggaggtgaggcccaaggtgggggtgagcctgggccaggcaaaaggcaggcctctcggcgcccatctgtggttcctcaacaccctgtgtgtgcaggcccctcagctgacctgtcttctgtgaaattcttgatcccgctctgttctattcacactgtgctgctttgccttggtggttagcatggttagctttcacaagcacaagcgaccgcgtgggtcgacgatatcccgaggaattccgcgaccggtacca

SEQ ID NO: 321355 - DNA, 1017 bp, Homo Sapiens
cggagtcgctttctcttatattgtggatattttatccctgtctttcacagcagcaattttaataaacagatgcctgcagcatttcaccactacacaagagctactcgcgctcgggcaggcgcacacctgcctgtgtacacaggtcctcgcacagcacggcaaacgcagccaggcctttgggacacaggcctctgaagtgtaagttagcagccctcaccccgacaagcttctaaagaccaaaaatacctctatcctccactacataaagcttgtgagtagcaaaacttgtaaaaatgaagtgtacaaaaggaaacatccgtataatacatttgcaccctgtatacaatgggtccctttgaaactggccaacagtcagcgatggcagattttcaatcatagaaaaagaagccagtggctgtcatgcgcactcaggtcaatggtttgtgtgggttctccagagagagagattttcctttacagttacagtacttgctggcgatcttgctgattaaaaggccagttgaatttcctggcatttaggcaagtaacatttgattgtcacaacgtacaattctgagacaataaatacaagtagatcagatgcatttcttcattgtatcaagtaactccagtttaatgtaatacaatttagtgcatttcagtatctcattcacagttcgacttctgtccaaatacttgtgcaacaaaaagttaagaaatggagacgaactccaggtgacattgtcattacacagcttcaaattctaagacaactcaatgatctttgaaaagcgtacgctgctgttgcctgggccggcgacaccaatgtccctggtaacttcctgggctccctaaaagtgttcccgtcattctatttcccgagcagtttgtaagaatgccaccattatccctgaattaacaagcagccagtggggagttgttcatggataaaactggaattccatggtggtccacccccacttcccaggcagattcaggtggtggacatccttttac

SEQ ID NO: 321356 - DNA, 1111 bp, Homo Sapiens
  misc_feature (131)..(160): n is a, c, g, or t
attgacaatgattgcttgatcacaggggtgagtgccccaagggctggtagtagaagctgttgctgcagaccagtgtctcctcttccctgcactgccagctcctacctgtgcatcgccccatatatactggnnnnnnnnnnnnnnnnnnnnnnnnnnnnnnttaaaaaatctgtccccaccacacaaacttctctctataaagcagataacagggaagaacaataacaaaagcaaaacaagccaattgctctctctttgggatatgattatttcccttgtgaatgaagtattcaacaacataagaaaaggaaaagaacgatttcttttgtatactccctaaacacacagagtttactgggtcagatttaactgtgagcatttatatgcctacttccaggcatcgtcatctgatgtttcactgctactggtttcggtgtctgagtcctcaaactctgctttgcaagtgcttctccaaggggagaacagactggaactgcggctctgcaagaagccattctttccaaagccatttcttctcagctgctctgtcttcatgtggaactctttgagctcatcctctgtgaggggaaggcaattctcatcattttcaggatattcctgccaacccatagctttcaataacctgtgctctgcttctagagagtgtgagagaacctccccttcttccactacagggagggcaagaccattttgatgacagccttcctccccattttcctttggttcaggtgtgctgttgtcctccaaatcttccagcttgtcacagtctctattctctgagaagtctccattccggtcatccttcagagttttcaggaactcactcttcctgtcggtggttcggcgggtcaacttggtcagacgagaggagctgatctcaattggaggggtggtgctggagggactctgggcaaataccacaaacaggttgctcctgacagcaaagagcaagaactggggttctcttctactaagtgctgacttcaagaatctggtagcctatttatcactctgtcttaaaccaaacaatccttttatttaagcagttcaaacttcagttttgcagggtttatatagttaagagcagctg

SEQ ID NO: 321357 - DNA, 1291 bp, Homo Sapiens
cggcacgaggcggccatggcaactagtctcacgaatgtaggaaactcatttagtggtccagctaatcctttagtgtctagatctaataagtttcagaactcgtcagtggaagatgatgatgatgttgtttttatcgaacctgtacaacctcccccaccttctgtaccagtggtagctgatcaaagaaccataacatttacatcatcaaaaaatgaagaactacaaggaaatgattccaaaattactccttcctcaaaagagttggcatctcagaagggaagtgtaagtgagacaattgtcattgatgatgaagaggacatggaaacaaatcaagggcaagagaaaaattcctccaattttattgaacgaagacctcctgagactaaaaacagaaccaatgatgtggatttctccacttccagtttttcaagaagtaagaccaagactggagtaggaccttttaatcctggtagaatgaatgtggcaggagacttttttcagaatggagaatttgcaactcatcatagtcctgattcttggatctcccagtcagcttcatttcccagtaatcagaaacagccaggggtggattctttatcaccagtggccttacttcagatgcatctacaaagaaggctaatgtcattcttccagtagaatcaagcaaatccttccaagaattttatagtacatcttgtttgtctccctgtgagaacgactggaatcttaaaaaaggagtttttaataaggcaagatgtacaatttgtagtgaattagcagaggtctggatttttatacctaagttgttgtgtaggctaacagtgataattttaacttttaagtgctattatgtactctttcatctacataatgcacgtgttctggatgtataacatgaagctgaaagggagaataaggatatgttagaactatcttatgggatattttataagtacaattccagttgcatagcatggaaagtacccattctgtttctatggaagtggtgtgctcataaacaaggcaattgttttatggtggaatttggtaattcctgatgaacttaaaataaaaatggaggccccaaccaagtttcccacctaaatacctgccgaacatggtcggcccgccctcggcccccgaagaaaattttctacgaccatttcgttttgggggccggcgcggcccccattaagggaaggggggaaccctgggggccaaaagggttgggttttccccacagagaaaaaacccctgggccacatatgggatcacaaacggcgccatttag

SEQ ID NO: 321358 - DNA, 1181 bp, Homo Sapiens
  misc_feature (553)..(683): n is a, c, g, or t
  misc_feature (740)..(800): n is a, c, g, or t
  misc_feature (816)..(828): n is a, c, g, or t
ttttttagtgctgacaaaataaaatactcatttttgcataaaaaggttcctaatccttttgcagaataagttttgtttactctttataccaaaattcagtgaaggcattctacaagttttgagttagcattacattttaatatttactattgctacattgtataattgagtttgaaataaaacccagcttatgacaatgcattccctgtgcaagaaactgtttggctttcaaattacccaggcattgaaaatgaatgataaaaagttgctgtgtaagggaaatacagcctaaattgtttttgaaagccagaaatgatacaaagttcagtcatgccaaagtgaaatactttctagtgccagctttaacttaaatcatacgttttaaaaggacagtatacagagaattatgggaaacaggcttaaattttgctccatatttaatgtagacgtttatagaagtttcccttaatttgtaattgcattcaaccgagaatttctcataaaagactaatttctgtgtaaagatattacgggctgggtgtggtggctcatnnnnnnnnnnnnnnnnnnnnnnnnnnnnnnnnnnnnnnnnnnnnnnnnnnnnnnnnnnnnnnnnnnnnnnnnnnnnnnnnnnnnnnnnnnnnnnnnnnnnnnnnnnnnnnnnnnnnnnnnnnnnnnnnnnntgcatctgtagtcccagctacttgagaggctgaggtgggaggatcctttgagtctcnnnnnnnnnnnnnnnnnnnnnnnnnnnnnnnnnnnnnnnnnnnnnnnnnnnnnnnnnnnnnaggctccatctaaagnnnnnnnnnnnnncgttacttaaacttgtaactattaaatggcagtctcaaaattattgcatcaatttaagattcatagtagtttaagagcacatatgcttatctaaggtgaggcaaatagttctcttgctttacgaggtacctttagacttacccacggcccagtctggtgcaagattttgcctgggggttataaataagggtgaatcaggaggctttgtacctatttctggtactctgacctgacatcactagttcaaagaactaaaaaattaggttatttccaggactgagctaagaaggccagagtgtgaagtagtagctgtttttgaaacaaatagatcagctcctggctttggggttagt

SEQ ID NO: 321359 - DNA, 639 bp, Homo Sapiens
  misc_feature (266)..(309): n is a, c, g, or t
  misc_feature (551)..(551): n is a, c, g, or t
gttacaacttggacttactaaaatccctctcttgcctatacctctaaaacctctaaaaaattgctccttcacaaacctgttaagtttttacaaataatacaaatggcttacgataaaagtgcatgagggaaaaaaaattcatgggaaagctaaaatgaatgcaattttaagtacgacataattgggaagaagtttcatttagctgattgttttatacatgctgtatgaagagacataatcttttaaagagtcataagacttttttnnnnnnnnnnnnnnnnnnnnnnnnnnnnnnnnnnnnnnnnnnnnttgtaaattttaggggcaagttttgaggggcttattgggttttgagatgaaattttgaacccagtggccaaaaggatgtatcactacatgatggcacgggaaaactcaggagggaccttaccaaataccttggtttaaatccagagataccatgataacttcgttctcttgatctgcatagtgtttctaagccagattccacagatatgttttggagtatctaagagttctttttgataatntttaactttatgatttaatttttttaatgacctcagaaattaacagatgcatatgatggttcatctgaatgaataatttataatagag

SEQ ID NO: 321360 - DNA, 868 bp, Homo Sapiens
gaaataatttgtggggaaaatagaaaaatgcctgccttctgcttccctctcttcctatatcctttctttccttcctgccttctttcatttttccatttcttcttctctaagagtaatcagcacaactggtctgccaaccttcaaattataccttaactctcccaaaaataccatatgcatttcaggtgtcattcattatctctcagtcacaacaactgacaaatgaaagcatgctggcatgagaatctcttacgtccaggctatttgcttaaaataattactctaaaaggtacttaaattctaatgttcttgagccatttgagaattagtaatttttaaacagacatattaatgctggagtgtagagaatatcattaaatatatcaaaaatatatcttttaagcctagaaaatggatgcctttggattaccttcatttcagggtagagaaaagcccttcctactgaattaggctctgaacatgtgatttctttccctaacactagtttttccaatctactaatttatttataaacaaagcaaagtaagagatatttttgctgttactttggcaattctctctctccaatccccaacatcccgagttcagtgcacatctaacaattcactcaagactaggcacctgacaataagtgtttacttagtgtgtaaagtgaacaagaaaagcagcataataaaggagctgtgtttttatcagaggagccttccttctgagtttttacataagttgatgccttcactgcaactttgaatacaatgctttgaattttgaaacacttgaataaaatgtttgaatgctttgaataaaattcctcctctttcagagtaaaccttattttagtcaccag

SEQ ID NO: 321361 - DNA, 1327 bp, Homo Sapiens
  misc_feature (138)..(138): n is a, c, g, or t
gatcagatgaatgtatgttaaagcactgcaccactatctacccatgagactggcaaaaattaggtagtctggcaatacaagtgctggcaaggataaggagaaaagggcggcctcaagtaggagggtcagtcaccgttntaaagaaaatctggaaaaccaaagagaaactgacctctgtgacctataggcccatcctgggtacacatgccacacaagcacagaagggaacacacgaaaggatgtttatcgtggcctgtatccggtgccaaggggtcaggggcacccaggtgtcccccactttaggcaatgtgtgtaaactgcaattgacattgtggagtgccacatggcaggtcaaagcaatactgcatttctagaagagtcaatggggctagatcttagcacacattgagtgaaaacagcataagacctattgcacaatagcactatgtacagtaaaagcacatattcacacatgaaacgtggtattttacaaatacattcatattcaaagacatgggtgcttatgggagaggatggtgtaaagaaagggaaaaaagccataaaaccagagaatctttgcatgggactgtattcctgagatcccaaaccaaagggatgaatgtgctgttatgccttaaatgtgtgcaccaggaaatgcaaactagaaagggtggctctgaagggtcctcaggtgaggaagacccccagggctgagaatccaccaccttcatccttcaaaagagtacctcagttgtctgcttacgcttcagccagcatgtgtgagcttggtcatttcctgcaagccaggcaaccacaccagtgtataagcctcaagcaaatgtcactcccaagccccaaatgggactaaggcctctgctgggctaggcgtggtgtaaatcccaggcctggaagctcctacccaaccctcatttgtttcaactcactttcaatatgtgcatagtttcataaagcagacatttccatgaggaaaagaggatggtggtgaaaggggaggggtgaagggacatctccaagtcacagaggctgcaaaactcagcatgacttgtggacggagcaacaggccacccagggcaacaacacccacataactcaccaagtggttaacggctctaaaccagggtcaacaggagaggggacaaaagtcactccttgattttgctgcagcttaaagataagttctacctcagcttatgctagcccttatggggcaaaaaaagggaaagtcattctccccaagtccaggctgggccgtcaaacagggagtggggtgtcagccccagacctcaatgaggtccccagattccag

SEQ ID NO: 321362 - DNA, 942 bp, Homo Sapiens
  misc_feature (867)..(886): n is a, c, g, or t
ctggccgcatcgaaatggtgtaatttcagcccgaacacggattgatgttcttttggacacttttcgaagaaagcagcccttcactcacttccttgcctttttcctcaatgaagttgaggttcaggaaggattcctgagattccaggaggaagtactggcgaagtgctccatggatcatggggttgacagcagcattttccagaatcctaaaaagcttcatctaactattgggatgttggtgcttttgagtgaggaagagatccagcagacatgtgagatgctacagcagtgtaaagaggaattcattaagctacaagaattagttgatcgagtgctggaacgttttcaggcatctggactaatagtgaaagagtggaatagtgtgaaactgcatgctacagttatgaatacactattcaggaaagaccccaatgctgaaggcaggtacaatctctacacagcggaaggcaaatatatcttcaaggaaagagaatcatttgatggccgaaatattttaaagttgtttgagaacttctactttggctccctaaagctgaattcaattcacatctctcagaggttcaccgtagacagctttggaaactacgcttcctgtggacaaattgacttctcctgaggtggatcttggaaagcactagaaactaaacatcttcaccaggtgctgaagaaaagtgtcttcgttttaattgccaagcagggatgtggacatttggatggtgactttcctgggtggttccccatagattcaccattgcctctaatggtgtctacacccgtcatactaccagctgagatggtggtgggcataaggagaatttgtgcctataacccttagtgtgttctggnnnnnnnnnnnnnnnnnnnnaaattgtcgtaaaatactcataaaacatactgtcttcaccatttttaagtgcacag

SEQ ID NO: 321363 - DNA, 597 bp, Homo Sapiens
ctaatattgtgttccttgaaaccttactctagtatgcagggagagtggagggtgcctaagtgtaaaataattaaaacttaagctgatataattatcaataatattaaccagttctgatatctacttgataccataacggtgagcattgatagactttcatagatttttacataagattagcttgagcaagttttcctcttttgtaggtactggggggaaaattctggaaaaatttttagagagttctttctaaaatgtcgaaatgcaaagctgtataaattgctgttgacgttagctgtctgaccaggaagtactctctttaagcctcacttaaaaaactaagtgtctgtaataacttcctttctcgggatgaaggtgctgatagcctggggtgttcttataacttaagttcagttttttctttcctgtgaggaagaggcagttttttaaatgaagccatctctggggaaatcgtattgattgttgtagctaaatacggaatttttaaagtctttagtatgttgaactggaaatataggacatgcgtttgagatctactgtgagttgcatcataaatacaaaggactgaagttataa

SEQ ID NO: 321364 - DNA, 575 bp, Homo Sapiens
gttggagcggcggccgctccaccatttttgttaattttattcatatatacacaatttggaaaatcctcttgctgtagttatgaatactttttatagatgctaagattttaaaattgctggaatagataataaatttgcaattttatttttaaatgacttaccttttttcccctactgtgtcaggaaccttaaaggcggtgtttcaaggttggtgggtctcataactgctttgcttgcttttccctgaaaggggtctgtcttttcacgggagtttctctaacgtgctttgcagagtgatgcttgccttactgcaggccgctgattgttttgctaatgctttttatctttgctttgggaaactgcagatctgaagctgtcttatttatggcaacttctgtttgaggccctaatgcttatgttggtgtggaacatcaaaagaatgcttcttaacccattttcaagccccaaaaagttgatatttcactagaccttagcttttcagctgtttggagaagtatgcgtttttccagaaccattgtccattcactttagtgctactcaaaagagctgctccc

SEQ ID NO: 321365 - DNA, 1005 bp, Homo Sapiens
agaaaacaaccaaaactttatggcaatgtgctgtcatctttcctggggttagtgcctgagtaataccccttgaaaacttctcatcccctgaagggtggggtgaccaccctctgggactgaactccttttgggagccagagaagggtctgtggttggctgaggggctgtagcttagacctcagggtctccaggatggaccccaaggccaaagggtctaaaattctgaattctgaatctggtggcctcctcctcacacccttccctggagcagctgcctccggaatggctcaaagtcctcaggcactgtgtcattgcatcgatactggagattggaccaaattatgttttcttgggagaagcagaatacaccaagacgcccccctcgcatggatgtgtcaatgatcaccccagaatccgccacaagctggggtccctcatagagcttcacccgaatgtagccaacttgaggccggtgcagaagctgccagcgataggaggtcttgtcccgccagcccacatttcgtgggtctgtccacagcagtcgtacctgatcaggggtgttggcagtatgccacagggcatttcggaggtgctcaccttggccagacactgatttcactgccttgagctgcagcccgggctgggcaaccgcccggaagggtgtagccctgccagtaggtctgctcggtcttgcttccacatgactacgtagaagcgggcactgtcttgataacttgagagaaagcctgcgtagtcatcatcagtcactgtgttcacattggaaggtgcctttaaagtccacaccaattgaaggccgtgtatccaactgccaagcccgggtcactgttcatgggtttgaacgatttccatgccctggttgagcacaacccagtttgggtcaatttgagcatcaccctcaggatccaggacgacggtctgataggcccgaaaatccgtaagcgttacctctgcactttcaggacacacatccagggggtcgaccac

SEQ ID NO: 321366 - DNA, 592 bp, Homo Sapiens
  misc_feature (124)..(132): n is a, c, g, or t
gatttatgaaaaataaatttattacataacaccttgtttttaacaatgttcaattattttttattcagaatacttgtgtcattcatgtaaaatagtttgatacagtacattgtatgttataggnnnnnnnnncctcaaaaattctaaggctctcctactccttctcctttgctgaagtaagggcaccctaaacaacgtgcgaacaagttttcaaaaggaaaattaactgaacgaaattttaatagcactacaccaaccagctttaaaatcaggacgaaaatatttgaattggatgccgcacctttttaaggaagttatcattcatgcttttttcatcttaaagcatgctcacaaatcagcaacaccaacaggaaaaataaaacactgtctatgacaatcattttagtttgtttgctgaaccaaacaggtttatatcaatgacaacatatttaattactatcaaatagcagctttaataccagtcaagtcatagattgaaaataaaaacaaacttataagttggaagttaatctttgggagttttgaaacctttctggaaaaactatgtggctttttgtactttcaaaaaaat

SEQ ID NO: 321367 - DNA, 1043 bp, Homo Sapiens
tatttgaaacaaaaggcttatttgaagaaattttcatttgctacaaaaactatttgtagacattctggagatactcatatatgggcaaaagaaattagagcaggcatgcaacagagcagaaaggatgctttatttgcaaaagagtggtgaaacatctaaaaagttgacattgtatatgattacaaagtaaagagtactcttgtgagagaagttacatgttcattgttaaggaaattatatgtaaatcacaaagatcatggtctgtgaataatgtgccatatctcacaaaatatggtcattggaatcttattaaaattatctacaggtgacttcagtttccattctccaccctctgccttaagatacgaagccttgacatgaccacatcccagtcagcataagctccttctaggatgggcggggatatctcagttccctgcttcatagctacgtcggccatgaagtaagcgccagttatcaaaagtaatcacatcacctggattcatcttgaaggtaaacttggattctttgctgttcatgaggtcaacaaactccttcagagcagcataaaaaggctgaactctttcaacaggcacatcaaatattgtgtccctagttgcgttattgaagttgatgcgaaccacttggcctttatcatctaactctataattttatgttttgattgtacagaaaaatcacagtaatccactccaatgtctgtaaagtccacaaaggtagaggacaaaatctggaatgcctgaggattatttttctttagtttttggcacacattaaacccatctacaatttctgaatcaccccctgtgactgtttgctttatgcagtgaagaagctgaaccccaggtggatgatggagggctggataatcagtgtgaaagcttagcttcccagttgtgtaagccacattgtttgcatcgattttgtcttgcacttgccaagtatgtccataaaatgtgagatagaggaaacccatccttttcccaagttttgaaacttctcctggtttgtcagatgctccggt

SEQ ID NO: 321368 - DNA, 1527 bp, Homo Sapiens
  misc_feature (649)..(649): n is a, c, g, or t
  misc_feature (658)..(658): n is a, c, g, or t
  misc_feature (675)..(675): n is a, c, g, or t
tgtgaagctcgtctcgtggcccctctgctcactgcgccgctatggccgggatgccacacgctttaccttcgaggctggccggatgtgtgatgctggggaaggactctataccttccagacacaagagggggagcagatttaccagcgcgtccacagtgccaccctggccatcgcagagcagcacaagcgggtcctgctggaaatggagaagaacgtgaggctgctgaacaagggcacggaacattactcgtatccctgcacacccacgaccatgctgccgcgcagtgcctactggcaccacatcactggttcccagaacatcgccgaagcctccagctatgctggtgaggggtatggggcagcccaggccagctcggaaacagacctcctcaacagattcatcctgctaaagccaaagcccagccagggggacagcagtgaggccaagaccccatcccagtgaccacagtgctggcgagcaccgatgactgctgggggctgcctgctgccgggctggctgcagtgtaccgtggacagcctcagggggctgtcggccaagagcctggagaaagggagcaagctgccccctccttgcccccaaggatgaggctggactgaggcaaagggctggccacaccacctgagcatngtgtgaggngttggagctacccgtgngactatatactgttaatgattttaatatatatggcttatgacatactctgtatcaatgagatcccctcaccctcaccccatccttccccaccaatacacacaaattttttaatcccatgaccaggccacggtcaaggctgtttttgagtatgagtgcagtcgtgtccatcctccatggcacagccctcctgctgccaggacctgcttgaactaccagggccacaggagggggataatcagagcttgaggctggcactctgactgctggcttttcccaaacagcccaagggccggaacagcaggtggcttctcagttcctctgggcctggagtgacacaggaaggatctgcacttcctctgtgctgcttgccagccttgcagttggagttttaagcagaggtgacatctggttgacgcctcaggtgaaaatctggttttaaaatgtaacttctgcacaggctccttcctgctttgtaggctgggaagatgcccctggggtaggggtgctgattacctcagccatgtggaggaaggctggagcttgttcctgccccaggaataggccaggagggaaggccgcagcaggactgccgtggggagcacccctgctgcccccctctcactgaccaggggtggacaatgcccaagcagagggagcccccttgccctgtttggccaccctctggccagccaaaagcactctgaaaccaagaccttcccatttcctcctccccacatggtgctgaggctccctgctgcaatgcaattaaagcaattgattttctagtgctggtatttggtgactaccatgcagaagggctatctttctattcacgtcaaacttttggttgg

SEQ ID NO: 321369 - DNA, 552 bp, Homo Sapiens
tggtgggcctcagatcccaggctcattcctcaaatcacttcttacttccctcacttatctttgtttaaataaggttagtacattcactaggggcaaatgggtttttctaaataaatgacataaaaaagaactggttgtctttctttaaagaaagtcttagttacaggattctgtgattaaaatccttaaatattgggttgccttctgcagctgtagtatcagtttttgaaccacagtaatgggaagaaagacaaatggattcccttagaagtaagatttctatttgcaggatgagttgggcagggaaaagggtcagggttcatcaggtgaactcaacactgggatgagactagaacttcactttatgatataaacacaatacgattattcaatgtggtgactggggtagactgtgaagcagccctccttatgcccactgccttttagaatcgtttgttttattcatggtagttttatgaagacatactattattgaatgaaatttaatgtgtacttgaaaacattgcttttgtcccttctcttcatctggtc

SEQ ID NO: 321370 - DNA, 667 bp, Homo Sapiens
  misc_feature (552)..(552): n is a, c, g, or t
ccgccgctccaccattttcctttattgtgataattccttgttatctccatcttggctccaccccaaagcccatgcttttaaccaccatggtatttcacacactcctacctcatcgtagtacaggacttgtgacctcattattataacacaactagaacactgagctcttgtgctttcagatgtgccttgtgtgtaacaaaaaataacaatagaaaaggattatttgaattccaactcactaatgtttcttttgagtagattacaggcttttggatacctaaggtaagacactcaacctgtatttccatacaacctggctgtaattcaagcttctaaaggagtaaatcaggaaaagtactctgttaggtatggaatcatttttcgaattatgtgggttgcagcgtaaattcaccaacacactcctatttcagaagtttttcttcctgtttttcattaaataaagtaggtaaaaggcccctgccataaagcattaaccccacctctgtggacagagatagttaggatggggtttagaatgcatttacttatggngtcgtggttttccttccaatctggctaacatcagcttaagcttccttaagtaatttcttggtcttcctaactggagctagaagtttgagataagcatgatgaactgttctattct

SEQ ID NO: 321371 - DNA, 961 bp, Homo Sapiens
  misc_feature (684)..(727): n is a, c, g, or t
aaatggagtttttctttattatatcatatttctaaatcaaggaagctgaaattatatacttaaatatactctggtcaaaatatacatgaaccacaaatattaacttctacctaccaacaatttacagttatgttgtatgtggaatttcattcttgtcagaactcacaatggaaataaaatttctattatgggtgagaagatgagggaaagaattaaggggaaaaaatttggacagcacacacttttctttcattccaaaggtgccagtcagaacacagatccatggagttccacatctagccccaggctaccaagcattaattcaatgtaaatggtgtcactacaacatcaaaaagagcagtgctaggcagaggattttgtataaaatcatctaaaactctgaaaaactacaaaagcatctcaagaaaaaaattaggtaaaagcaatggagtttatttcagtgaaattattttaaattagatatgatatattaagctcccatatgccccaacctggtagaaaagttcctctcagtgagaaatcatttattttaatggcaaaatttttacatatcagtaaaatctgttatacttaaaactatgtatacagtacatttctggcaaaaaaccttatacatctttcagttgtcaagacaaagtaaaaatatggttgcataaagtcacnnnnnnnnnnnnnnnnnnnnnnnnnnnnnnnnnnnnnnnnnnnntcatttgcattgcctcccttacctcttcaatattagtaacaatttgcaaacaacaaaaaaattgtgaaaattctgttgcaaccttgacacacttaaccaaaggttgtcatttcaaatatcctagcttaaaaaagaatttactgcaattgtctgtgcatttatcatactatttatagaagtgcaatatttaaatattttcaaaataaaacacagtaactaaaatgaatcacaata

SEQ ID NO: 321372 - DNA, 186 bp, Homo Sapiens
ggctcatttctaaacttaagcagaaataattcttccacaattcaaaagcataattctttcaaaatgacttatagaaaatatcatcttagaataacttatagtatcttactgcatagtttttctttctaaagtttactttattttcaaatataaaaaagctaatatacactcattagaaaataaggc

SEQ ID NO: 321373 - DNA, 704 bp, Homo Sapiens
accctataaaaggggttcctaatggtggacctccctgtgaaatacctgtttccatgtagacagtctgaaacaagaatccacagaaatcccaaagacatttcctggaggacaatcccctgcaatgcccaccgaaacaccccggatgggttcctatgcccacagttatcacacttaaagcccacatgttgcacaaatccactttcagcttgcatttgctgaagtttctgcttctttaactttttaaactgtaatagttctttatattcaggtaaattcctatacatgataggaatactttcgtcatctgatgcatcttcaacagcagtgttcatgtggctatgaaaacaagatcggtcatcatcttcatccatatacactggcggttcatgtgaagtcatgaaagtggaaggcttaaagagatgcttattaagagggtgctgtcgtctgcttgttgaagactttttggagtatatatataagtttggtgttcggcctggtactggaatgccagctttagttagctttatgaaatacttctgtactcggctggcaacctgttttgctgtcctgttgcccaattcatctgctatcttctgccagcgtcgagattctacttcttcaggagggtatttgatgagtagctgttccagctttttctgttcttcaccagtccacaactggttaaatgtttcagtaatggtaac

SEQ ID NO: 321374 - DNA, 613 bp, Homo Sapiens
tttcaaggatgaaatttccacatttatttttcttttatgtgaatagaaaatggcagtgaagtgtcctatgaacgaggcgaggaatgggcatggcgctgcggtaccagcctggacgttgtgcttccaaagtacactatgtgtggtggagacaaagggtgtcgcggtttgcttttaattgctcacagttccttgggcttctcatttgtttttgaagttgtcagtttcttcaaatctcttttcaagtgacacattgcattacaaatgatggcacttaaccaatgtggcatttccatatttacaccaacaaaagaaatttacaagacataatagcatacaatcttgacatttagtaatagcaataaaacatgggcatccattttattttttctgtacaaactatcagaacataactttattcacattaaaaaaatcatctttaatttgatttgacctacatatcccccatttcatttcacccatttctcaaacctctcatcacgtcacccacaccttcaccagactacagaatctataagtaattagatctaacacctaaatagagcttagaaagtcctctcccaaacatttcctcacttccctgataattcctcaa

SEQ ID NO: 321375 - DNA, 853 bp, Homo Sapiens
  misc_feature (358)..(358): n is a, c, g, or t
gaaggttgtttttatgctatcttaatgaaccatcaaaggttctgaaatcaaacattttgaaaatacttgacttacggccattttatatcaagtgtatatgcttttattgtttgtgtgcttaaaactggttattttcatgaatgtactttctatggatcgctaaaggtcagaaccagctaagaatgaaaatgagtaccatttatacttactgtcagctgaacacttgcattatttttacctttatggtgtatcttacagaaattagtttttaggtccgtggtttcatacatagcagagcagctccctccctgccatctattcaaagtcagccctggacacaggtttgtccaccccctcngcgcatgcctgggcgtctccgttgccatccgtctctcttacttcctccctctcaaactccctcccaacacccctgggggcctccttccctggtccacgcttgcccaccctctccgggatcccagagcaagtggcgggtatctcgtcgaaaagcgcccgtctccatccgatgcctttccaagctggcggtgctcaggggcatggtgccatgctgggggtggccgaggttgcaggggtgcccatgctttgtgtcccacctctctagttctagtctcctcccccaaccctactaggggcttgtccctggtctgggacaggcttggaaagtgtggcgcgagtatggctgaggcgtggttgtttgagggtgtgaccctgcagtccctgtcccagggataggggtggccgtgtggcccaggggtggccgaaagtggcactggggtccagccctctcccactctgtggtggagtggggcagtcactgcccttgagccctttt

SEQ ID NO: 321376 - DNA, 677 bp, Homo Sapiens
gagccagaagaccttcccacttcacagggacaggaacactcaggcctggctcccgctttaggctcgatcctggaactgggttgttaacttaaggagatacaaagtgaaacccctcttccctaagcagctccttccataactgccttccagcacttcaggaacaggaacaaaaaaggtcaaagttatttacaatagcaaagatgcacatacgatacatacatatttataggaaaccaaagtgacaaagaggggaggggaggcacccacctctgcctggggtcttatggagaaagaggggaggaagaaagtgcatttacacagaagcctcctcctttcacttgcatgtctgagggcagcgcacatacaggcgtgcgcgtgtacacacatatgtggggtgagggcagaccatggtgagtgggggcctttcggatgcagtcagcatgcttaggagacatgaggccttggagggttgggctaagggagggaaaagacactgaaacctgactccgacttgagcagaccaagcaacatgcgggtctccccccgggccttggctggatcctagtttccctaactgcctcctccacagggaggagtgttgggatcccccctaccctgtgccccggtctcaggccagtccctgaaggaggagtggggacgcagaggatttggtggtt

SEQ ID NO: 321377 - DNA, 733 bp, Homo Sapiens
  misc_feature (710)..(710): n is a, c, g, or t
agataaaaataattttgtgaccaaatgtgttcttgtagagtgcgttattttcccctattttctctgtggtattgcaaacagtcatggtgagtgctgcaggttatatgaggataagtaagacttggtacagaaatgtccagaatactcaaaactggaaaaaagtgatccctgatagttaaatggtcaagataggcttcctgaaggtgatggtgtttagccagtcctggaaggaatgcgcaatacaatttcaacaggtagaaataagatgattaagggtaaaataagaaaggggaagattagtgcatcatatagagcaggactgttgagcaagagtgtagaccacaagttgagggtatgctaggaaataaggctagaaaagaaggttgagatcagattatggagattcttattaatactaaactaagcagtttagcttatttctggtaggcattggggtgccgctggagagagcagggaaggaatatatgatgctaactaaggttattttgacaatgctgtaattgaaagtgaggaagagagacactttactacaggtaataatttaaaggccttccatgtacagtcattgtgccagaaacttagggataaaaatatgaatataatacaatgccacacctttggtcttgtagtctataatggaaaggctaaatggttaaatagattattatactgaaatgtggtaaatacgntgaaaggttttagtgtctttttt

SEQ ID NO: 321378 - DNA, 2058 bp, Homo Sapiens
atttttttaaactaaaaaaaagaagagattgttttattgtgacatttatgacattgaccccttgttgacaggaatgaccgagggtaatcttggcatattgcacatgctgtgatgaaggatgcactggtgatcctctggccactgaggctgtttcctggtcctcccagacctctatgcacgtgtgggccagtcacagaaatttcattaccacttggtgtatacatttaacaagtctttggtcttaataagcaccattacaaaccctcacattaagggcattattattctagtttataaatgtttcaatgataaaaaatagcacgattacagtatacacacacttaatttacatgtaatgtattatactcataactgagataagctactgaactaactttggttgattgaaattaatgaagtattggaactgaatacttgtaatttggtttctaagttgtgtacatattacagtgcatttataaatctagtttgaaaatttactagcaccaaataggtaccataaatggacaacctagtacttgtatttggagaagcaaagtttacaaatttgcaaaaaatagagtagtccatcaattgaaagcacattcccgtacgtttgctggaaggatggcatgtcagcataaatggccaacccccaatggaaatacacgtcccagttttcaagaatcaacacatatgacaaggtagcttagctacacacatgagaagcctgagaaagtggttgttttgaactagggtagtcacctgtaccttgctttggtaatacaaagaatagtgcttatttatacaaatttacttggtgaaagattgtacctatgatatgatgattctgattgggggaaaatatagttctacctatctatatttgtttttcttttaattatttggtctctggatggtgaattaatgaagcaaaacctggattttcatcttcagattatcacccagttcaccactgaggtagtctttgtcatatttgtcttctagttggttaagttctttctttttataaagtggagtactactgatttgtaatgaataggttccagccactggcttcttctttgtgaagtggaggtagctgatcccttccttttggttgattttaaagaagccatcttcatttccagattcgatcaagtatctgttgtgattcgtcagagttgtaagagctggaaggagttctaggattcgaaccttgttactgacgtgggaaatattgaaagcaaagatggctgtcttctcaacatcccaacttgcaagactcacattggcttctgtctcagactgatcctcgatattggaggcatcagtttcgtttgtgcttctccgtttcctgccccgtttggggtagccattgatcttacactcgtaacaagcctctggggagagtgaattgtcatccatttcaccactgacaggtggctctgggtttcctcggcccatgcccattccagaaacacagtgcccttggcctatgcggaagtaaccaggtggacagccacacaggtaaccgccctcggtattggaacagccatagctgcagggggcctgcgcagagccacattcattgatgtcttggcatcctccactgaactgttcatactggaagccggcgggacacatgcacttgtagctccccagggtgttgtgacaggaggctcctccgcagatgtgagcgctgaggcattcgttttcatcaacacactggttccactggtagtgctggaggtagccctgggggcagctgcacctgtagcccccaatgatgttctggcagccatgctggcagcggtggttaccctcacactcgtccacgtcttcacagctggagccggtctgatcaagtgagaatccccgctggcattcacaggtgaagcttccaggagtgttctggcaaatgcccttagacccgcacagattgatgtcagaggtgcattcattgttatcaatgcaggacgtatggtgttgggtaaatccgggaggacatttgcatgtgaagccgccaatatcccgggaatcggccggtaccagcct

SEQ ID NO: 321379 - DNA, 553 bp, Homo Sapiens
  misc_feature (132)..(261): n is a, c, g, or t
  misc_feature (494)..(494): n is a, c, g, or t
  misc_feature (525)..(525): n is a, c, g, or t
gagacagggtcttgctttgttgcccaggccagagtgcagtgtgtaatcttggctcactgcagcctcgacctcttgggttcaagctatccttctacctcagcctcctgagtagctgggactacaggcatgcgnnnnnnnnnnnnnnnnnnnnnnnnnnnnnnnnnnnnnnnnnnnnnnnnnnnnnnnnnnnnnnnnnnnnnnnnnnnnnnnnnnnnnnnnnnnnnnnnnnnnnnnnnnnnnnnnnnnnnnnnnnnnnnnnnnatgagcactgcacccacgtagaggttatttttagttttatccttataatttccctacattttctaaaacttctacagtgaatgttacttttatcatttaataataaagtagaaaatatagcaccagcctttcaattaattctaatgtgtgtctatgtattgatagtaacaatgaatatgggtccaaaaggtgtttagccctactcaagtgggcaaagtaatactgtaaaaggngctaaaagttgggctttatttgtactaaggnaagcaggttaggtcttcggttttttaaa

SEQ ID NO: 321380 - DNA, 452 bp, Homo Sapiens
  misc_feature (38)..(39): n is a, c, g, or t
  misc_feature (113)..(113): n is a, c, g, or t
  misc_feature (198)..(198): n is a, c, g, or t
  misc_feature (202)..(203): n is a, c, g, or t
  misc_feature (205)..(205): n is a, c, g, or t
  misc_feature (209)..(209): n is a, c, g, or t
  misc_feature (216)..(216): n is a, c, g, or t
  misc_feature (221)..(221): n is a, c, g, or t
  misc_feature (233)..(233): n is a, c, g, or t
  misc_feature (238)..(238): n is a, c, g, or t
  misc_feature (240)..(240): n is a, c, g, or t
  misc_feature (247)..(247): n is a, c, g, or t
  misc_feature (258)..(258): n is a, c, g, or t
  misc_feature (262)..(262): n is a, c, g, or t
  misc_feature (269)..(270): n is a, c, g, or t
  misc_feature (273)..(273): n is a, c, g, or t
  misc_feature (276)..(277): n is a, c, g, or t
  misc_feature (296)..(296): n is a, c, g, or t
  misc_feature (307)..(307): n is a, c, g, or t
  misc_feature (311)..(311): n is a, c, g, or t
  misc_feature (319)..(319): n is a, c, g, or t
  misc_feature (323)..(325): n is a, c, g, or t
  misc_feature (327)..(331): n is a, c, g, or t
  misc_feature (334)..(334): n is a, c, g, or t
  misc_feature (339)..(339): n is a, c, g, or t
  misc_feature (342)..(343): n is a, c, g, or t
tcttctttaatacccaccaaaccaaaaattttcttcanntgttagatgggcaccaggctttcacagaatcctctctagaaacagctctctttggttccactacacgcccaatnaaccttgtgtggtcgagcacacattgctgcatccacctcttcaacacaagaataagtcacaaaaccaaagcccctggaacgcttngtanncntggncttattnccacncaatctgtgagngtgcncnatttctnaacctgttctngtanactatannatntannttcaaggctcagaccaccnataaacagttntatnaactgctntgcnnncnnnnnatnatggnccnnctccccccggcggcgacggcgacggccggagtcgggctgggggcgaccgggcggcggttttacctccattttgagaccggactcgcctcttccaactcgagttcaatat

SEQ ID NO: 321381 - DNA, 699 bp, Homo Sapiens; identical to SEQ ID NO: 150736

SEQ ID NO: 321382 - DNA, 723 bp, Homo Sapiens
  misc_feature (169)..(169): n is a, c, g, or t
ttctttatattcatcaagaaatggataatctgggtgatgagaaaagctgaaaaggaaagggaaagtcttagtcattgtttctgggctcataaagacagatttctgttaaactggtgtgagcctagaattaacacagttttctttgtgagttaagtacaaacccaactangttttatgataataacatactattgcatgatgctgttttgaatacactgtggaaaataaatatacctacacacgtgggcacacattcacaaatataccagtgcattccatttttgcaatatgtcattctacagcttgaggagataaactatttgtgtttatattttgaacctccaggagggcagaaacaaattctctcttttttaaaacaatgcttagtctgatttaatatataaagttaataaatattttaaggtgataatgaggaaggtgataaaattattactgttcaatgtatgtcaaacattcagaaatgatttgtctatgacttttcttgggagaaaattttatattatacctagagagagatacagtggttagaagatgaagtcacttcaatggggtagttccattttagcaagggggatacaaattctttctgtatatgaagtaataatttttgacatagaaaatgccaagtcattgaatagttattgttgattaatattactgatatttattgttaggggttcctgcctgcatctccactctctg

SEQ ID NO: 321383 - DNA, 637 bp, Homo Sapiens
  misc_feature (560)..(560): n is a, c, g, or t
tgaaagtataaaaatcattttactttaatacaaaatcacataaagaaaggcatgttggctaaatcaaatattcactaaatatcagtgaagtcaccactggaatctcaatagcacattttcctgctttcttttctcccttctgctaaccattgaagaccagggtcatccgtgggagcagatgagtaggacacgcgtctgcacgctggaggccctgggggttgacatgggagcaggaagtggacccccccaccctgcacatcccttctgtttttcttgatttcagtctcactggcccaggccaaatcttcaagggtgtctagttctgcagccagggagaaagtgatgccaagagaacctcgtctcctccctcctcagtctgctttgaaggggaaataaatacacaggcctagtgtgtctgtgtggcacagggaggtggttttgccaggcatcttggaaggttgtcttctagaatcagagccatagccttacttgtggccttggatctaggtctgtttccccgatcgaaaaaagaacagcttttttatgattgtcttctcctnccttgttcctgccagcatttttggcactagtaaccacagcatctttttctcttcttcctcctgggccttctcttggt

SEQ ID NO: 321384 - DNA, 723 bp, Homo Sapiens
tcagtaagcacaggtagtcagtgtggtttatttgacttccttcctgctgggcacaggaagctctcacagggctagggtttaagctggcttccacagagggcagtcacgtgcacgtgggcctgaggccagccccaggtcaggtcccgatccccggtcctcaggtgcttccactcaggcttgaggcaggagtctgacggcagcagctcccgagagcccttgccgatgcctggctccatccagagccagcccagcccagggaggctgcatggggccagcgctaggtggctgactcagcagcagccatggggctggagagccttcctgatgccagtggccagggcttgtggcgtggggctctctgcagtgcagcttacaggaaggccctgggcggccagcgcgcgagccgtagtggggccgatggctgcaaacttaatttgatcgatattgtcaccagataactcctgaatgtgcttgagactgtatgtgaggccagagggactaaaaaatgtgatgctggctggaaccccctgctgggaatagtagctgttcaggttcccttggattcctgggtgtgcaactgtctgatacacagttatgctttccatggcaatccctttgtccttgagcgcttttggcaggatttctcttttgaggtttccacagggaaatagaagaggcagtgatgaggactccctgaacaaatatattctgcaagcttttctg

SEQ ID NO: 321385 - DNA, 361 bp, Homo Sapiens
gagctatgtgaatgaagaagcctgagttttcactacttttcacctaccatctggctgcccctcataagtcaatatctgactgaaattgcggattgccatggaaagcataactgtgtatcagacagttgcacacccaggaatccaagggaacctgaacagctactattcccagcagggggttccagccagcatcacattttttagtccctctggcctcacatacagtctcaagcacattcaggagttatctggtgacaatatcgatcaaattaagtttgcagccatcggcccactacggctcgcgcgctggccgcccagggctttcctgtaagctgtcactgcagaggagccccacgccaca

SEQ ID NO: 321386 - DNA, 871 bp, Homo Sapiens
  misc_feature (32)..(32): n is a, c, g, or t
  misc_feature (59)..(59): n is a, c, g, or t
  misc_feature (170)..(170): n is a, c, g, or t
  misc_feature (213)..(306): n is a, c, g, or t
  misc_feature (313)..(326): n is a, c, g, or t
ctgatgattaatatatgcttctatgttaacantcttggactttattaatggtgggtggnagttaacttaatgtgtgtatgccaaacttaaaaagtggcatccttttcatttaatgaccccaacccatttattcaagagcttatgtctcagttagggacttcagacttttnaaaagaaatgaagaaataatgccagatacatgggctcgcactnnnnnnnnnnnnnnnnnnnnnnnnnnnnnnnnnnnnnnnnnnnnnnnnnnnnnnnnnnnnnnnnnnnnnnnnnnnnnnnnnnnnnnnnnnnnnnagttttnnnnnnnnnnnnnngaagtagtgaagaaattggaaaggattctgagaagaaatatgcaaggtggaaaagagcctagaaagaaaggtgacagatgctgggatttggtcgtcagaagagatatctaggaaatagcatggcagccctcaagtactagctccacttaaagaaaaaaagaagagatcattcagacattcctcatattcggtgatcacacaagaaactgtagcaggcttaatgtgaagcaaacaaaactcaacttcagctaaagcaaaaacaaatacattcctgattttaagcatccacagtgatgcctttacacaagggtatgaacggtgggagagtctcaagaaagagataaacacctttcagcttggacagagattatgtgtctcaggggaaaatgaatacctagacagctgacctcttggtatctctttctaaggattatctgcctctgtgaccatttatattttcttgaattctctctagtaagcccccaaagaaagccttacttcttcttacttccttttcacaggggaaacagacacacacaaacaat

SEQ ID NO: 321387 - DNA, 665 bp, Homo Sapiens
  misc_feature (11)..(11): n is a, c, g, or t
  misc_feature (23)..(23): n is a, c, g, or t
  misc_feature (58)..(58): n is a, c, g, or t
  misc_feature (78)..(78): n is a, c, g, or t
  misc_feature (91)..(91): n is a, c, g, or t
  misc_feature (104)..(104): n is a, c, g, or t
  misc_feature (610)..(621): n is a, c, g, or t
ggcctaccggngcaccttaaaanggtggcccggcccaaactaagatgtgcctcggggngttccaaaccaaggggaaangaaaaacaaaaanacacacacacatnggattttgagagctcaatacgaaaaaacaagtaaatacctcattaataattaattatactgattacatgttagaatgacaatattcttgatacactgtgttaaacagaatttatcattaaaattaacttcaccacttcttcctacttttttctttaaaaaaatgtggctacaaggaaatttaaaataacccaagtggcttgcattatatttcaattgcacagcactattatagatgctgaattacgtaagtgttcaaacatattcccctatttgtgttggctgctaagaagcttgaagccaaatttgtgcccatccgtaatacagatgattttatggtcttcatttttatatcagcccaattcctggctatacgttatgtccccacctttatcttcttctttcttacctgcttctaagttcgtgatcttggtagattttgcatacacccacaagatgtcagaaatcttattttgaatgaggcaagaaatgaaatggagctaaatgnnnnnnnnnnnntttatttccacagcataaatgtgaaccctgtatgctgtggaaat

SEQ ID NO: 321388 - DNA, 863 bp, Homo Sapiens
caaaagactacaccattctagattgcatttacaatgaggtaaaccagacctactacgttctggatgtgatgtgctggcggggacaccctttttatgattgccagactgatttccgattctactggatgcattcaaagttaccagaagaagaaggactgggagagaaaaccaagcttaatccttttaaatttgtggggctaaagaacttcccttgcactcccgaaagcctgtgtgatgtgctatctatggatttcccttttgaggtagatggacttctcttctaccacaaacagacccactacagccccggaagcactcccttggtgggctggctgcgcccctacatggtgtcagatgtccttggtgtagctgtgccggctggcccgcttgaccaccaagccagactatgctgggcaccagctccagcagattatggagcacaagaagagccagaaggaaggcatgaaggagaaactcacacacaaggcctctgagaatgggcactatgaattggagcacctgtctactcccaagttgaagggttcttcccatagcccagaccaccctggatgcctcatggagaattaaagagagaagcctccttaaggagccacaggatggtacctggccccaaaaggaatcctggagaggaggacagtgacaacaggtgacttcattctttagagtgaactttccaaacccagtccagctggaaacagcttatctataatctgaaatgctggctcaaacagttatggggaggttcccagattgcgtagcattcagattgatttgagcagctcctactgtgataagtgtatcccagatccacaatgtaaatatatgtgatttgtaagaaagaa

SEQ ID NO: 321389 - DNA, 389 bp, Homo Sapiens
atgagccaccatgcccagctgagaagcaaacttctatcttgtacaagcaattgctgtttggggacacagccaacctcatacatatgaactaatgcatgccaagttttaatttccttaactgaaaaggctgatgcaaatgacatattgcacctggtggcaggcagttacatctactgctaaaatgacataagatagaagaagttttctgtagagaacattgtgtgtcacaaacagtgacattttcaaaagtgcttaattcaatatgacttcccagcggcaaagcttgcacctatggttttaggaaaacaacaacaaaaagtttagtctagcttaagatgcaaaatgactgacaaagtccctccccacaagagaactgtaacgagcaattt

SEQ ID NO: 321390 - DNA, 444 bp, Homo Sapiens
ctgtccttcaatgggaacttcatgcaacaaaatttcatatgacttagctctgtattcccgagaattgagactggcagtattctttggacgaataacagcaacatatgcatcttctatgttttctggatttcccattgctggggcaactagatgtggagatggttcagtctcccacctccgttttccctcgctggagtcgaacttgctcctcctgtttcccgaaggacaccgagaggtcccacccgtacgggctgccgcgagtgcctctctggccgctacattcaactaaatgggtgggacagtcacctggcgagggggggcagggaccgtcaccgctttctcattcctccttccctcctcccaggcacagcagcccggcccagcttccctctcccgaaactacggggtcccaggtcttcaaaggccttagctttccaccccgcc

SEQ ID NO: 321391 - DNA, 736 bp, Homo Sapiens
  misc_feature (58)..(60): n is a, c, g, or t
  misc_feature (62)..(81): n is a, c, g, or t
aaccggaaatggtctagaaaagctttcttgagggcccgaggcgggccgacatgttttnnntnnnnnnnnnnnnnnnnnnnnggaaattatccagctcttttattgagatcagtggtggctctgaaaagagccttttgggttttagaagtaggcgttcgctaatttcttcttgggcgccgcttcttaggcttgacaaccttgggcttagcggccttgggttcacagccttagcagcacttttggcagctttcttgggcttcgcaaccttggccttctttgggctcttagccactttcttggttacagtggccgcggcggctttcttcgctttcttcggtgttttcttagcgctcttcttcggagttgcgccgccagccgccttcttgggcttcttggctgccccaactggcttcttaggtttggttccgcccgcctttttaaccttgggcttggcttccccggaggctgccttcttgttgagtttaaaggagccagaagcaccggtgcctttcgtttgcaccagagtgcccttgctcaccaggctcttgagaccaagtttgatacggctgttgtttttctccacatcatagccggcggcagccaacgcttttttcagagcagccagagaaactccgctacgctctttagaggcgcggcagcgggagcggcaggagcagtctcggacatgttgagaatcaaaaactcgggtacaagtggcaaagcgccgatgaaaccc

SEQ ID NO: 321392 - DNA, 866 bp, Homo Sapiens
  misc_feature (798)..(799): n is a, c, g, or t
ggggcttcatcggcgctttgccacttgtacccgagtttttgattctcaacatgtccgagactgctcctgccgctcccgctgccgcgcctcctgcggagaaggcccctgtaaagaagaaggcggccaaaaaggctgggggtacgcctcgtaaggcgtccggtcccccggtgtcagagctcatcaccaaggctgtggccgcctctaaagagcgtagcggagtttctctggctgctctgaaaaaagcgttggctgccgccggctatgatgtggagaaaaacaacagccgtatcaaacttggtctcaagagcctggtgagcaagggcactctggtgcaaacgaaaggcaccggtgcttctggctcctttaaactcaacaagaaggcagcctccggggaagccaagcccaaggttaaaaaggcgggcggaaccaaacctaagaagccagttggggcagccaagaagcccaagaaggcggctggcggcgcaactccgaagaagagcgctaagaaaacaccgaagaaagcgaagaagccggccgcggccactgtaaccaagaaagtggctaagagcccaaagaaggccaaggttgcgaagcccaagaaagctgccaaaagtgctgctaaggctgtgaagccgaaagccgctaagccccaggttgtcaagcctaagaaggcggcgcccaagaagaaataggggaacgcctacttctaaaacccaaaaggctctttttcgagcccccactggatctcaataaaaagagctggaataatttccttcttggagcgggaccatcaaaaannaactaacattggccgcccgcccttcgggccctcgagagagtctttttctaaaccatttcgtgttggg

SEQ ID NO: 321393 - DNA, 493 bp, Homo Sapiens
  misc_feature (26)..(26): n is a, c, g, or t
  misc_feature (46)..(46): n is a, c, g, or t
  misc_feature (68)..(68): n is a, c, g, or t
  misc_feature (146)..(146): n is a, c, g, or t
  misc_feature (151)..(151): n is a, c, g, or t
  misc_feature (299)..(299): n is a, c, g, or t
ccggccctccttgggccttccttggnctgcccccccaaaatggccntcctaaaggtttgggttcccgncccggccctttttaaaaccttggggcttggccttccccccgggaaggctgccccttccttgttgaagtttaaaaggancccangaaacaccggtgccctttccgttttgacccagaatgccccttgcctcacccaggctcttgagacccaagtttgaatacggctgttgtttttctcccacatccataaccggcggcagccaacgcttttttcagagcagccagagaaacntcctacgctctttagaggcggccacagccttggtgatgagctctgacaccgggggacccggaaccttacgaggcgtacccccagcctttttggccgccttcttctttacaggggcctttctccgcaggaggcgcggcagcgggagcggcaggagcagtctcggacatgttgagaatcaaaaactcgggtacaag

SEQ ID NO: 321394 - DNA, 559 bp, Homo Sapiens
gtaagctgaatccaagaagatgtgttaggatcgtttctaggagaatgcttatgatagcttagaagaaaatactgtggaagtcttgcctgcgatccttttgagattgggaatacaaaggataaaattaaaacacctacagtattttgcaaaatctttctgaaaatccgtcctggcattaacaaaagcgcatcctctctcggttccgacgacaaacacgtctgtttcgtacactgcgatgcaggccacttctgccttggacttggccagttctttacacatggattcgagggcagacacgaggaatgtcaccaccatcctggtctctgaggaggactcttcttcaacaggcagggtggacactgctacctgggccatgatccctgagggcgctgggccgcgccgggccggccgcggagtccgaggcctgggccaccggggagcagccgatggccgagggcggcggccgggagccccgcgcgggggacgagcacgcttcggggcgtgtgggtggcggccgaggcccctgctcgccactcgccctcctttttccctcgtgccg

SEQ ID NO: 321395 - DNA, 585 bp, Homo Sapiens
acctctgtaaagaatagaagcacgctgttccaaggagaaaaggtaaatccactttaggatgctcccctttaggaggccatttctactgtacttagaaagaaacacgctttgcataggatatattgcttaatattttcttagagtttaaaggtagcaaatctttgttgagtaacagagtccagctaaaagatttaaactgtgcagggcatttgttgtttcctgaacagaaaggccaagatatggtggtttcaggatgcgttggagctgatggttttgtcatggacccaggctcttttcattgcccctctgccagccccactacatggcctacccccttgatttggtcaacaagtgcacaggaagattgctgttccatcacaggtgttaaaagctttagacaaattaaatttaacgcagtttagttgagcaaagaatgattctagaatcaggcagtccctagaaccagaataggttctgagtgacttggggctgccacgtggtcagataacatttatggacagcaaaaagaaagtgttgcacagaaaatgaaagtgaggtgcagaaacagctggattggttacagct

SEQ ID NO: 321396 - DNA, 721 bp, Homo Sapiens
cagcggcattcagaggctgctgtgcggtcagacacagagctccctcgaggcccctgtgtgcttatgaagtacctgcaggttctgagcgtcggcgccagcccgggccaggggtctgcagacagaggcacctggtggctgctggggctccctggggtgagccatggcacgggagcccctaagcgccaagctcgccacggtcttcgtctctcggaaggcaggggaagaagcagcgctcccagacaggacagagaaaagcctatgaaacaatgctctccagtcaccaaccagttgcctgatcagagctggaatttactgctgggacaagagtgcactccgatttgctttcattttttccagacgcttcactaagtggccgttgctcacctcgagctcttctgttttatccaatgcagagcggagctctctttggagtttccgtttttctgccttaagttcatcttctattttttctgcattttcagccgctgatttgtaacgtgatacttgactctctaaccttattacattttgttctaatgcagttatctcttgctcagattttgcaagtttaaatttgaggtcgctgatctgtctgttggcatccctttgtaggtccattacatgcatgtctgtcccgttttccaagacatcatcttcagatcgaagattgtgtagattgccaatcttgtgtctctccaccagctgccctttgagtttctta

SEQ ID NO: 321397 - DNA, 490 bp, Homo Sapiens
cagcctctctcctccagttttaagatacgagaacatccaaacattttcccccaagcttaaagaataaaaaggatgaagagaaagctgaagtaaggagaattataattacaccaactatcctattttgagttatctttaacatttttttctgtaagcaaaggagcacagcagggattacttaatgaaactatcttcaaaacgaaaatgtttcctccaaccatttctagatgtttagaacttatgaatgttgtgaaatttctacctccaccaaaataatgcttatttcttaaaaccgatttaaaaagccttgacatataacagcaccaacctatcaaacagaaataaccaactctttaaatgttattcaagttgtagttataatgtgtaattagtcaatctggttgaggacaattttattctaaaaaccttcttaggaattctctcccaaagagtaccgaaacaaaaatctcacagcaagaaagcaatgatg

SEQ ID NO: 321398 - DNA, 429 bp, Homo Sapiens
tttttcgcacatcaaaaatttatttcttgctcatattacatgtgcatcgcggtcggcaaaggggctctgctcatcacaggctatcaaggatgacagcaaacccctcccttctgccgcagttacacttacaggtggactcaaggttgaatgtcaaaggcagaaagttacaacctgggaatacaggataatgcctttgtaccccccaggtagggaaagatttcttaagtgaaaaacagcatcccatacagcacaactgggcactgcctactcaacagccaaggcttggccatccccactcctcagtatgggccccagaacccagggcctgggggactctgcacacaggcatgtggagaccacagaagcctgcccaatatagcgctgccaggaacagcaaagacaaaaccatagaagcctatcgcgggcacc

SEQ ID NO: 321399 - DNA, 545 bp, Homo Sapiens
  misc_feature (19)..(19): n is a, c, g, or t
  misc_feature (334)..(449): n is a, c, g, or t
  misc_feature (454)..(479): n is a, c, g, or t
  misc_feature (487)..(504): n is a, c, g, or t
aaccttttttggcttcccnccctttttttggttgtgcgctttcttttacaacaagcctctagaaacagatagtttctgagaattactgagctatgtttgtaatgcagatgtacttagggagtatgtaaaataatcattttaacaaaagaaatagatatttaaaatttaatactaactatgggaaaagggtccattgtgtaaaacatagtttatctttggattcaatgtttgtctttggttttacaaagtagcttgtattttcagtattttctacataatatggtaaaatgtagagcaattgcaatgcatcaataaaatgggtaaattttctgannnnnnnnnnnnnnnnnnnnnnnnnnnnnnnnnnnnnnnnnnnnnnnnnnnnnnnnnnnnnnnnnnnnnnnnnnnnnnnnnnnnnnnnnnnnnnnnnnnnnnnnnnnnnnnnnnnnaaaannnnnnnnnnnnnnnnnnnnnnnnnntttttcgnnnnnnnnnnnnnnnnnnaaaaaattttttaaaaactttttttggggggccgggccccc

SEQ ID NO: 321400 - DNA, 720 bp, Homo Sapiens
  misc_feature (380)..(390): n is a, c, g, or t
caggagttcatcactgcttagtgtcaacttgacatcttcagcttccagacagaaaacccatgctttactttgtacagccctgtcccagagttagtaagcctcggcttgtcacctgcttgcaaagggtatagacatcattctgggtagttctagaggatatcgcaacaagtgcgtttgaaggttcagcacagctggaaattgtacggtagtgagctcttcaaaatgaaaacagaatgaccggatggccatctgtcctgggaaactgtagaattgaataaatcactgaaaatagaacacttcttggaggctttcttcagaactgaactagaaacaaggttttcaggctcccaggtcagtagaccaaaccaacttccttagannnnnnnnnnnaagctgtttgcagaaaactgggtggtagcgtgtctgaaccaaacggaagaatagccagcggacatgggactgttccagcacgggccagatggcagactgtcgagagcagccctgcccagattgcggtgggggctgtgcagcggttccgcagggcccttccaactctggagtgtctgtagttcttgtgaaaccaaaacgttgactacctgcctctttcctcgggcatcgacgtgctcatttccaaagatgatggtgcaggtgaccttttccatcgtgagcttaagagaaggttagggaggcctgaggggcggggctttgtgttcccctcct

SEQ ID NO: 321401 - DNA, 1612 bp, Homo Sapiens
  misc_feature (304)..(304): n is a, c, g, or t
attgatgaaaaaaatcttgcagatatgaaaagataatttttttattcctatgacattttctgtttttacgattttcttttcagcaatgaaaacctctgattgttctcttttgggaaggtagtttatccaacataaggatcccatccttttccataaatgaatcgattaatcatgtcaaaagctctcagaggctggtcatagggtaaaatatgtcctcccacctcgaataattacctgatggaagtcacccgcttgccggatgtaaccagccacttcactgtcagatttaaagatcttccaaacnttttttttctgccttcttgtattcctgggatcctttccagtccatgcccatcaaggagcgctctgtcagggcagctgccacgatgatgtccagttggccattgtagatcagaaccttataattattcatgatttcagttaaccatggcttaactgactgtactgtatcttctcgcaagtacttttcaactatagttccatcattaaaagtctgattccccacgtggatggcttgtctcacctctgggagtgacaaaaatttcacatagtaaagctgatcctcaggttccgtgcaccgcaaaaagttatagtaattactacatcctgtaacattctggaagtaagaaggatcacttgttaagtcgccatctagtagtttatccagtatttcaaaggcctcaaaccagttctgcttcctgatgtgttctatgcattcatggcactgcttctggaagtactttttttgcttctcatccaacaagccaatttggtacaggaattctgcatagccccctataattgattcgggatcagaatatccatctccaatagcaattccgttcaggttgatcttcacctctctcacagggttgagggaatggatgaggtgtgcaatggctggcacatatttccctgcataagactccccagtgacataaaagtcattatttttatattcaggaaatatctggaaaaactgaattagtgcactgtataaatcccgtgcctacatcgtcctcattgactgccatatccgtgggtatcatcagtaaaactgaagcctgtgcccatggattgtcaatgtaaagcatggagagcgttgtggtccaggggaagtctctgtcacgcaaggtcatgttacttgtgacaacataaggccatgttccacaaagagtccaaacatggatgaacctcccggcccaccctgtagccagagaactactggggcatcttctggctgtatctgagctgggaagaaccagaagaagaggttgctgttgtaagtcttattcacggtgaggaagccggcataactcttcatgttcagtcctgggaaagggccgaccaaactcaagtggtggtcctttttggatcttcccagcttcaatgtaaggggtgagaaataatggctgtcaagaatatcccttaggtggcatggaaacacttctgtatagggagcgaaacagcccatcacaggggccaggcatcaacaggaccagcgaaacaatcaccttccacatggcaccaaccatctctcagggtgcggcgcagtcggtgctcctccctgagccgcggcgcgcaaggaccc

SEQ ID NO: 321402 - DNA, 682 bp, Homo Sapiens
  misc_feature (602)..(610): n is a, c, g, or t
ggaaagatgactttttacaagttagcaagttgctaggcaaccccaaactcctcactcactaaaaggcagcgtgcagagtatcataagcagaaccattccatgagctcagtgagaaataggcagcctaacctatttcgtatggaagaacagatgtccttaaaacttattttggacacagaaattaaaaatttggtttaaaaataagtgtttccaaaaatcctggaaacagaggtagaaagtgttctttatttttcctgacatgttttctcgtgagaaaacactttcctttttatcccatggactgctcccagtccctaatgttaaaagcagttctctttatagaactactaatacaactacgttggttaaacaaaaaaacactgtgctagtgatggctgttgtattggaagttggagtcagccgtgacccgcgcccactgcaggagcccacactgattctgaatcagaaacgagtatgggtcaggtgaaataggtaggcaccctatgtttacacatttcagagcgcaagtataaactagagtgcaccatagctccctgttttaaatatcagataaaatcatcagaaagcgttacttctgaagnnnnnnnnntgtaaacatttcccccatgatcactgctgactcccctcatttgaggtcttaactacgaaaactcagttcact

SEQ ID NO: 321403 - DNA, 649 bp, Homo Sapiens
aggttcggatttggggacaagtgtcattaatgagggccatggaagttcgtcagcttcagagtcacatgcaatctgatcctgggcggttccgctgctggggagcagctggctacggaattgaaagctaatggggaggggtggggcagcctctgggacaaggcctctctccgcagacccgggccttacaggttttcaccaggttggtactggggctctgtcgcggtaaagtagtcttccaggaagctctgcaagtactcaaaagtggggcgttcttcagggtcctttttccagcagtggatcatgagctcatgcagagagatggggcagtcctgcgggcagggcatcctgtagcctcgctccacctgctccagcacctcccggttgttcatgcctgggtatggcactcttcctttggtgaccagctctgtgagtaagattccaaaagaccacacgtcagacttgattgtgaacctcccgtacagggctgcctcgggggccgtccacttgatggggaactttgcacgtgctagatgattccacataagacctggtattctctgaatagtcagttgttttgtttttaaggtttctttcaaagcattcttctcacacttcctatcctttagcattctgttcacgcagctttgga

SEQ ID NO: 321404 - DNA, 973 bp, Homo Sapiens
  misc_feature (68)..(79): n is a, c, g, or t
tttttgttaaaacatgaaaaaaaattttattgttttagacaaagaggccacttttggaaaataatacnnnnnnnnnnnnagttgaatcaggtgaagacagagttaaaatcacataggatttgcatttttaaaaaaggaaagcactaggattgttggcactggagtaactatttacactgaacagaggtttggccttttacataacatcgatacaatgcattttccaaagtctgagaaataacaaggttctgtctcgaatgcttcacagaggaggttcggatttggggacaagtgtcattaatgagggccatggaagttcgtcagcttcagagtcacatgcaatctgatcctgggcggttccgcttgctggggagcagctgggctacggaattgaaagctaatggggaggggtggggcagcctctgggacaaggcctctctccgcagacccgggccttacaggttttcaccaggttggtactggggctctgtcgcggtaaagtagtcttccaggaagctctgcaagtactcaaaagtggggcgttcttcagggtcctttttccagcagtggatcatgagctcatgcagagagatggggcagtcctgcgggcagggcatcctgtagcctcgctccacctgctccagcacctcccggttgttcatgcctgggtatggcactcttcctttggtgaccagctctgtgagtaagattccaaaagaccacacgtcagacttgattgtgaacctcccgtacagggctgcctcgggggccgtccacttgatggggaactttgcaccttgtcttgctgtgtactcattgtcttctatcaatcgggccaatccgaagtcagcaatcttgcatatgagtccattccccactagaatgtttgctgatcgcagatctctatggatataattcatgcgctcgatgtaagccattcctgcagccacctgtgctgccatgtccacaagat

SEQ ID NO: 321405 - DNA, 1114 bp, Homo Sapiens
tttgcaatctgtgcctctatgtctgtgcactggggtcaggactttatttatttcactgacaggcaataccgtccaaggccagtgcaggagggagggccccggcctcacacaaactcggtgaagtcctccaccgaggagatgaggcgcttccgctggcccacctcatagccaggtgtgggctcggctggagtctgtgcaggggctttgctatgggacggagggtgcaccagaggtaggctggggttggagtaggcggcttcctcgcagattccgctggcgagcggctttgatgtggcggagcggggcaatccacttggaggggtagatatcggtggggttggagcggctatgatgcacctgtgaggccatatttgcgtgcagggccatctggcgggccacgaagggcaggttgcggtcagacacgatcttggccacgctggtgtccacaaggccctccatgtctttcctgcactgcagggacaccaggttgcactcgtagtccagcggggtgacgatcacgtggacaaagttgaactggcccttgatggtgccaagcttgaagtcctcaccggagtcattgtagacaatggacacaaagtcgttgcccaggtggcgcttcttgtcgcagcggtgcttgtccacgtccttggtgggcatcagggtggcgatgtggaagacggcttgcatgatgtcatcgtgccagcagtaggtgaactggccgtcctcaccacacacgtccaggcctcccaggtacaccttgtccggctggcagtccttcagctcgatgagccggcccaggcccgtcaggaactccgtgtacctgtaggagccatgctcattggacaggatggcgagctcgctgttgctctggccttctccaacatacaggacggcgatcttgtgggtgtcgtatgatgggatctggtcgaggagctgcaccgaccgctcaaaggactgtgactcattgggcagcaggattggcttgtttgactcgtcgccaaagaagggggaatggtagagctgcaggaacacgaaactggggttgatgcctggcactttctctgcattggaggctgtggctctgctctttaaggcgtccctctctactctcttg

SEQ ID NO: 321406 - DNA, 502 bp, Homo Sapiens
  misc_feature (471)..(471): n is a, c, g, or t
ccttgtcccaacgtcccttggttgggccatcagggttggcgaatgtggaaagacggcttgccatgaatgtcaatcgtgcccaagcaagtaagttgaaattggcccgtcctcacccacaacacgtcccaggcctccccaggtaacaccttgtccggctggcagtcctttcagctcgatgaagccgcccaggcccgtcaggaactccgtgtacctgtaggagccatgctcattggacaggatggcgagcctcgctgttgctctggccttctccaacatacaggacggcgatcttgtgggtgtcgtatgatgggatctggtcgaggagctgcaccgaccgctcaaaggactgtgactcattgggcagcaggattggcttgtttgactcgtcgccaaagaagggggaatggtagagctgcaggaacacgaaactggggttgatgcctggcactttctctgcattggaggctgtgntctgctctttaaggcgtccctcctgtgccga

SEQ ID NO: 321407 - DNA, 510 bp, Homo Sapiens
caattatatactgtgatttttatttgttgcaatacattacaatttcagaggtactttggggctcaaaagctaggatttctaagtcagtatgtgcatttcacacgataaagctgttaatggtgagcaaagtattatatactaactagatttttccacatctgtatagtatattatatgtattttgtggtattgagagtatagaaagtttagagtgtcaaacatgcgtttaatgtgtatttttaaacaaatttatggcaattaaaatatttggagacaagggtatcacatttcaatttgtaaagatctttttaactctactgtgtcattaagatgctttgtacaatgccaaaccatagttggagaaactaagtttaataaatatcaaatagattttctgtattaaagttactgaacactgtactctttatatttcttcaactctgagcccttttcatgcaattcctgttttgtgtcttaaggtccgttactactctttaaaacctcgtgccg

SEQ ID NO: 321408 - DNA, 713 bp, Homo Sapiens
ttaagtaaactttattttcaaaatgcttcaggtacaaaagaaaacaatggcaaagtctaacaataattaacaaaccagctcttgagcgggcagagtgctccagggatgagaggggctggggatggaaaggtggttgggagacacaacatttttctagcttcagaaagtcagggagcccagatcacagcctgaacatcatggtattggttacagattctttacaaaggtgtttacctctctcatgaggtcttcttgtttggttacttcctcagaaaaatcatcattgacatccaacaccagcactggaatgttcatcagagcctcaaagtggagcctgtcactgtacacagacctctcaaagatctgtactggcttcctggcctgtaagagtttctcagggaagggctccagctgtactttcaggcggctcaaaaaggaaaatgtctggaatgtgtaggaccatcgtgctggctcccggtacatcatatccagcaagtttccaagactttgggcagtgcaggccaatgttgccttcgatggagagccttcggggcccgcgccccgcgtgcaggcctctggaggaggaaacgccctcgagtgggctcttggccatggaactgaagggtgctcgaagccgacttagaaagaggcggcccgcggccatcccacccacgattcacacagcgatcacttccgccgagagcacttccgcc

SEQ ID NO: 321409 - DNA, 850 bp, Homo Sapiens
  misc_feature (606)..(606): n is a, c, g, or t
gagggggttcttctgggtgggtccttcctcaggaaaatcattcatgggcttccgagcgccagcactgagaaggtcatcagaccttcaaagtggagcttcgtgtcttggaaataaaccaggcttcgtgtggccatccagctgctctagataggccagctcaattcctttctcctcctcccctggccctctggtacagtctcttcaaaacaaacctggggagaagcctggaggtagatgaagccatgtaatgtgatccggctggcaaactcccacaggagaaaagaatgccagtcctgatagatatgccactcgatgtcactgagggaaccattttcaaaaagattctttgcaaagatatacctgtcactgtacacagacctctcaaagatctgtactggcttcctggcctgtaagagtttctcagggaagggctccagctgtactttcaggcggctcaaaaaggaaaatgtctggaatgtgtaggaccatcgtgctggctcccggtacatcatatccagcaagtttccaagactttgggcagtgcaggctttttgggtgccagcagcctggatattctgccatgttgctacaggttctgtagctacngtgccattctgggtaagttttcgtgagtaacttcacaaacgtggactttcccacagcaatgttgccttcgatggagagccttcggggcccgcgccccgcgtgcaggcctctggaggaggaaacgccctcgagtgggctcttggccatggaactgaagggtgctcgaagccgacttagaaagaggcggcccgcggccatcccacccacgattcacacagcgatcacttccgccgagagcactccc

SEQ ID NO: 321410 - DNA, 980 bp, Homo Sapiens
ttagaaaaacaagcataacttaagtaaactttattttcaaaatgcttcaggtacaaaagaaaacaatggcaaagtctaacaataattaacaaaccaggtcttgagcggcagagtgctccagggatgagaggggctggggatggaaaggtggttgggagacacaacatttttctagcttcagaaagtcagggagcccagatcacagcctgaacttcatggtattggttacagattctttacaaaggtgtttacctctctcatgaggtcttcttgtttggttacttcctcagaaaaatcatcattgacatccaacaccagcactggaatgttcatcagagcctcaaagtggagcttcgttgtcttgtgaataagccaggcttcgtgtttggccatgcagctgctctagataggccagctcaattcctttctcctcctccctggccctctggtacagtctcttcaaacaaacctggggagaagcctggaggtagatgaagccatgtaatgtgatccggctggcaaactcccacaggagaaaagaatgccagtcctgatagatatgccactcgatgtcactgagggaaccattttcaaaaagattctttgcaaagatatacctgtcactgtacacagacctctcaaagatctgtactggcttcctggcctgtaagagtttctcagggaagggctccagctgtactttcaggcggctcaaaaaggaaaatgtctggaatgtgtaggaccatcgtgctggctcccggtacatcatatccagcaagtttccaagactttgggcagtgcaggccaatgttgccttcgatggagagccttcggggcccgcgccccgcgtgcaggcctctggaggaggaaacgccctcgagtgggctcttggccatggaactgaagggtgctcgaagccgacttagaaagaggcggcccgcggccatcccacccacgattcacacagcgatcacttcccc

SEQ ID NO: 321411 - DNA, 983 bp, Homo Sapiens
  misc_feature (942)..(942): n is a, c, g, or t
  misc_feature (951)..(951): n is a, c, g, or t
  misc_feature (960)..(960): n is a, c, g, or t
atccgaatgaaccttatgatgtgtatattgagatgtactcagtgtgattttaaaccaaattgtcttcctgtagtcacaatatatactgtagccttttaacagcaagtcttgctttcccaaacagaaagccattctgaaaccctacagtatcacaggtgagaaaaggtggttattttttccccaagacaacagcactagtaatcccacttaataagagcttatttaaattggatgtcagcctcttaactgctaagcactttgtgggtctcagcgtttttcataaaagaacttttgtatttaatacaaagtttgctttgagacttttcatcatatgatcttttttccataaacttgtacagtgcaaaagacattttgaataccatgatcgatgatgtcccatgcttcgaggaaaaccaaacactttccgcctctcttgcaaaatccattcctcatgctgaccctcctcacgatgggctgtgtcagcccagccccttcccttctccagggcccagagaactcttccacaaacaagatgagagccactcgggaaaagagccatagtcaactgggagggcctacatctggatggcggtggaaaaacttgagggtttggggttcaaagtcagcccatcccacctggcaaaatcctcctggaaggaggaccttcaagagcgcatcacctgaatgtcgtgaagaagtatctctgaatgtatccaggagaggaactgcataaccaaaggggtgaccagccctcagatgtgcttattggattccagtacaaacgccaccaaagccagcccactgctctcctacaaggaaggaaagatctgcacgtgtaaaacatggggcagccttggaacatggtgttttttggagtttcctttctcacagttttccatctccccacttcttttgatcagtcatgtgtccgtgaacctcgtntccattganatcaggatnagctgtgttttgcacaccatgct

SEQ ID NO: 321412 - DNA, 1117 bp, Homo Sapiens
ttcaatataaatgtgtaattttaatatttaatttaaaataaaaccaaggctggattgggttgggaaagaacgtttgatttgcagaagaatataggaatttttttaatcacgacattacaagtcatttgtgaaaacagccttcctcctgccaccggtccctatacaacctgcttaggaaatatggaggtgaatcatcccccttacctcttccctaccagggcttggttctccccaaaatccaaaggagaaataaatgtcttccgttgcctcttcccatttttacagtcagcttctaaccccttgcaaagccctgaatcagagccaagcacctcagaaaatgagggtcccttggttctcttattgaagttgggcacatgtggtcagagaagccccaaggaaggccacagggactgacacctttacttttggaatttgtgcagccagttgtcagggctcccaggtgcaaccaccttataaccatatccacagtcacagaggagggagaggaggaaggatgaaaaccctgagcaggaccagacccccgccactttatcatgaccctaccaaagtccctctcccaggggtcattggcagagaaaccccaacagctctctcaatcaatcactggggcagcagggaaggctgagggccctggctggggaaaagctggtctttggagaggtatgaatgtgcagatataaaaagcaagaagagcatccttatctccttgccttggctaaggcactgacaggaaaaatgcaaggtaggaatggcaaagaggggaaaggaagaagacaaaaatataggaactggaggggtatggggactaccacatgggccccatacttgtgcaaagaaatgggtagagccatgcctgcatgtctgttacccataacattcccctcaccctgctccagagtggaaggaaaatgagttgcaggaatccagggagcacaataacatagggtatttccctgagccttagggttaagggctaaagaataaagctttatacacatggcaatttctatcccttcctatccttctcagtccccattcagcctaatgctgaccatccttccactataagagagatgagggaggtgtcggcacttga

SEQ ID NO: 321413 - DNA, 992 bp, Homo Sapiens
  misc_feature (142)..(142): n is a, c, g, or t
  misc_feature (152)..(152): n is a, c, g, or t
  misc_feature (171)..(171): n is a, c, g, or t
atctctagagagaacacacgttttatggcccacatgttcccccctatcccttaagggggggcgcgcgcgcgcacaaaaaagaaatttgtttttaagaaaaatcttcttttaaggggcccgagggcgcgcccccacaagaggnaatccttctnggttcctccttgcgccccncgcgaagggcggttttaatatttaattttatttaagttcaaaaaccggggcactgccacccttccaggggtccatccaatggccactttccatggcccgcttccgttttcgggggcttcttttaagtgcccaagttgtatccccattttttgctgaggttcaggcaattgaaaaccaaacaggctcccatctagggaaatcaccagcccaaccatggcaaaacccaattcaatgaaatggaaaataatgtttgttacagggagtgcagcaatttagagagtgtctcaggagtgtggctcactggcagctgcagctatgttagtgcttctttctgcctcaagttcagaaacaagctgggactatctcagggtgattgaattttcctgctgtggaatcatagaagtcttgcagtctcccaggtttgtgttcaaggtcttcatattcagatgcttgaagaatcatttcacattggtctagctgcttcacaaatttggcttctgcactagattgggtctcgtactcttcccaaagttcatagagctcctttctgaggtcctctggtaggagctgggttatctgcttcatagcttccggtctttgttaagacggtcatctttgatcaccatagccataactgccatccggtacatgtgatctgaaacgctctccggcctctggacatttctgtatacccagccagttcgtgggactctcttgagctgccctaccagccgcaggaactgcagtagggaccgagccccgtggcccgagaaggtcgcagaggagaccgaagccatgcggccaccgaccccggctggccc

SEQ ID NO: 321414 - DNA, 1009 bp, Homo Sapiens
  misc_feature (882)..(942): n is a, c, g, or t
ttccctcgttctccgtgaggccttctcttttaagggccccccaaagttggtatccccaattttcttggtggaagttccagcccaattgaaaaaccaacccgggttccccttctaggggaattcaaccaggcccaccattggcaaaaccccaaatccaatgaaatggaaaaaataatgttggttacaggagtgcagcattttagagagtgtctcaggagtgtggctcactggcagctgcagctatgttagtgtttctttctgcctcgaagttcaggaacacagctggactatcttcagggtgatgtgaattttcctgctgtggtaatcatagaagtctttgcagtcttcccaggttttgtcgttcaaggtcttcatattcagatgcttgaagagatcatttcacattggtctagctgcttcacaaatttggcttctgcactagattgggtctcgtactcttcccaaagttcatagagctcctttctgaggtcctctggtaggagctgggttatctgcttcatagcttcctcttctcgcctatgtttttcttctttggggatgttatctgctggtgctatgtccccaacgatgcattctgccatatcatgaaccagggctaggcgtacacatcggtctttgttaagacggtcatctttgatcaccatagccataactgccatccggtacatgtgatctgaaacgctctccggcctctggacatttctgtatacccagccagttcgtgggactctcttgagctgccctaccagccgcaggaactgcagtagggaccgagccccgtggcccgagaaggtcgcagaggagaccgaagccatgcggccaccgaccccggctgggcggagcaggccgcggcgaagctcnnnnnnnnnnnnnnnnnnnnnnnnnnnnnnnnnnnnnnnnnnnnnnnnnnnnnnnnnnnnnatctctttcgacgcgtgggtcgacgatatcccggaattccggacctggtatccagccgctgcctgta

SEQ ID NO: 321415 - DNA, 498 bp, Homo Sapiens
aaaattgtcaagatatttattgggttaacatgtgagacatacaatttgctcagtaaaaatagcacatgaaaaaatattataagcttatttttttaaagaaatgggtatgttattacctctttttcttgcttgcttatgattattaatttgacaaggttggaatgtgcacagcacagcttgaggacaccaccattttaacactgaatcactataccatgaactgacagaaccctgcatgaaggatgaaaaactcatacccaaagtcaagaatcacacagcagcatggagggggaaaatgaactatatgatgctaaccgcatttaatttcgaagtggggggaaacagggcatggggagtgaataatggttgaagttccaggctctaactgtacatccttaagtaaattaagtttaactcatctattaaaaagtgagttaaaacagatgagttttaaggtccatctcaactctaaatgagatactagcaaaaacaaggaat

SEQ ID NO: 321416 - DNA, 489 bp, Homo Sapiens
cctgtaagaattatttttcagggtagttgtaaaaattaaatgagataaagataattgtactgaccaaacttattggcacatgacaaataaatatccattttccccccaccctcacctctagactttatgaatacatatttaaaagttagcaatcaaaaaactttatgttcaggctagattcaagtttaatatactcaatgagactagaccagtccaataacttctgggagaaacaattttttcctacgtctgagatactaagaaatagtccatttacctcaaaaatagattagggtatgacaagagggaaaggtctcctaaaaaagacctgtcaaaagccaaatgaagtaaaaatataattcttatagctaaatagaaaagctatatgttaccccaagcccaaagtcagaaagaaaatcagtccaatacattgtaaattgcacaagaatgatacatatccatactctgttattaccatgattacaaaag

SEQ ID NO: 321417 - DNA, 805 bp, Homo Sapiens
  misc_feature (49)..(199): n is a, c, g, or t
gagacagcgtctcactgtctccaggctggagtgcaatggcgtgatcttnnnnnnnnnnnnnnnnnnnnnnnnnnnnnnnnnnnnnnnnnnnnnnnnnnnnnnnnnnnnnnnnnnnnnnnnnnnnnnnnnnnnnnnnnnnnnnnnnnnnnnnnnnnnnnnnnnnnnnnnnnnnnnnnnnnnnnnnnnnnnnnnnnnnnnngaagataaaaaataacttcttattttctaattctgagaatgatttaagttcactttctaacctatccggggctgttttaattatttttgaacttccaggaatctgctttcgaacccaaattttattaagtgtaactactcggacagcctgccaatcatatcacaggatatcccaattggaaagctattgggaatgtaccttcctccccgagtagaaataagttataaacggccaaagtagcctattccaaagggcagattttaatatttcaaattcacttccttcccacataagaatgtgaagaggagaaaattattcacatgctcaaagttttagcaggtttgagaaatggttttggggtgattattttaaattattggctatatttgttctgcttaaaatgtttcaatcaaagtgacttgaaaggcagagacaactgcattaagatacaattaaaaacttatttgtgactcagcctatgttaaatactacaacttggaaaataaagcagttttcttacagaaatatcattcttaaactgggattgatagttaactttaacccacgcatttgaagcttatttttttacatactaaagggtatgtt

SEQ ID NO: 321418 - DNA, 1125 bp, Homo Sapiens
  misc_feature (826)..(826): n is a, c, g, or t
  misc_feature (1019)..(1019): n is a, c, g, or t
gacttcttattgaatattttactgtgttaacgctcattatttatacagacattaggtttacagaatattctgttttacatcaccaaaattcacagtccgagaataacaacataaccaggtcccaattcctccatgcaccccacaagcttctgtccaccctattttctggacagaaattagcacaacccacaggtttttcctgggccaagtcttcctttgctgccactgtcttggcttctaatcaagctctgacaggccaacattgtgaagtcctcaccctttcccattcacttctggtctcctagtctagctaatccccctcccccagaaggttaaaggcagttggttcacaacccaagttgtttggtgaccttgggtgagctccagacaggcactggggtgaggagatgtctgtgcaaaattacttgtagaatgatcttgggatgctggattttaatttttgaagcaagaaagttagggggggacatatttcctgtcctgggaaaaatggagaccaaagtgatattaagaaagtagtttggatttcaaatttataaatcacttgctctgtgggtagctatcaggaactagatcattttccacctctgcttattgtacttcttaattttaggttttatacctgggaaagctgtgactctattagagctttgaatcttttcctatccttttatctttactcctacagggaatggcctcagctcccttctcttttagaattaaacaagtaaaaactaagagttaactttttaaaaaaactgactccagggaaaggacattattatattaccaatagctgatttttttntccattctgggacctaaaatgcttacaggtactagcagtacatgtcggatagcaaagacttttcctttcagacccaactaaatgatctcctttctgcctttgatactcttttccttctttgtctttcatccttgcctgtcacctcacagatggattcttcctcatttctcttgcctcacttgcccaggtttanttgctagcgtcagtttaaggagctggacttcctgggacctccttggcatcttgtagggtgattggagtggcctgagtactcagctcttcagaggtcagctcgtgcc

SEQ ID NO: 321419 - DNA, 435 bp, Homo Sapiens
gacttcttattgaatattttactgtgttaacgctcattatttatacagacattaggtttacagaatattctgttttacatcaccaaaattcacagtccgagaataacaacataaccagggcccaattcctccatgcaccccacaagcttctgtccaccctattttctggacagaaattagcacaacccacaggtttttcctggggccaagtcttcctttgctgccactgtcttggcttctaatcaagctctgacaggccaacattgtgaagtcctcaccctttcccattcacttctgggtctcctaggtctaggctaatccccctcccccaggaagggttaagggcagttgggttcacaaccaaggttgtttggggtgaccttggggtgagggttccaggacagggcattgggggtgagggaggatgttttgtgg

SEQ ID NO: 321420 - DNA, 669 bp, Homo Sapiens
ctttatgagctgattaaaaaaaataagtttcagggttttagcgtccagttggtacgcaagtttgcccagtccatcttgcaatctttggatgccctccacaaaaataagattattcactgcgatctgaagccagaaaacattctcctgaaacaccacgggcgcagttcaaccaaggtcattgactttgggtccagctgtttcgagtaccagaagctctacacatatatccagtctcggttctacagagctccagaaatcatcttaggaagccgctacagcacaccaattgacatatggagttttggctgcatccttgcagaacttttaacaggacagcctctcttccctggagaggatgaaggagaccagttggcctgcatgatggagcttctagggatgccaccaccaaaacttctggagcaatccaaacgtgccaagtactttattaattccaagggcataccccgctactgctctgtgactacccaggcagatgggagggttgtgcttgtggggggtcgctcacgtaggggtaaaaagcggggtcccccaggcagcaaagactgggggacagcactgaaagggtgtgatgactacttgtttatagagttcttgaaaaggtgtcttcactgggacccctctgcccgcttgaccccagctcaagcatta

SEQ ID NO: 321421 - DNA, 928 bp, Homo Sapiens
ggattttggaatactcataaatatataataagataatttgaggatctgacaagaaattcacttatgtttcatatacaccttagacatgtagcttcttcaagctacgcttgatttaattgttcccttttgatattcagtttatttccagtttgatgctgcaataccactgtgctgaacgtctctggcacattcatcttggttgcaattgtactttaggctatatttctaagagcgaaatgaccacagccaaaggtatgaacattgttcaggctttcaataaagactgccagatatttacaaagattgtgccaatctctattctcaccaccgcttttgattattgtccttatctctgcttgccactgagccccgggccatgtctctgtaactcactaacggccacatcccatttacttccccatgagtaggatttcagtttcccaaacctgagatgatctgtcagctggagaactgggacgagcagtggatcctggatctaccgagaactgggaataggaaggcttccggtagtgcttgcccaggttctgaagccagacacaagatgaaaaagctaactccaaaacagaaattttctgaagatttagagtcatataagatatcagtggtaatgcaggaatcagctgagaaactttcagaaaagttacataagtgtaaagaatttgtggacagttgcaggcttactttccctactagtggtgatgaatacagcaggggcttccttcaaaaccttaaccttattcaagatcagaatgcgcaaacaaggtggaagcagggcagatatgatgaggatggcaaacccttcaatcaaagatctttgcttttggggcatgagcgaattctcacaagagcaaagtcttatgaatgcagtgaatgttggaaagtcattaggcgtaaggcaggggtgttg

SEQ ID NO: 321422 - DNA, 677 bp, Homo Sapiens
aggtgaacagtgcctgtgatggtactactggcagcactacttgaagagaacctgagttaacttgggtgtataatcttccatttcttgtcctaatactttgaaaagaattaataatgtcctgacttgttgcatactgtagtgactggattggagttggaccatgataatacctatctgacttcttgaggtttagtgcaatcgtttttacagaattatttttccccaagtcttcatattcaatggactcttgtaatttcgcccttttgactgctggctgaaagcagtctgcatctccggaatttccatccatgttgctgggctcactagtttgttcattttgtgcttcttgttttctgagtccagctgccaggaccatggcactgtgatggttaaatctcttgatgatggcagcattactattctcttttatggatttagaattggaagcagatggcacagaggaaatgccatagccctcatctaatggtttatcttccaaagctgttaaatctagtagtgggtttttcactcctaatgaaaccattgtttttaggcctttttcatctattttggcacattctgcaaagagatcctttgaccctgtattcagccgatccctgtgaaaataatgggactggaaaaaacgtgtccagaattccttctctgtcatgttgtcc

SEQ ID NO: 321423 - DNA, 455 bp, Homo Sapiens
  misc_feature (408)..(408): n is a, c, g, or t
gaagtttctagtctagctagaaggacagatgtgggacaaaaaattgtgacagaaattcaagtgtaaaagaggtaaagaggagacagaaagatatttaaaacaaagagcatccaggaatattttactggatactgtgagaattgaaggagactttcaagataaatgaaattcaagaggccaacatggggaggaatgcattccaggtaggggaactggctacttgtgagttctttgagaatcccaaaattactatctttgaagttttccaagtctttcacattttgtacttttccacaaagttaacagttgccaaataccaaataattttatattttactatataatgtgggaggattaatgttgttcaactgtagggggggttctttttaattctgggttatataaggngtaataataaggtacttaccataggtccctacctatgttcccggggg

SEQ ID NO: 321424 - DNA, 851 bp, Homo Sapiens
atactcctagtgatgttgtattgctggccttcatgggcaaatgtcaggacacagcggtaatagccagcatcttccagggccacatcgtgtacgagtaagtgagtggtccccctcacacttagaaatttctcattgtctttatccaaaagaagagaatccttgtaccattgaatcttcacgtcagttttgtcacgggtgaattcactcaggtcagggcatactaataccccagaggttgacaaggttaaaatttgcgggtatgagatgaacggcaggaaagcatctgtattctcaaaaactctgagctcaatggacattttgtcacagtaagaagcatttctagtagtgcagacgtaggtgccagagtcctcctgcaaggctggcagaagccacagagcaccgtcctgggcccacatccgtgtctcttcttctcctgggaccgtcctagcagagtcatttttatgccatgtcaggttgatgcgggggctgacagaggcccacaaccagtagggcacctgggggcacctcagggctacaggctccccttccagcctgaactcccgcttgtaatgcctcccacgaaaccggcagcttctggcagcccctgtgtgtgccgcaggctgaagggtgaaggcagaaactcccattaccaacacgtacaagcgcaacattgctcctgacaacttccagaggacacgggaagtggaggactgagacccagcagcacgtggcagaagcagctttaaagtcttccttcagaagctctttctgttgatttgtatgagcgtcactagtttttaagagtagcagaatgtattttccagaggtgaccacaacagtatctcccatcc

SEQ ID NO: 321425 - DNA, 668 bp, Homo Sapiens
ggcacgagctggaaggacaaggggaaacagtgttctggggtgaaaatggagaacgaagtcctccggggcagtttttggtgttcctcttttactgtttaggcctggtcagctctggtcccaaacttggacatcccagctcaaccaaacctcaccctgacactacctgcctgggtcctctccttacagtgcagttcagtcactgtgccattgatcaggtcagcccttggggtcttaccactccccggtgtggctactaaggtactgacttcctttagactattttttaaacaatgcacccctaattacacttgagatattttaggaatcttggtagaatttgagcaccctacaatatagctcccagcctggcctgccctggctctgctccacagtgtccccctgccagccttccccgtacccaaagactctgctgtctggattccactacagcgaccttcagtttctaactgaagggggtgatcttttgttttaaaaaactgcagggcatttgtgtgagcacccctctcacccatccgaccatccaaggagggctgcgagcaccatgacccatagcaacagcagccagggaagaacaatggccaattccacatcagagtgtcttggttgttcttccaggtcttcaaacaactgcttttaagaaatttttg

SEQ ID NO: 321426 - DNA, 510 bp, Homo Sapiens
  misc_feature (257)..(296): n is a, c, g, or t
ggaattcttaagctgtttcactacctgttgtatcatcatctcaaaaatggttctgccatgttgagttgactcccataatcaaaaacaatgttttctttaacaattcaagtaaccaaaattgtacatgaataaatttataggtcatttttgcagaactggattaagaaaaaataaaatgtaatacattttctagtaaaacttctagtaaaggggtattggatgaattaattttgatttaataattgcctcacaatctnnnnnnnnnnnnnnnnnnnnnnnnnnnnnnnnnnnnnnnntgtaaggaaactggggtaaaagaacatgatgatgagagaaaagaagcgcatagaagccagtgattcttatctttcagaggaattatttcacaatactgatagtactgggaattgttaaaagtacattcctcatgtgaacctaaagtcagcaatggttctgccattttgatgttgtttataaaacagggtgtgaacctaacaaccacaacttccc

SEQ ID NO: 321427 - DNA, 1055 bp, Homo Sapiens
accggcttaccaggcttttcaaaatgagagtttattttaatgattaaaaaccgctatttaagtagctcttgccaagccttttcattaccaggtctccatccctccccaagtatttctgcgagtctcatgtgctaagagatgtcttgagcagcctctgcagctttccgtgtttctgtggtcagctactgctgccctttcccgggaggcattccattctcctactgggtcctctcaagatgccaaagcttggtgctgggatttaggaacacatcctgttagatgtcagacagtgctgcttgtgctggggagcctacagaacttctgatgaaactaccatctggttttaccctctgtgccgtggatgcagacgtgtccttgggctacagagaggacatgatggagcaggaggccctatcccaaggaggtgttagaactgggtccactttgtactgcctctttcttcttaggtcacaatgagtgtcctctcagggcacaactcagatcttcaacccatggctcgctgtaggcctgccccgccaggtcctccagcttgccattcatgtttccatcctagccttggttgtgctggaactcaggctggagcctgacactttgcctatatgcaaagggaagaaataggacttacattgccaaggaatcacttcttaatgtttgccagcactaaaaacaacaaagtataggaatctttttcccccacagtctccacaaagctatcaataagtataattcgcatttacaagttttaggccttcaacagatgtaactccatccaaatgaatcaatatgtgccatcaacctaccttatagaggtgtttttcctgattacatgagcaaaagtagctacagaaagatgggtgtcacagaaaaggcaataaattctaggttatgaactctactgcttctgggagctatttctgagatttttcagaacctacttttttatacctaagtctaatttgagcattctgcaatactttttttcctatcaggaaaactaatgcagatagtattatggggacgtgtaggttttatag

SEQ ID NO: 321428 - DNA, 866 bp, Homo Sapiens
  misc_feature (15)..(15): n is a, c, g, or t
  misc_feature (32)..(32): n is a, c, g, or t
  misc_feature (40)..(40): n is a, c, g, or t
  misc_feature (66)..(66): n is a, c, g, or t
taaacaatgtcaaanccctgggttttttcccnaacgggantttggtccttccttatctggaataancacaggcaaaaatgggctgggtaatggccggtttctggaatgcactgcacgctggctggacttaagcactgcagctcctcctccttggtccgccgggagcctcctgccaagctctgggcactggcatgggccgtggagctgaggacctcctcaaaactgcctccattagggttcgtaccgcctactttcgtctcatgtctccgaacttcttgctgatggccgttccaacgttgctgaaagctgcagttgccttttgccctgcgtgactcagggtttcatgtgttttcttgtaggcagtggtagtctgcatgtcatgccagcttttgctgaagttctgttttaattcattcatcaggttcatgccgagtttttgttttatctcaactagatgcctttctttcgctgacaaaacttgtcgtagtgttgtaatttcgtcttctagctgaactaactctgcttttaactcttccttttcctcctcagagagcatgctagagaagtcagcactggctactgcatcttcgtctgttccttgcaacggttcagtctccaacaaaccttgtgcctgcgcctccatggtggctgacttcgagctgagggcggcggggacaccctggtgcttcccagagcagatggcagctgcgcccaggctcagaacgcagctggccccgccgctcgctcccactcctggcacgcgtgtcgcgagcgctgcgcggagggggttggggacgcaggcagccgccactagccgcttctggttacctccgccccttccagtccacctggcccaaaccaagctg

SEQ ID NO: 321429 - DNA, 418 bp, Homo Sapiens
  misc_feature (13)..(13): n is a, c, g, or t
  misc_feature (65)..(65): n is a, c, g, or t
  misc_feature (105)..(105): n is a, c, g, or t
  misc_feature (398)..(398): n is a, c, g, or t
ccctgggtttttnccccaacgggaatttggtccttccttaaaaggaataaaccacaggcaaaaangggctggggtaatggcccggtttcctggaatgaactgcangctggctggacttaacactgcagctcctccctccttggtccgccgggagcctcctgccaagctctgggcactggcatgggccgtggagctgaggacctccctcaaaactgcctccattagggttcgtaccgccctactttcgtcttgaggcttgtgacagttgtctcaaccctctcctcaaatgatttgaaagtaggagaattcctcatagcaggcatacttatggaatggcgaatggagtaactcatgtctccgaacttcttgctgatggccgttccaacgttctgaaagcntcagttgccttttgccctgc

SEQ ID NO: 321430 - DNA, 539 bp, Homo Sapiens
gctttatcctcttctttttcttctactttttcttcttgcgagggtcgagcaatttgctggtttctgcctctgcgtttcccataattccttctgacgagggctttataattctcatttttcttggttaaatagtaatacaaaacacaatcaggaacactcttcctctccaagtatgatgcaattagtccaaagttttttggatgctggataaacttgtccttaaagatctccttttcatggtcagtccaaacattcataaactgcctatctttatacactttcatagggtcctccataagcccattcatgttaatgaacttgactcgtctttgttctgcatcaaacatcataggtggaatcacagagagctgccgcatttgtttctcattattctcctgctcagagagcccatcaataatttcagaaatctcatgctcactcctagcaatggtggctgaaagaccagctcccctctgcccaactcgctgaaatctttcttgctgttctctttgttttcgaatttctggaaactgcttttc

SEQ ID NO: 321431 - DNA, 1688 bp, Homo Sapiens
aggtgggttgaagcacttttaatcacaaacaatagtataagaccgtgaacagctcacccagtggctgttgccctcctccagccctcagctcaccctcttcccatgctccctccctgggtaccattgagtaaagagcagggtattggcagctgtccctgttgctatcaggtgattgataggaaggggatctagctagggaccacggcaatcctggccatccatccatggttctgtttctatacaacttcatcatgtgacatattccagctgtgaaagaggaacagtacagaaatgtgggactgaacttggctgctccattcagatggtccaggggtttagagtgtcaagagccaagggcaaaaaaggaggagaagtctggagtcggcataattcaagatgcagccaaatgtggaactaaggtgggttcagtggggaccagggaaggcctcatggccccagtccacaattgtgccccaaccccggcaatgaaactcacgcatatgcacaaacgcacatcaacaaacacacaaaaacacacagagcaaataacattactgaaagaacctggaggctattaaatacaaaatggcagttttctttcaaagtgaaaatatttgcttctttgatactcctcagtgccttgcagtctcccaatcacagaagagtagatatgggaagggccaagaggagtatgttgccagtggccctacaagtccatgtgtgctgaagtccctatagcaaccaccttactcttcagcccagtagctgcctcccatgtgaccattcacccgattggcaccattgctggagctactgtcacagggactttttgtgcaggtggtcacatcttcttcctctgagctgctctccacatcactgcgatcatccttcgatacctttcccctgatcaaggctttcaaagcaatccgtgcaattaggtaggaccagatgacatgcagaagctgtagggtcagcagcaggccattgaggagccaccatgaagcataaggcccgattatctcccaactctcaaagagggtcgtgttcagaatccagaatggatagattcctagtcgtgtaaccataaaaacagcactgaagatcacaaaaagggtgtcacagagccgctgatacttggcataattggccagtttggctgcctccagcaagaagtctgagacatcatgtagacacatgatcagagttcccactcgaaccatattgttgatgtaggagaaggagataagcccaatggtgaccaagtgatgcacaaacatgatcaggaagtcctttcttttaatgtctgtaaactgagaaaacataagggaccaatagaaggccaattccatgatataatagtgataaagcccacttgaaagaggctgaaatggatagttatgccagcactgtcggatgtcccagaaccaaggtgacgaccagagaaatctaattccatagcagaatatacataaataaaatgtgaatctccacatgctttcacagaatttagtaagcgttgggggcttgtcctgattcctccgatggcgaaaccagcattggatttttcggacattccaatccagctgctttgacaggccctccagccttttcttatcaggatacttggtaatagatatgaacaccttttcaaggatggcattgggttgggcctgataaggaccactgtc

SEQ ID NO: 321432 - DNA, 922 bp, Homo Sapiens
  misc_feature (19)..(19): n is a, c, g, or t
tactctaaggagtattatncttatatggactaacttcataggtgtattcttgatttcatgccacacacatatgataactttctctaccataacagctctctaggttagtctgacagagcacctgactttaagaaacaaacaaatgaacgaaccagtgaaacagacgtggggaaagatatgtacattttggaagtattacattcaacagctgttccacaatctggccatttttaggactgtccaacaatactgttaatccaggtgaactatttaaccagatttaatagtcaattgattaataataatagattccaagttaaacaaggcatgtatacattaaagaaagcagtacagaaatgtactgtatatgaactgtttacaaaaacatacaaaatgttggatggcacaagggatacagtgctaatataaacggattgtttaagctaagtgcttaacataaactgtccatccctataactaacaaagaatatttaagggacatgaaatatttcctataaaaataatgctatatggtgtactttattcagtgtatttttaggtggtattcatatgttcattatttttctcattgattcagtgactatatcttcatcatgtttccattttcatttcttccgaagctccaggaaaatctaacttgctaacaatcatttaaagcgagaagagaggaaagcaggagcagcagcaggaacagcagcattatgggtaccagctgggacagtgtgtgcttgcaggtgtctctcagatacgtgctacctgtcgccagaacttgtgctatcagcttacacccatggtaccaaatatctcactgaggtcacttcacagggctgttgaggtgatttttttaatacctctccgctgagcaagagtagagcggcctactggttccaaaactggtgac

SEQ ID NO: 321433 - DNA, 1726 bp, Homo Sapiens
  misc_feature (149)..(164): n is a, c, g, or t
  misc_feature (648)..(662): n is a, c, g, or t
aacggggggataaaaaaatttcttcttttggggtcccaaatgcggcggccaaatttgacataaagatttttacataataacaccggtaaatagggaccagtgtttggccccaagactctacattttttatcccaattaaggtttgaacnnnnnnnnnnnnnnnnccttttaattcccttgagaatcccatgctccaccccttttcgaaggaccccgttggccaccagggattccctattggggtgtacctcaagcccctgggcaccccacaggatctgttttggaaaaagttttcgagccctttaggcggccccacatgtttccgggagaacaaagaaaggttctatttcgcaaatatagggcacagacttcaagacaagctccacaaaaatattagcgggggggaaggggtaaccccctcacctcagtgagtggcacatggggagagagattccttgagaggataggaagcgcacttgagcactcaccgcagtctcagggcagagggaatgccatcggtgatgccactcagtgaacagtacaggagtaaacgcgagtcttgcggcacttgagtttaaatacacagtatttttacacgacctacatgcacagagttcttaagaaaaacatgtcacgtcggtggtctannnnnnnnnnnnnnnggttctgtttcttgattcccaaatttcaaaagaactttattaagaaacacagaaaagatacaaaatccataaccaaaggaactgaagagtttacagcacactgggtttagcccatggcaatgtagagaaatgggctgggctggcgctcagtcactaggcaccgacgtcctgattcctcgtctttgacccagtgtcccttggttgctaagtcaaccagttctaactttctctggagacaagtcaggctgccctcccaaaccttcccaaacctccttcctaatgtctttatacacaggccctcttccatctggtccctaagatttctcacccagcacctcaggtgagatctagtctgatgttgctgtactttgtatactgctccaatcacaggagtctgcagtttctagaaaatctatttttgttcctgtcctgatccatttcataaactgcattcacaatccagttgggtagtctaattttgctacctttggtcaagttacctactttcccaagtctgcatctgaacttggtctttctcctgctaacaacgtattcctaggtactctctctggcagttctctgccccagttcatccaagaccttctccccaatacagaagtccgcacccctttccaatctcccacttaatttatgggatagccctagttctctgcttacctttcaaggagagacaatcagagaccttgatcttggcactcgcctgttcaaccctgcccagctcaggtcagcaacctcatcggtttccttgcaaaacttttgacttctgccttggactttcgccccttagaattttatttctgcagatttagaatatggcattgctttatagataccgtaataataaggctaaaatagaaggagagctactccctttccaaatgatattttctctaaactctcaaaagattgggccactcttgccatttttcactttttctaaatgtctactcttatgggtccttaactaatacggtctgattcttagctggcttttaagaatggcattacatttcagcaagctggccattggtcccttctattcc

SEQ ID NO: 321434 - DNA, 884 bp, Homo Sapiens
  misc_feature (504)..(525): n is a, c, g, or t
tgtagctttgccgtgaatgggatttctgaagatttgactgaggtctctcttggcctggaagaataacactgaaaaaacctgacgctgcggtcacttagcagaggctcaggttcttgccttgggaaacactactagctctgaccttccatacctcacttgggggagcacagggccccgctggctactcttcaccaacggcagtgccaaaatcagcccccacatcaaggtggtgttctctgtgctttctctcgtccttccaaagtcggttctgggcctaacgcatgtcccaacaccttgggttcatttgcccggtgaactcactttaagcattggattaacggaaactcccgaactacagacccctccctggtgggttgcatgaatgtgtctcattactgctgaaatgtcctcacatctcttccactgttcttcagagctttctggctctctttccccacaaaattcgacacatttaaaaatctccgtgtggctttaaaaaatggnnnnnnnnnnnnnnnnnnnnnngaggtgggagaggatgtgtgaaaatcttttccagggaaatgggttcgctgcagaggtaaggatgtgttcctgtatcgatctgcagacacccagaaggtgggtgcacactgcatgcttgggggtgccaagggattcgagacctccaacatacttgtctgaaggtggtgattctggccatggcccctctgccaagcctgtgtgcgatgcccttggtgctttagtgcaagaagcctaggctcagaagcacagcagcgccatctttccgtttcaggggttgtgatgaaggccaaggaaaaacatttatctttactattttacctacgtataaagttttagttcattgggtgtgcgaaacacca

SEQ ID NO: 321435 - DNA, 571 bp, Homo Sapiens
ctgtctcttgcacttagaggctacagtaaagtacaaatcatgggtaccttattctatgttggtatctccagcattaggcataaaggagaatcagtgaatgagtatttttaaatgaactaatgaatacagattcaaggaactgttagtagaacagtttggttagaactgagttgaaaaggtaatgtggggacagactgtcctgggccttagatgccaggctaaagcatttggatttcatctgatagacactgaaaatccaccgctggttctcaagaaggataatgatataacaaaagcagtatgtaaggatgactcatcttggcagcagtatgcagggtgaattgtaggaattaagatggaaaaataataaattagggacaccagttaaaatactaatgcaacaatatagacaagaggaataatctcagtaatcccaatcatgcccaaggcaaagcagagaaaaaacaaacaaacaaacagggaaaacaagcaaagaaagagggctcatctttcttttctctgcagattcccactctatatttcttgctgccccatgcctatctccataagc

SEQ ID NO: 321436 - DNA, 569 bp, Homo Sapiens
  misc_feature (57)..(57): n is a, c, g, or t
tggcagagcaggcagagtttcaggcttcggcagctgcctcccgcagctaagaatgcncaggtgcccatgagcaccaggattataaatgctgacgccaggtttattccataataagaacttatgaaggtctgggctgacaccagcaggtgggtcaggagaacgataaggaggatgccccactttttcttctcacagccatcaaaaaatacaatgccccagaatacatgcagcaagataatgaccagcgtcatgaaagctgaataaaggaagaattgaggagaatctccatgaatgcccactgtgcctggccccaaggagtcagatagggtattcacaaaggaaaatactccactcatgattccaaagcccaagccagaaacataggccagcagtcgcatagagggtgctgtctcacctgggtttatactcttcaaaccttcactggctttttttaagagtttataatatgcaaatcggaacatttcttggatatagacagagacaaacgctccaaagatcagcagatatttctgtgttggtccatctttgttgtcaataatgactcttgc

SEQ ID NO: 321437 - DNA, 861 bp, Homo Sapiens
gggggatgtgatagagaggatttattcatttgataatagttagaacacataacctctgagatctctgtaatttcagatactttagttctataattctaaatccaagggtctctatagataggcttgagacaagtgtaaacaaactcatgatctcagagaaatcttcaagtggcatgtttcaatggtatgcttattaaacaaatgctcatgacagattttcacaacagtaacgaatgttatttcacaacatcaaatcttccttcctcaggaagaaatgacattaataagaaggttgatggatttggattatttttcatgtttcctggaggtaaaaccagtgtcctcacttgttttcctctttttcctcattttgaagactatttgttttcattttctttgcctcctctctggctatgtgtccccggaaggcagcttggattttgacagcagcaacctcttctttttccttatcttcctcagaagagtctaagatggtgactgatgtctcttcctccttcccagatatctgagactcttcttgtttaggatcacttttctcaggtggttcttgttccttgaatgcgtggttgttatagaagcggtcttctaccttagtcccccattctgctggatcaaagttggttttctctcttttctctagaaggttctcaaaataggctgctgcaaaagctggtatattgtccggttgctctctcagaatctcgcgtgtcagcccttcaagaagatttccaaatccttgtggaattcggtagtgggtgttggagaatggaatcgacatcttcttggtaagaattgcctatggaacctcctttctctccgagctggtgccgccggttccgg

SEQ ID NO: 321438 - DNA, 520 bp, Homo Sapiens
aactactgcacaactgcagccaaccacttttcgggggtttccctctcagttttacagaggcctacccattcctctggtttcttgttgtcatcaaccttaattagggtgagttggtgttcagcaccatgggactccaccaacttgacatacataggctcattgcagttgggtgcaggcagacaaaagtgggcttggtgcttgtctaacgctttggcagcttcacaaattgcacatgctaggccatgatgagtgagggcagtcttccgcacctcttataaagtagtgttaatggccatgacacctccagcagcaatgcctccattggtcatgatggtgtattaagggtaaaaccgaagcttgtatgcactcgagcctctgccatggcgtgacttggcagtggcaaggaaatagtgaattctgtttttaacagaaatttttaaactaaatgtctatttgggacattggtttgggaggtacggtgccctttatgctctgtcttttgtatagagtacattctttg

SEQ ID NO: 321439 - DNA, 894 bp, Homo Sapiens
  misc_feature (284)..(305): n is a, c, g, or t
  misc_feature (652)..(686): n is a, c, g, or t
atttagggaatattttgagggtttttattgcttcagtagtttcaaactattttgtgtctatgtaagttggcttttattctcctgatctctcaaactcaaatctcaaaatattgaaaacttctgttatttttccctaaccctaatttaccttcctcaaaatctaatgaattatcaaatcctattgcatcttccttggaatcatcattagttaaactaaaggcaataggaagtgagtttaaaatcctttcttccagagcctgcaggtctgttcatgtgtttataannnnnnnnnnnnnnnnnnnnnnccatggattcagtggtctcctactggtttattcatgtttggccttgcgcttctcaaattcctttttatacctcatcagcaagtgaacttattccactgccctcatggctagctgtggcctgtgaaatcgtccagattccttgggcagacactcagggtgctttgtatttttgttcggggctgtgttttcagccttactgcttgccgttcccatatgtggactcttgcctgtcgcactgatttctgtcttcccaatccaatgctcatagagatcactaaggataatcctgcttattaagtgatgagttggtttgaattgtctctggtggtagtctaggaaagtgggannnnnnnnnnnnnnnnnnnnnnnnnnnnnnnnnnntggtaccaatgaggattttatttgagacagtgtaatgggggccagatgagagaaccattttctttgtaagcttagcatggctgggctctagccagctccagatgaaattttggctaattatccctttagaaaagtcaggcttaagcagaactgggctctaggtcaattaaccaaaagccagttcacccaatgaccagttcatttattt

SEQ ID NO: 321440 - DNA, 1147 bp, Homo Sapiens
cattgataaaaaccaaaagaaatttttatatctcaaattggtaaactttacaaaatatttaacatatgaggaagaggtatatcttacagaattatttggctatgtcataaggcagtaatgaagatggaatttttcctatcataaatctgacataagtgaaagtctataacatggtcattctccataaatctgaaagcttgttggttacagcaatatgatcatgccacactgtcgtcgttattgaactttgatgaaagtagactgaatgagaaaggaacaaatttggtgcctgcaccaccgtagaatttgttctgaaattctacccagtggaggcgtatggcgtgaagaaacgcagaaagcccttccatgatcagaaggatgaaaatggtcaaaactgcaaagagcgcgataaccgggagcagtagcaagacgccataggtggtgtcaacgcggaggcccacgcgcatcagcattggcccacaggacatcagacaactgtgcgtgagccaggctaagcgccccagagcctcaggtaggaggcggtgttggagatgcatcccagacagtactcgatggaatggattacttgggtcattaatatttctccaaaattaaactcttcacacgccatttctctacatccatcttccacctggtgatttccctcttctatatcttggcttcccagcaatgaaacttcttcctcactatctttccttataagtgtgtagccactccggttcaccccgaagcaactacgcccattgtgaagccacaacaaaaacagtggctttcccaagaagaggacagggacagacaatgctgtgacaaccagcagcactctctggacatactcctgccctgtgtaaaggccacttgttttactggctgggaataaaaacatgttaataaattcaatcagaatgctgggagcaactctggaggtttctgctgaaaaaaccagccacttgtagaaaatcataaatataaggtatccaaagatacagagcatgaagagaagttccgggatggaaaccaggtaaatgttgaacttcttcctgaagtgcaagtggttaaatattcccagaatgactccaaaagtcatatgaatgattcctaaaatcacggacattttcattttgaaaga

SEQ ID NO: 321441 - DNA, 567 bp, Homo Sapiens
tgcagaatgttagagccagaaaggaccctaaggaccactcaggcaacgccctggcttcacagatgaggaatgtgaatccaagcccctgatgttccattctgtgtatcttgcaccccatccatgttacttcgcttccccaacagagtcagaaattaaatctggccaaagacgtttacttccttctttgacactcagtgtctctttgacactcagtatgaggcaggccacagatcagcaaagcgaaagtgaaattaaacaggatttgacattcagaagatacttggttggtaacagatttacccaccatgactgtatcacaaaataaccaactgctgagttccaaggaggctccccgactctgcctctgtcctccacctcccctccccagcgagccagagagcgtctattgaaatgtgtccctggtttaggaaagggtgcccacggtcctccagaagtcacatgtccctgcaatttgtgaaaatgtagcaatattctggccaaaagcttctactccgcgagtcaaccaggagcacctccccaggctgtccctcctcctaaggtcactat

SEQ ID NO: 321442 - DNA, 946 bp, Homo Sapiens
ggtccggtccggaattccgggatatcgtcgacccacgcgttcggccagaactcgagccttaaaaagcaccaaaagtctcacatgagtgagaagccctatgaatgcaatgaatgtgggaaggcttttaggcggagctcaaacctcatccaacatcaaagaatccattctggggagaaaccgtatgtgtgcagtgagtgtgggaaggccttcaggcgaagctcaaacctcatcaaacaccacaggactcacacaggagagaagccttttgagtgtggcgagtgtgggaaagccttcagccagagtgcacacctgaggaagcaccagagggtccacactggagagaagccttatgagtgtaatgattgtggcaagcccttcagtcgggtctccaacctcattaagcaccacagggttcacactggagagaagccctataagtgcagtgactgtgggaaagcatttagtcagagctccagccttattcagcatcggagaattcacactggagaaaagcctcacgtgtgtaatgtatgtggaaaagcctttagttatagctcagtgctccgaaagcaccagatcatccacacgggagagaagccgtacagatgcagtgtctgtgggaaggccttccagccacagcctcagccctcattcagcaccggggcgtgcaccacaggcgacaaaggccctaacgccttgccacgaagtgtggggaagacctctgggttcgcagtccaaactcatctttcaccagcggaggtccccacttggagagaaagccctataaatgtgctggaatggtgggaaaaacctttagccaaaagtcaaaccttattaaggtccaggatctctaaatggggtgagagcccctgagttgtccctgtgggaaactcacacccgatcaattcttcccccgaatttctgggaaacccacccgttaagtgga

SEQ ID NO: 321443 - DNA, 1118 bp, Homo Sapiens
  misc_feature (216)..(216): n is a, c, g, or t
  misc_feature (1013)..(1013): n is a, c, g, or t
  misc_feature (1052)..(1052): n is a, c, g, or t
ttgaaagtttgaaagatatttatttaaaaacagaacaaaaaagctttggtatttcaaaacctgacaatcatcaatcactagaaagttaaacacctcccctgaagccccaaagtacaaaaccacagatgtccacaggctcctaaaaaagggcgtgcaaacccgaggatgacagcacaacccgcaccctcctacaggcagcagcacagccaccctggnggggccccggcccagcctcgggaccgtggggcctccgaacgccgagatggacatcaccgccaacactcaccatctacaggggatgcaaaagccatctagcaaaatctcaacaaaaataaattaaaacttcattaagaaagaacacgttaaattaggaaaaggacacaacttttcctagacaagagtcttttcaaaagatgatctatttcctgggacagaagaaagggggaaagtggaaggagtgagttccatttcaagtatttgccatacaggttcattttattgagtggaaagcttacaaaaggtccactggccccttccctccccacgtgacactcattccttccaatgcaaactctggtgtatccacactcacttctgcgtcaccggtttcccccaacaaggcacaaagggcgggtgcttccaaaggatcccttgctcctggcagcgggactttcagtgctgggtgtcttgtgcaaatggtggctgaaagcaggactgttagttcactcagacactgggatcttccttactcctgaagaggggcttggctccaggcccacagtactcgttgtagatgagcttgaagaggaagaggtggaagagggtgattagggaggccacgctgaaccagaagaggaagggcagcccggggtcctgctgggccatgtgctcatcaatgggccaggatggccttgaggtgcagcgtgtgccgcaggtcctgcaggtgtgtgaggtcggtggagatgtagagcagtggcgtgatgggctgtgtcaccatgaccgagaaggtgtgnccgtgggcgccgaggtcagctccactggctcgtccaggncaacctttgcaggcatagatcttgacaggctggccacgggactccacggacacgtgtaggtagggc

SEQ ID NO: 321444 - DNA, 679 bp, Homo Sapiens
agtagaggcccccagtttttatgtaggaaggtctgaggggcaccaaactactgggggtgaaggggtgattgcttgaaggtggctgggggagactaggtaagtctccaacaccggcactctccccagaaaaatgtgtatattcacaaaaatttcccaacagtttcaatgagttcacacatcattaaggaatcctaccctaaagaggcgtagcaacccgtggaaagaaacagttccagcaattgcaagcgccaaatcccgccctctgagagcacacctgctcatctcaatggcagctagatgttatttcaggagcgaggagggtggtttattccctttccctagatggcaaagttaaacgggtacgaaattctgctcgctacttcctgttctgcatccgagaggccagcttccaccactacaccccaaccagcgggaggtgctttttgcgggaaacgagtaggaaccgtctggaaacggaggaccgtgcccctatccccggaacattcgaggtataggaccaaaggccttccctggctcgggcgtgcgtgtctcgtgacaggtcgggctgctagaggggcctttttaccccttggatggcctctggccccttggggccgggatacgagacctaggccagccgcacccagaggtggccgctcccttccttccctagacctct

SEQ ID NO: 321445 - DNA, 1042 bp, Homo Sapiens
  misc_feature (215)..(215): n is a, c, g, or t
  misc_feature (281)..(281): n is a, c, g, or t
aaggatcgttcacaagacaaggttactggcttttttaataggtaaaacgccttattttaagaatggaaaaagaattccttttgaaggcattggaaagctttacaaccatttccttggaaaaaatatctggaaataaatagcaacccgttcctccttattcaaaaccagaagggaaggttaattttcctgggccacagaaagtccctgccaattcnctaaagtgcccctaagtagtttctcttcagactttttacatttttttcaggcctcaagcaaaaccnaaagcccccacctccaggtttggtagcaaacaaactttgcttctccggtgctaagcttccatcactcctctggtaataagctttgtgcacatttgctagaaagctgggcagcttgtccgcaggtaccattgatactgtgcagcctccccatcctgctccagtaagtcgtgacccttgagccccaaacttccgacagatgtccaccagctgatccagctcggggcagctgcactcatacatgtcccggcagctcatgtggctctggttcatcaactctcccagcagctggaccatgttttcaggtgcttcttcacatatcttcttaaactggagcactcgcgcagcctcgctgtacacatgctttgcccgctgatagagtttgaagatgagcacatcttgagtgtttggactcaggatttgggttcggagttcctccaggctaattcccagacacctgcagatctcctcagggttatagggttcaggatgaagggcatcttctgtgaccaacagcatttcttctagactaatccctagtttagcctgcacctcctccagcctcagtactttgtcccattgcaagcttttgtatttagccaggagcttcgcagccagccgacactccatcaccctgatattgaaatgggaagttgctgccttattcatctccacacaactgttggcaatcacaaacactgctccacttgggagttttacatcggttgccctcagaggactaaattctatcaacttggcagttc

SEQ ID NO: 321446 - DNA, 669 bp, Homo Sapiens
cttccagagagaaaatacaaaacaagaaacagacttggttttaaatgcataaccaggtgctggagtttaaagcattactgataacattgttacagaagaatggcagcttactccagggcacttcagtattcctgaggaataaacatgatttctcttgtcctcccgctgggatgttctcaggtgaagtcactgctcctgctcctgaagcttctctgtctgctcctttcggttctccccacaatcagctctgatgccaggaaagcgaggagccagggagtggtggaaaaggccggctgccggcttcagtgccacacagctgcgcctcttcttgcatggtccctgtgatgacctcactcttgctttggtgcagagatggctcccctactcccatctctccagcagacatgggctggctgcaggcagctgacggtttcagcaggtttttgacatattttccatgtagaagatatggagcctggaaatcatgctgacagttggaataagccattcctaatcccatgccagaaccgaaggctaatggccacattcttcttttaaagaaggtaagtgagaaaacaattcctaatccaaaaccagtacctatcttcacgaccgcatccgccagacaccggtcccacttcctgccgagctccgactcagacatgttcc

SEQ ID NO: 321447 - DNA, 845 bp, Homo Sapiens; identical to SEQ ID NO: 127084
  misc_feature (105)..(127): n is a, c, g, or t
  misc_feature (134)..(148): n is a, c, g, or t
  misc_feature (162)..(162): n is a, c, g, or t
  misc_feature (164)..(165): n is a, c, g, or t
  misc_feature (170)..(170): n is a, c, g, or t
  misc_feature (221)..(233): n is a, c, g, or t
  misc_feature (289)..(290): n is a, c, g, or t
  misc_feature (292)..(304): n is a, c, g, or t

SEQ ID NO: 321448 - DNA, 911 bp, Homo Sapiens
  misc_feature (58)..(70): n is a, c, g, or t
  misc_feature (90)..(101): n is a, c, g, or t
  misc_feature (138)..(185): n is a, c, g, or t
gtggtcgccgcgcccccacctctttgtcacttcacgatcctcgcacaccacccaaaannnnnnnnnnnnnccgcgcgcggtccccccgcnnnnnnnnnnnntaaaggagtttttgttaagaaaaaaatttacacccannnnnnnnnnnnnnnnnnnnnnnnnnnnnnnnnnnnnnnnnnnnnnnntaagttatcccctattttcgacagggcgcggaaagagatctttggggtgcgttgtgggggcggagaatccgttcgccgcctggaccggcgccgcaagggggcgagggccgtgtgtcgccttcgcgcactgtctgcgccttctcccggctttttttctcctatttttgtttaatttatttaagaccacctccttacaacttccagagagaaaatacaaaacaagaaacagacttggtttcaaatgcataaccaggtgctggagtttaaagcattactgataacattgttacagaagaatggcagcttactccagggcacttcagtattcctgaggaataaacatgatttctcttgtcctcccgctgggatgttctcaggtgaagtcactgctcctgctctttgacatattttccgtgtagaagatatggagcctggaaatcatgctgacagttggaataagccattcctaatcccatgccagaaccgaaggctaatggccacattcttcttttaaagaaggtaagtgagaaaacaattcctaatccaaaaccagtacccttcctttggctatctggactagacagaggctggaacatctgcagggatttctcgggtggacatcaattaccaggattctatcttcacgaccgcatccgccagacaccggtcccacttcctgccgagctccgactcagacatgttccccacccgcgcctccagctttcc

SEQ ID NO: 321449 - DNA, 711 bp, Homo Sapiens
aatgtatttaagaccaccgccttacaatttccagagagaaaatccaaaccaagaaccagacttggtttcaaatacataacaagtgtgctggagtttaaagcattactaataacattgttataataagaatgacagcttactccagggtacttcagcattcctgaggaataaacatgatttctcttttcctcccactgcgatgttgtcaggtggtcactgctcctgtcctttgacatgttttccatgtagaagacatggaacctggaaatcatgctgactgctggaataagccattcctaatgccatgccagaaccaaaggctaatggccacattctttttttaaagaaggtaagtgagaaaacaatccctaatccaaaaccggtacttatctaccacatccagcaggcactggtcccacttcctgctgagccccacctctgacatgttccccacccacagctccagctttcctctcactctaactgcatttaagagacatcttgtaatgattctacatgcaagagttcaaaataagaactcctgaatctttcagctactctaacaatatgggttctgacctgatagcatcttatcactattcttgcccaagacttgacaggccagcccatattacagtaggtagggttaggtggaagtggtgtgagatgttcataaaaattaaagtgaactcctgcttctcaaagaaaaca

SEQ ID NO: 321450 - DNA, 938 bp, Homo Sapiens
tttcagcagcggagaacagtttattataaaaataggtgaataaagtaagtgtgctttaacttccggctggatgacaaatgctactgaaatgcagtttctcagtgcagacatgtggctcgcaatggcgggggtggccaccctagtgtgacgtgcagccgcaatactccatttgactggttcgaggcagagaggcgacgctttattccatagaacaggatggggctcccaccctggggaccatacaagtgactccctcaggcagccacccctttctaggcaggctgggggaggggctggcacaccagcaccagatagctctggcttaagcctgatggagacacagactgggacctccctctgccagatgttcctgaccccatctccacctccagcctccagcctcactggcagttccctgtgacccagcctgttccatagccaaagggaccaaagtgaacgatcagagtgccccgcaactattctaggggccttggctctcagtagagctcaacccatggcatctgagagcacccacccctgtccctgagggcagctgcaccgggccaggaggccgcaagggcacgggtgagtctcggtcactggcagcactcagccacatgcctgaggagctcttccccttgctcgtcactgaagcactgcaggcagtgagggcactgaaggtccccctggcctctctgggccgcgccaggatgcccgccctctgcagggggttctggctgctgggacccagtcccaggcctccagccaccaggcaccataagctctaatgcgtcggcggccaaatacttggcagttttgctcccagcgtgaatccggccggcgtctggctctcgagaatcctgtctccaggacacctggtgcagcaaagaggcgaccttttcctccagttcttgaatcctactttgagcccgttcccg

SEQ ID NO: 321451 - DNA, 669 bp, Homo Sapiens
taagccaccatgcccagccaaagttcggcagagtgtttagtgatgcccaaacacaaacacaatatggtttcagatgagtattccttatttttccaatccacgttagacttggggaaatagcccttgtccccttgatgatgggccctttaatgtaagtaatattgcagccttgcagaggtacattctacttgaatggctagctcatttttatataatgccccaggccacgcaggctgcttggcatctttgtggaactacgcttactgtcccatcaagcctgtttagcaattattgtgtgtcattattaaaatattattctcttattgtgaagaaaagatacctaaagcatgctgtaggtcagtcattttcctagtgacagggattagaggcctagaatccattcaatttttaaaactttaccctacgaatagttagaaaatatatgcttgaaataatctcattctagtttattgttattgtttattttctaagccttctttacaaatatattttcccactgtaattcagtttaaatggatggtttttacttcttaataaaattattgactattgatttatatctgatacaatcctttgtagtattcaatgctgatgttgaaaaaattcagccacaatgaataaggagtgttcccaaggccctcagacaaa

SEQ ID NO: 321452 - DNA, 682 bp, Homo Sapiens
catgagagagttacatgagtgatgtgtttgaaaagtagattgaaaacaggaagggtaagagttaatctgaataaaaactgaaactatcaaataacttttggtagttccatcacttccaagtagtactggttgagaccagggaaacaaaactgaactgacagggcctttttggtccaattatgaataagtgaaacaagaaaaccaaacacaaaacaaaaatacatagaattaactaatctgaataacctgtgaaacacctaaattttattattaacatgtttttttctgtgaaaagaggtctacaacctcctccaccagggcaaaatacaaatctcaatcacaatgcctaatgtgactgttacttaagcaaattgttcattcagtgtttgaacacagacatcattaaataaagggtgcaaccattacaaatggtgggcaatcgtgagaatctctgaacctttaaaaatattaacaggaaccaatacagtcatctcttttaacacggagtatctacccaatttaagggactggttgtaacatttagcatcctagaaaatgccaaagtaaccaaggtcacaaactacaattatgaccaaacaaccaaagtacacaaaacaacttcacatactctcctggaatggtgcctcatcctcctcttcttgttcctcctcaattacccaca

SEQ ID NO: 321453 - DNA, 492 bp, Homo Sapiens
ttgttccaaatctttaactttatttaaagcagatacagatgataacagcttccaaagagtaaaagcagtaacccaaatgctctgcaatctcccacaccatgaaacttgcatgtcacacacagtgcaatctcccatccagaatccagaacttagtagaaaccaaacttttgcttctttggaacaaatttagctaaaagatgaacagctagaaaataactataatagtaaagaatttaatgaatcaccaaaaactaaatttataatctgattttttttaaaaaacatgtatcatttaagcttaagcttcctcaactctctggacaaagaaaaagattctgagtttttaagttcttccaatagggtttcctctggggaaatttgctttgaatactgtgtgggaatccatttctgagagaagcccagaatatagggatcgcctcaggctgctccatggagaagtaccctcatgggagacagtacagctctgggggg

SEQ ID NO: 321454 - DNA, 301 bp, Homo Sapiens
tttgttttaaaaagcattaaagtttatttttaaattacacaaaaagcactgtttaaacaatggttataactagtgaacattaagaaatcttgcaggcaggtggatgggattgaaatactctttcttgattttatagtttaagggccaaattgagcactgtttatgtctgcatcagctaccattaaaaactttgaggctgctggacactcagtaaggaatcagaagttttttaaaaagatgcaaatgaatggaatgtgtcatttcaaagcctgtttgggtaaaggagaatggatgacccacc

SEQ ID NO: 321455 - DNA, 614 bp, Homo Sapiens
cacattggaattttgtgactaaatgcccacaatccctatgtaaaagctaaaaatgttttccttaaaataagtcaatagcctagactgcaaaggaactgactgtagctcttagaatggtgcagttccgtagcataaatataagcaaaactctaattaacatgctagattaaatcatatctggcttttcagtgacatcacaaatagtgtgttgctagaagagcaatttcagggtcactggacaaacaggccacaatgggaatatgacacctataaatgtttaatggcttctacattcattcttttttaaagctgcatcttaaaatagaccaatttaatcattgtgcatgtaacaagcagattaatgagttctgaagttagctttaaagttaaatagacttaagataacactgtttttaaaattttggccaattcatcaaacttgaatgacgtccagtaacattcactaacatttcacaaaaggtaccattttattgtcaatcacaaaaataaccacttaaaattgaaatcttaatttctagtaccttggcttagagttcaggccatattatgaaccaattcaaatagacaagaacaaaaaatatctaaaaatcagg

SEQ ID NO: 321456 - DNA, 700 bp, Homo Sapiens
tgctctcggcctgtgcgttttttctttgcgggaatgctcctcacttgttgcatttcttgcggtgttttgcatcccgagccctttgccgcttgcagcatccaattatctcctccagtcagcagccacttgccttccagtgtttctggagcacagacgttccaaaaacccgagtttatcaaattggaaccattctcccattaccgagtaagcttttagattcgtgggcagaaggatatcctgccacgttcgagtctcatgttcctggcatttactcacgcgtaggcgtctcatccatctggcacttaggttgtgtgtggagcgagccaggggtctcacgtttcttgcccatgagatgggacggccccagcgccagggagtggatggtcctctgccagcccgcaaggcggcgccagctcctgctcccgcttcccagcacagcctgttctgagccaggccccaccgcctgcgactgtggctctttgtcatgtactcacctccttattcctctctttaatctcccgcaggtgctcagctactggcttccctcccgggacgaggtcggagtctccgcctgggattctgaggcgtggcttttgcttcacagtgcccctaaacctcagtagtgtaggaaactttctgaaaggaaaacaaattctcagggatgcccagaacttatcagttcacttttattacagaacac

SEQ ID NO: 321457 - DNA, 908 bp, Homo Sapiens
agcattgtatttagcgataattatacagaatgtgtgttttaggaggcaactgtaaacttgcattagttaatcccatcttcaatcattcaaaacatgcacacagaacatattaggtagagaacgtcatactccctcatatatgtgggacctgtgttcatcagttgcccctctacaaccgcataagctgtacactcactattcctgtgcttctagtgctctaagttttttacagagaactctgaagtttatagccagaactgtgctttcgtagggtttcacctgcagatgcatttgcagttagttagtcagcaatgttttttcctgtaccctgactcaaaaatccaagggagacaaggctcctcagaacctttaagtcatgagcatcatgatgagtatttggcaaccagagaggctgacctttctctaaagacatgatgctaatatgcacagagtcagactaactttttgttcctctgagcccaatccaccaagcaaaggaggactgtagatggatgttctcattctaaacctacctaagtctaggtaatcaaaagttccacagttgcattcaccatgtattaaacagacatgagatgacctttcactaagaaccaggacacacacccagcccatccctgctctgaattgtgtatttacaaaggtgctggacacacacagactttcaaacaatcatcagtacaaaggattcacagataaattcttcactcatatatattcccaagccacactgagaaagaggagaaatgattcacgactagttatctaagaaggaaaaagaaatgtttgcaaaacaccgatcaacatgtctactgcatttagatgaatagccaaaaataacatatacatttaaattacaatacatctatacaccatttcactgaaattac

SEQ ID NO: 321458 - DNA, 1459 bp, Homo Sapiens
  misc_feature (28)..(28): n is a, c, g, or t
  misc_feature (53)..(53): n is a, c, g, or t
  misc_feature (1444)..(1444): n is a, c, g, or t
aaaagggaaaatcctcagatccctcggnatgtcaatgtggggtggggcaaggnaaatctcaacatgtcttcagccctgcaacaaggccaggagggctgaactggcaaatcccctttcaactgcatccttggaagaggaagagtaagagggacttccccaaatttcttcctgaactccagctctgatactcaagaaggtcagtctcacatcgaagagataaggatgcgaatcaggacttggtaattgggctcagtttcctggagggcttgatgaagtttgtcagcaaagtacagcggtgtgttcttgatcaccgaagctaggccgagcagagccacctgagcatctccatggaaacggttctggacagcctcctccagctcttgcccagtgtccgctggtactgatcaaacactcggatgaggtgttcaggatttcgctgggtgaagactgggacccatgtttcctctctgctaggtccttctgcccgctgcagtgcctggacatcttgttctgccagattatagtcaatgattccagagtagctgtcacggccccccttggccagggccaacagcaggtcctgcaagatgccactggtctcagatgtgatgtcatccacagcctcccccgtggaaattgtgtttgtagactgccaggcactcctgcagctggggtggggttcgagtggcaagaatttcaatggccacgtccacagcagaatctgaggccttcagagctgtcctcaattcctgggcgtcaaactgggctgtgggctgcagcagagccatcacaatcctctccaggttgccggaaagtgctgcctgtagagacttcatcaggtcctgttgggtgcgctcctggaagtttcgtgagatgagctgcctttgctctctgctccggttggtcagcacgtccacaatggcactgcggtccacgccttggccagtaatggccctcagtagcctctgcgcatccttgtccacgctgaagttcaagaaggtcctgagggtgcccagggtcccccacgctgcagtcttgctcagcagcacaggcgcaggtggctggggatctcctgggtgagggacggtgccatcttcttgccagtcactgatgtggtgctagtggttgccttgctcagtagcagtggatgctcaggccggattccagaggtgcaggtgggtgtcgttgttgtggcctggtagcttgcctgtgtgagcactgctccggtgtggcctggtagaggaaagtgggggtgtgtgcagcctaggctgaacagccagtcagatgacctctcttagggacgaacccagcagttgtctgactctggcccctcccagatgtgggagaggaccgggctgtacagagtcccacatgcagacaccttcctgcccagcatctcttcttccaggaactgggcctcaatccatgtgagtgaactccactncacctctcagcggct

SEQ ID NO: 321459 - DNA, 556 bp, Homo Sapiens
  misc_feature (27)..(27): n is a, c, g, or t
  misc_feature (39)..(39): n is a, c, g, or t
  misc_feature (106)..(106): n is a, c, g, or t
ttgtaaattttgctggacaaaactttnattcaaaggccntccccagggaaactggagcccaaattacccaagtcctgattcgaatccttaatctctcgaatgtganactgaccttctgagtatcagagctgagttcaggaagaaatttgggaagtccctctactcttctcccccaggatgccagtgaaaggggattgccagtcagccctccctggccttgtgcagggctgaagacatgtgagacttccctgccccaccccacatgacatccgaggatctgagatttccgtgtttggctgaacctgggagaccagctgggcctccaagtaggataacccctcactgagcaccacattctctagcttcttgttgaggctggaactgtttctttaaaatcccttaattttcccatctcaaaattatatctgtacctgggtcatccagctccttcttgggtgtggggaaatgagttttctttgatagtttctgcctcactcatccctcctgtaccctggccagaacatctcactgatactcgaattcttttggcaaactt

SEQ ID NO: 321460 - DNA, 978 bp, Homo Sapiens
  misc_feature (92)..(92): n is a, c, g, or t
  misc_feature (94)..(94): n is a, c, g, or t
ttcccggaaaagctggagggtttcagattctttcccagaaggccgatgagggctactgtttaagaaaaagttttaagtcgtcgggggtcggngngcaaacatctcaggccctaagaagtagaatttcccccttcacccataggactgagcagaggtatttgggagtaagaagtccttttgagtttttatgtccagtgactccaagactggctcggtggtccatggtgctaagttcactctcttcagtttgagtctggatatttgaggccgaaaagaactcttcgatatcaaaatcgattccggggttctgggctgggccagatgggagctgggtgtcaggtccaggatttgtgtcagacaaaagactacgatgatccaatgtctgggcaggcagattacttgacaagatgttttccaaatcacttaataaatctatggtttgggtctgattatctgtcatgttctgtgaaggaagcatactattctgtgcactgaaatttataattggtgcagatttctcaatatcttgatttaaagtcttaggctcattctgaggtaacaaactatgagttactgtctctgctactaaactgttgcttataatgttacctgtagcaacattatatgatgaatgaacactctcaaaaatgtctccgcacattccagcttggtccatctgtacatggtcatccgttggactttctatcccactggtttgagtttctctggagaccccacctgactggaaacaggtgtccataaatgcatcagtctgagcagctatagatgaagttaccttagagctgggcaaaaatgtctgagtgtgaacactaatgggaagagacacttgagaatcaaacgacaaatcagtttgagaacaagacgacacagaggaatcagcagtggcccactgtgcagaaggtataaagttttgtgaggcataagacagatctgtccctcgtgccgaattcgccaccc

SEQ ID NO: 321461 - DNA, 817 bp, Homo Sapiens
  misc_feature (267)..(267): n is a, c, g, or t
  misc_feature (306)..(306): n is a, c, g, or t
gcagcaggaggaacagatgacacccttggaagcaagttggtgatgggcagggcacacagattgccctgctgagggctttttcgtacgaaaggttcttccccatcttccaaggccaagcaacgtgagtcttctccaactgggcactgggcttgacttccgccacggagtctccaggaggtccaagaagtagggacttctggggtccccatgggagaagccagcctcccttccacctggctcagagcaggatgaggggttggagcagcntgatgcatgggaggctgcttatgccctggggccacaaanaagggggtgctgctgggactcaaggatacttttactgcagggtttccacaaaggcatcaaactcgcggacattcttctcatgcacagccagcttctctggtaatgagtccaagtcttcagccatggactgtgctccaatatctatggagaggctgctcagctgaggtgggttctgaaactcccgatagaaggtccccaggtccatcggaagaatgtcatctttagaaaaagctggtttaaagtctatcataacaaagtcatcatgggtattgccactgctgcccccgctggagccatctgagtgcaggctgccctggagaggagattcagtctctggggaatctggaggattcaccattggatcggtatcctccagctccaaattcttgggagcaaacatggcaaagggtatatccaaactcgtcagggtcacctggttaatgggtttgttgacaaaagcccccacttttcggacaaagatggtctccaagacatcgtgaggggaggcccg

SEQ ID NO: 321462 - DNA, 513 bp, Homo Sapiens
gatgctgaggctctgggactccaggtggggtaaagtaatattcctgtagtcatctcccgtctctcggatcaggcggaggtcctggcgcaggtacttctgcaggtgtttctctgtggcagggtaaaccacggtcgtctttacatctgcaatgatacagcacagcccgtgacagggaagcaatgcccactctctatgccacaggcaccacggtgaggagagaactcccaccctggctttgattccctgagggaagccaaaatccaagaggatcatgcacccaagatccactcccacagagtgccttgtgccactgcattcacgagctgagccacactcagaatctggaaaacacaaggttcttacctgtgggtcactgggcccctcatcaggcaaaccccagcccttcctgctccatcttccaggcacaggaatgagaggtctctaactcttctcacataccaaatttctaggtatgtggctttctggacccaaagctgaaaatatggcttaaag

SEQ ID NO: 321463 - DNA, 794 bp, Homo Sapiens
cgagaatgttatacacccactggatgctgaggctctgggactccaggtggggtaaagtaatattcctgtagtcatctcccgtctctcggatcaggcggaggtcctggcgcaggtacttctgcaggtgtttctcattcagttgtcttggagggaacaagtgataggtgctgtagatatcattggagaactgcaattggagctcagggctgcccgtcaggagctgagccacctgttccacctgaaatggcgtcttctccaggatcacaacggcatcctctccatccccatccccagaggcctcattcaccttcccgtgtagaaaaatgattttgtcccgcgcagactccctcagcaccttctgcagtctgaagccggagaacggtaagcggacaggagcacaggtaccatttccaactcctgcctccttttcctctgtgctggcggcgtgggcctcctccacgtccaattcgcgcttcctcttgcctagttgaggagctgcgtccgccatgctgccgcggaggcggtgtgcgcctgcgccccctgcgctggccccgcccctagcccgagtccagcggcctggctgggctgctaactcccggcctaccctgctctggcacccgctcctgcgggatgcgtgccgcgcatggcggagcccgctgacctgtcccagggcgcgcctttcaaccgagttactgcctttggccccgttgtggtgccggccggccctcagggaagggaaaagaaggctgagagtcccgaaagcggcgggctagaggtggctgcgcagtgaagag

SEQ ID NO: 321464 - DNA, 436 bp, Homo Sapiens
  misc_feature (153)..(153): n is a, c, g, or t
  misc_feature (197)..(197): n is a, c, g, or t
  misc_feature (199)..(199): n is a, c, g, or t
gagtgagcccgctagtttattcaatactaggaataagccggtataaaatacatttttagaaaattcacttggagataaaaaatcttgtccccactcctcccccaatcccacacatctgtgctcttctgcctgagttaattcagctttgcgagncctcctgcaagagcttgagcagggggtcgtcagccctgagggananggtgagcgtgcgctgctggtagtgcctagggtcacactccaagttctcgatcacctcagccagcaggtggggcccgctccacgcctgaggccgggggcctcgaagcccaggggcggttgaaaggtgcacatgcagggtgggtagtagggaggggcagggtaggtgcagggtattacttcgcagatgggtcttcccctttcatcccggtaggcgttgcagggatgggcctccttgccc

SEQ ID NO: 321465 - DNA, 1086 bp, Homo Sapiens
  misc_feature (407)..(407): n is a, c, g, or t
tttttgagtgagcccgctagtttattcaatactaggaataagccggtataaaatacatttttagaaaattcacttggagataaaaaatcttgtccccactcctcccccaatcccacacatctgtgctcttctgcctgagttaattcagctttgctaggcctcctgcaagagcttgagcagggggtcgtcagccctgaggggaaaggtgagcgtgcgctgctggtagtgcctagggtcacactccaagttctcgatcacctcagccagcaggtgggcccgctccacgcctgagccgggggcctcgaagcccagggcgggtgaagtgcacatgcaggtggtagtaggagggcaggtagtgcaggtatactcgcagatggtctcccttcatccggtagcgtttcaggatnggcctcctgcccctgggtggaggattttcctgaagcagcggcaagttctccggagtaaggtcgcgtagggatctgatgccccggcgatggcagatggcgatcaagtacaattcatcgagctgctgttggttcccacttgaggtcagggatgaggaacaaaaccatcagagggaatctgggttctcgaaaaacaatccggtcccgcttcaagccttcttgtcgaagaatgttatacacccactggatgctgaggctctgggactcccaggtggggtaaagtaatattcctgtagtcatctcccgtctctcggatcaggcggaggtcctggcgcaggtacttctgcaggtgtttctctgtggcagggtaaaccacggtcgtctttacatcattcagttgtcttggagggaacaagtgataggtgctgtagatatcattggagaactgcaattggagctcagggctgcccgtcaggagctgagccacctgttccacctgaaatggcgtcttctccaggatcacaacggcatcctctccatccccatccccagaggcctcattcaccttcccgtgtaggaaaatgattttgtcccgcgcagactccctcagcaccttctgcagtctgaagccggagaacggtaagcggacaggagcacaggtaccatttccaactcctgcctc

SEQ ID NO: 321466 - DNA, 816 bp, Homo Sapiens
agtaataaaatgattttatttttaacagctaaaataaattttaatgtgcattagaaaaactacacattcccaagtaaactcagtctttcagatattattcaggattaaacaaggccgccccgagggttaatccacttacacagaccacgtgtgagttacagccggggtattcaggcatgtccgtgaatattcccaacttgtagtaacagaaccttcaaatacgtcctctcaagcatggacagtagcctgggtgtcaccatgcctcttctgcgggatggatgggaaggtgaatatggattacgtgtatggatctcacgctgcatttgtatgcaccttgcaggaagattcgggaattcaagctgctgcctggaagcaagatctaagcattgcttcttacctagcggggcactccaatgccacagacagggcagaacacgacttttaccccctccttctgcagcatgattttaagagacaaaacttataaggctgtttaaaatggtaaatcatgttagagacgttctttttctttccttggctctgtgaagagatgagtagttaccccgcctcacacctgaagcgtactggcttctgtgggtagcagtcttacttgtctactattcgttctgaggagtcttgtctttctggatgaagcttttaatctggtgatcacatacatgattggaactggctgtgcaaatgaactgataggaattttgcatacatgagcgaaaaatgtatcctcacgaggcaactttacatcagtattgcaccctggagctgtgaagtgtgcttcctcgtcatgctgagtttgtt

SEQ ID NO: 321467 - DNA, 784 bp, Homo Sapiens
  misc_feature (63)..(63): n is a, c, g, or t
  misc_feature (687)..(736): n is a, c, g, or t
  misc_feature (751)..(751): n is a, c, g, or t
cagagggagttgtcatttttaatcttttcaaaatcagaggaaggaggtatgtaaactaaatcncaataaagctgttattagacaatgaaaaagacaagaaccacaacaacaaaagcaacagggaggaatggctccggggctggctctgcggcccagaagtacagtgatttcctcatttgcagcttcagctactcaagtaactacttcttttgccctgttcctttcttaatcagtaaaaaaccaaggccagctcatcctgggggaggtcagaggttgcaggagaaagaacttgacaaacacacaagccacctcttcatttactgtaaaatcctgtttaatgtgtaacatttcaggcagagagaggccttggggactagaggcagaggtggccttgaccaacccctgctccaacttatctgcctgcttctctctccctaactccctcaccccagacacctcctccttttccttgtggccagcaagcactattcctcctttactagtgctggccaccctcccttctccacccacatgtccacagcacccctgccctctgctcctcttacccacatccctcctcactgatgtgactccagaaacagggtatctgacagcacagggttaagattagtttcataattgggagacgctgtcggagcatcccatctcttgtacccagtgggtccnnnnnnnnnnnnnnnnnnnnnnnnnnnnnnnnnnnnnnnnnnnnnnnnnncccacattcccagtnaaccttgaggattgggataggtgggctttaggt

SEQ ID NO: 321468 - DNA, 839 bp, Homo Sapiens
acatgaagatggcctcaagtacggtgtgatctttattccatgacaatcttcaactcaacacaaatttcatctttacataggatggtaattgtacaaagaaataaaatgttttttaaaaatccgattaaaacactgattccacccaccccccagccccactccagtgaaggaggtaatggagggtaaggtcagggcagaggagaggagtccccatctgcactgagcggccgcctcccgcccctcctcaggacccacagccagctgggtgcgtcgaggcccggctggcacttcctgcacaggaggctgccaacaagaagtgagtggggcactgtcctctctgggctgttcctggggcaccaagcacaggtgacagcttaagtctaatgagctttcaagttcaacaagccctgaacgttctctgccagatggaagccccacgggcaagaaggacagggtccctggacagcgaggttgaaaggaccctggaggagagctggcttgtggctatggcccatgtgcacacgtgtgtgcgcgtgcgtgcgtgtgtcgggggcagcatgcaggcccgacactggtaatcaggctgccatttggtccaagaaagcagaatcttcccagaaagacaatgccagcagctccccaattgtcctgtgggaatctgggcatgaaggctctcctgcctgctcctgtctcaggcaggcgggactgcaacaggaacacatcaggcgcaggccaaagggcagctgagaatagtttgtttggcaaacagagcttaactggaagctggatgcccagaaaggatcaagagcagcccaggaactcctgagcatcaatgcagg

SEQ ID NO: 321469 - DNA, 1061 bp, Homo Sapiens
  misc_feature (71)..(194): n is a, c, g, or t
  misc_feature (560)..(560): n is a, c, g, or t
  misc_feature (1032)..(1032): n is a, c, g, or t
gccgccgctccaccacttttcttctctttgaggcactacctggcagcaccatctaaacctgtatcatctgnnnnnnnnnnnnnnnnnnnnnnnnnnnnnnnnnnnnnnnnnnnnnnnnnnnnnnnnnnnnnnnnnnnnnnnnnnnnnnnnnnnnnnnnnnnnnnnnnnnnnnnnnnnnnnnnnnnnnnnnnnnngcctgccagtgagttctgtcatgcatcagactttggacctcagaattttcacctggaacatgagaggtcagatgacataatgaatatgttctaacttctgaaacttttggagcttgtttttgcccttgatagcacgtatccttagagaataagcttgccaatttaaggcctgtctgtaatggcatctgaatgttccagcagcctaactgtgctctgctccagaaacatgtgtgtggcttccctacctccacaccaaggagctgccttgctgggtggatgtaaagactgtcctgccagggtttcccactaaaggtattaataagtccagtggaccacagagggcccaatccctcttggccgctaagntaaggtaggagccagagagctgtagagacaggaccaccaggatgcttcatgtccataacacaagagagcgctgcattgtttgggggccaggcattactactatcatgaagaaaaatgaagagcaggatgcatgttagtctttaattcacttttaatagtataaacctcatttaggtagtagtattaagccacaacaataatgccacattgaaacagcatttaataaaatgcataaagctaattcatgcactgcaatactctatatacaaacacaacaatgcaaattcttcttcaagactgaagacattgattagatataaaattcagtttaaaaaggaacatgctattttttaaatgccatcacataaacaaagtgatttcacagggagaaggaaagctgtataaagctgcagctttcaaacaggttttaaaccatggcattaaaatgtaatggcaaaaaccaaattatttnctatattgtgaaggggcaaagggttacag

SEQ ID NO: 321470 - DNA, 759 bp, Homo Sapiens
caaaagtacagtgaaggtgaaattcgatttaatttaatggccattgtgtctgacagaaaaatgatatatgagcagaagatagcagagttacaaagacaacttgcagaggaacccatggatacagatcaaggtaatagtatgttaagtgctattcagtcagaagttgccaaaaatcagatgcttattgaagaagaagtacagaaattaaaaagatacaagattgagaatatcagaaggaagcataattatctgcctttcattatggaattgttaaagactttagcagaacaccagcagttaataccactagtagaaaaggcaaaagaaaaacagaacgcaaagaaagctcaggaaaccaaatgaagatgttttcagatatgtacacatttctgcttctgcacatattttcatggaaaccattatgtataaagaacttagagcaacatcctaattggctcagtgcacgtttggcaatagtgccagcctgtcttgtctttaatgcatggattcataaacttcttccctacctgcatcatgtgcatgtagtgcatattaaatgaaagtgatattaagaatgctttcccaaattccattatttgacattgagtctgacaactgttagttttctggttgtctaactaccatatgaagctagaaaatgcacaaacgatattccttatctgtaatttaaatacttaaaatttgcaattgtcagatcttgattaaactggttgtcttatttcttctcatcattaacgg

SEQ ID NO: 321471 - DNA, 758 bp, Homo Sapiens
  misc_feature (32)..(32): n is a, c, g, or t
  misc_feature (38)..(38): n is a, c, g, or t
  misc_feature (43)..(43): n is a, c, g, or t
  misc_feature (61)..(61): n is a, c, g, or t
agaaagagacaaactacaaccgtgaataatgntccagnggtantaaagtgagcactcctancctacagaacatgttgaaaattctattggtttgtatgagttcgcatgaggtaataaagctgtgttttgattggtgggatgtataaatactcttttgctacactatatacaacactcccagagagcagggccttttgcagatgcccagaggacgtagcaaaccttgacaagtctgtgcagcacccagtgcacaccgtaaaaccccagacggatcaatctcgttttcacctctatcagcagcaagtatcttcgtctctcagaacaatctggatccataattttattaccgagcagactctgggcactggtgctttcagagagagaaacgatgctaccagtctctgatctaattataacataagagatctgaacacaaacgtgacgaggaagattcttaaacacaaccatcattaacagggataggcaaacagctctttattccaactccattagtgatatgaaagaaagacaatccaagtcagtaatggaaatatgcaagaagttcaatttaggtgaggtgaatttttgcatctgctttaacggttgaggtttagtgtatattgtactttttacccttaaggccaagtaattggcaactgtgaaaccattaatgtaaaatattgataataaattatgataaaacagctacaggactgtcaacaatgttaaatcttggcctaattggataaagtgcttta

SEQ ID NO: 321472 - DNA, 488 bp, Homo Sapiens
gtacttcccgaaacactggccaaatgtgctgcagaagacaaataagaataatcaagtataacactgacaaacagaaaggaaccttttataaacataatgacattgtgcagatgttgtggtaatcactttctatacagtatattacttatccttccaacagctgtatgacctataaattcttagtatcttatctaagggacctgagccaggatttaaacctagttctgtctgacctaaaagctttaactacattatactactgttgtaccaaagcaccaagtatttataccagatatttaacagctaagtcacaaggatcaaagaaaagtaactaaagcataaggcaaggcacctatgtgaagacagactaaaaaatgtagacctcccagtatgtaaaattagagaaaaccatcaatgtctataaattcaagaatggcgatcaacagtatcaacatagcctaactcattatcaaatattctttaaccag

SEQ ID NO: 321473 - DNA, 843 bp, Homo Sapiens
  misc_feature (16)..(16): n is a, c, g, or t
  misc_feature (38)..(38): n is a, c, g, or t
  misc_feature (63)..(63): n is a, c, g, or t
  misc_feature (496)..(496): n is a, c, g, or t
  misc_feature (617)..(633): n is a, c, g, or t
tttaaaaggaatccancaaacctcccacatgaacaccnaaaacagcaggtcccaaggggccgncaagtggtgcccacctgaaggaaaggtcaaggaaagaacaggaatgtgcaagggcctcctgtgggaacctgcaatgaagctcttgccttgtaaaggctgagggtctgaatcaaatcaacctatgtcaccaagtttgggtcaccccacttccccaacatgtggctcttaggaaccgcagactttgttgctgaggcaacccaggctaaatttcttcacttctgtctgctgaaggcttatttttaaaaagtcataattttttaaagtacgaaagcctaagtacaatgagacgataaacatcagctttgctctggatggaatctgggaataggtgtgcagagaagtgagggaactggcctggccctgcctgaggccagcgagtcttaccacattttggcccaattagggccacttctgtttccagatggctgacctnactggtaccaccgtgatgagtcagcgctgtgcctcaggtggggccctagtggatgaatgatcctccgcaattttgctgaaagggatttattacaaaaacacaatatttgcttttctaagtnnnnnnnnnnnnnnnnngaaacttgatcattgcaattttccaccccagataacaaaaacaactccagtccatgtgatcacgagaaacgtggctgtcagattccctgctccacgttccatctccagaccaaagctgctactgagaatggcaggctcaaaaaactctagtcaccaaactgctggctgtcatcgggggtcatggggtcgttataatcctcaggggttaca

SEQ ID NO: 321474 - DNA, 803 bp, Homo Sapiens
ccgcttaattaaatttttatttgaccaagaaaaaactgtctagaattgcctgacatttaaaatccacttaaagcagattagcaacttcaagcatcacaattattcagcataaagagcctttgttgaaacatctttctcatttatttagaagaaaacatctagaacagaaccaagcaaaacttttgtatttttgtaaaaaatctcaattcctgaaactactataaacaatctactgaaactgtattcagcaaggggacaggtttacctcaaggccatgttcacctgcaacctgctgataggtctggtatcactttataactcctgagaaagtcattcaccataagctgtggcctccccacctcttttagattacttcagtggctaatactgcaatccattgacttgtgtctgctcccacttgactataagcaaattgaaggcagggtttgtgccttcataatctctgaatgatctgaagatggaaataactgctttgtgctttcagggagctcatatacctcagctccgtgggctacgaagctcgttcttcaaatgaggtggagaaatgtaagcgcgatgaatgaggcccaagtcgctggtggcgctgaacccccaaaagatacacaccgcgacagatgcaacgacccctcacctctactcccgttcccagccgcatcctctgaaacctgatacgcctgcctgcctaccaggacgctgctgtcactggctctgctcggtggccagagacagtactcactccatgcggccacccctccaacgtcccaccttcctagtaaatccac

SEQ ID NO: 321475 - DNA, 771 bp, Homo Sapiens
  misc_feature (71)..(71): n is a, c, g, or t
  misc_feature (116)..(116): n is a, c, g, or t
  misc_feature (144)..(144): n is a, c, g, or t
  misc_feature (265)..(265): n is a, c, g, or t
  misc_feature (267)..(267): n is a, c, g, or t
aaggaagtacgctgggctgtgcggtacggaagggtgaatgaggaatgtctggtgacagccgtgcggacacnactcctctctgcagcactgcctcccagcgccagggtcgcgggcanatcccactgagagcgggggtcctgcccnatcttagagtcaaaggcagaggggcttccaggccctggatggggtattttggtgtcacctgaagtccctctgacatcaccttgtttcatcattttttatgacagaattagaaacccatccntnaagcacaataatcatcacagacttgagtttgcttcctaaagcaaaggctccgggtttgtttggaaaatttttttgatttctgaaatgaattgatttttatatttggggcatctctatagaaagtgaccaccaaggccagtaagtacgggaaaaaatttttactaacttcctcagagattcgtgatacgcgtttctccactgacagacatttaaaaacaaccttcagctccgtttcaatcaatcacctcgacttgttttttagcatggacactgccagcaggacagacagggatggagtaaaccgaagccaatttcagggctcttggcgtgttggacacagaagaaatcctagtgcagcctttggtagctaacagtcactgattttataattggagaatgcgtaaagattcatttttcaaggagaagagcctgcaaatggccaatgaaggaggtaaataaactaagatattccgagggaagggacccaggccacctcccttccgc

SEQ ID NO: 321476 - DNA, 567 bp, Homo Sapiens
  misc_feature (122)..(131): n is a, c, g, or t
agtcctccagtttactcgaacgttgagatgttcctgtgatgaccagcataatttccttttgaggaattttcacaattcatcagcctcaggattcaggttttataagacattcttccacattnnnnnnnnnngactctgtcccatagaaataagtttctcatcgcttctccagcttcttgtacttggcttccagtttttttgaatatgcatccaacttgtaagctgcctgctcaagagctgctacctgctcttcaatgacattgatctgatccagataaggctgcagtccagcatatttctggtttaagtcctttaagttcctactaatgtttatagcaatatctttcatttcaagatacttcaagctggtgagtttattcatattttccaggagcttatagtcttcactggtggccgtcagttccccagtcaggtaagtggccattttggagaacatgtcccggcagagctcagtgatgtcagcttcagcaggctcctttgcttcctcagctgtctccacggcggcatcgtctcgggcgggctcatcactccgggtcgccagtacgc

SEQ ID NO: 321477 - DNA, 871 bp, Homo Sapiens
caattataatactgaatttttattgaaataaagcacactaaatcaaaccaattacaagatacatgtgtcacaccaagaaaacattttcagttatgctgacagccccaaatgttttccatttttcaaagacagtttgtaatgtcatgggaaaattgctcacgacgttaaaatgaaaaaagcaagatacagtatcatatatgcagtatgatctcaactatgaaataactttaatatttatacattgaaaaaaagactagaagaaaatgcaccaaacattgaactgaagttaatctctatatactgggataacaagatattaattttttacttcttgaaaactttcaaattttccaagaaattaatcataaaatcagtgagaaaattgaacttgaatgaatatcaaaactgcttaaacaaggactaggctgagtaacctggctttgaggcatgctacatggcccttttcactgcaatgaaaaaaaagtccaacaaaattttatcgcaggttcaagacaattttgcattactgatgttggaagctttatgtccgacctccacaaacttcagcagctaacatctaatcttaatacacagaaaatgccaacttcattgaaaactttaatgctatcttaattgccttaattgttcttttcaggggctggtttgaacaaagggacataatttacaaattccagacttcacagaaaattcaattaaagattctttgaaataattcattttaagtaattaagagactgctttggtacattaatctcttacatcttaatttccaaaaggtctttagacacattttacttttaaacagctaccaacagttctgttacttcaagaagatgcagactgcaacatt

SEQ ID NO: 321478 - DNA, 963 bp, Homo Sapiens
gaccttgatgagtctttattttaggaagcatattattagcttttgattttaagaggaatttactccttgctttccctgttttggggaaaatgaggagagctgcctccaaatcagggaattatattgacacaggtagacatagggaatggaactgaatgaacccaaggtgttacattttgtttcactacacatgagggagaagaataagccctgctatagtgttggccagagcactgcgactgacgccacaggtggggttaccagttaaagtctcagtgtgactacttggacacctatttttgtttagacacactattcaaagggctgcatggggaaccagaagcttggcctcttctgataaatgccgtggtacctgctatgtaaaagagctggaggtttctgttctttttgaactgacagaggaaagaggaagacaaggctggtggccttgggtagggctttcagtagttgcacagtactgggcaattcttagccttcccttggttctagccttgattagagatagtcttttttagtgtcattatgttgcccagagtggttctgaattccttgcctcaggtggtcctccgcctcagcctcccaaaatggtgggattacaggtgagcgccacagtgcctggccaaagctcgttttgatcctcattcatatgtcattgtcctcagagaggctgtcagctgggaaaagttattctcctgggcccttgaggccaaggtagattcagaactgaggatacttctgtgtatcatgtgataccattccagccacttgtcttcctcagctactcccacctgcccacccctctagaaccgactacacccatgagcagcagtacagaattcccagggcctttcgtaatggccaacatactgcttactatatatgccaggtatttttccaaagtgccttacacgtgtttattcagtccctacctgaggtaggtac

SEQ ID NO: 321479 - DNA, 897 bp, Homo Sapiens
ggcggggggagtcgttgcaaacatccacaaaggtttcccttccaaattcaatcacgaaagttcccggtaaagaatctaaattttcgtagacacgctgggtccttattcccctgggaaggagggggaaaggtgatttgaaaagcacagtgggtatggccctcctgtccatcaaaggacgcagttcgagacacagtcggtcaaatttaccaattcctccggggggaaaccccaaaacaggatctcgtttttttgcaatttccacaagaatccgtttcccatggtttaagtttcctgccaacttgtatgcagaagtctcccccgggatggtcccaggcttgggattttgcagggataggtctccccccggagcatgcttggccccgtcttcccccacattcagcccctccccagcccatggcaattaccggcccctgagtgcatgtatttcaccagggcggcaaagaatggacggtcccttcaggtcaacgtagtgtttccttgagaagatcttcggaagcttgcatgaatttcagaccaacaaggcggaatcctttctgctcaaaacgcttgataatctctcccacaagaccccgctggaccccatctggtttgatcgcaatgaaggtacgctcacagttggccatggttcctgtatcacagcttgagataggaggcccctcgccttgaaagacgatccctaaagtagacagtagcaccatctcttggccccatcttcctgtcctttagttaacctcttcttacagcatcttagcactgtagtccaattttctgtttgtgtgtctgcctcccctgcacaccaggctgatttagtcctgtgtagagactctatggtacctagccacagggcccttccagctgcttaggtttgaactcccc

SEQ ID NO: 321480 - DNA, 783 bp, Homo Sapiens
tgctgggaggaagcattttaatcagatggtcggggatggtaacactgtacagggagaactcacagctccaagagcttccctccaaattatgatgaagttcctgtaaataactagatttcctacagcctggtcctctgcccatgggaaggaggggaaatggatgtgaaaagcaatgtggtctgccctcctgtcattcatagatccagttctgagcacagctcgtgtaatctaccagttcctcagggtgaaaccacaagccgatctccttctctgcactctccacagaatcactgccatgtataatgttcctgccaacttgtatgcagaagtctccacggatggtcccaggcttggagtctgcagggttggtctccccgagcatgactcggcccgtcttcaccacattcagcccctcccagaccatggcaactaccggccctgagtgcatgtatttcaccaggccggcaaagaatggacggtccttcaggtcaacgtagtgttccttgagaagatcttcggaagcttgcatgaatttcagaccaacaaggcggaatcctttctgctcaaaacgcttgataatctctcccacaagaccccgctggaccccatctggtttgatcgcaatgaaggtacgctcacagttggccatggttccttccagctgcttaggtttgaactccggctgcagccgccagcacccgaaacgcgcccgggacccacgtggttcgcagcacttgcacgcacggaacgcttctgcgcagatccgctgccggagaacccccc

SEQ ID NO: 321481 - DNA, 708 bp, Homo Sapiens
tttttttttccggcttccaaaagctttattggcaaatatgctctataaaagaatgatcaatcctgttgcctctaagtcaatggaatgaagagctgtgtccagggacacaccacgccgtgctgaaggagactgctgttgtgtccacctcttattcatagacccagtcatgagcacaagacttgtagtcaaccagttcttcaggcttaaaccataggctgatttctttttcagcactttttactgaatcactgccatgaatgatgttcctgccaacctgaatgcagaagtccccacgaatggtgcctggctttgaatctgctggattggtctccccaagcatcactcggcctgtcttcaccacgttcagcccctcccagaccatggccacaaccggccctgagttcatgtacttcaccagcccagggaagaatggtcggtctttcaggtcaatgtagtgctgcttcaggtgttcttcagaggcccggaggaacttcatggccacgaggcggaatcccttctgctcgaagcgcttgatgatctcgcccaccaggccgcgctgcacgccgtccggcttgatggcgatgaaggtgcgctccaggttggccatggtccgggaagctggaggggccgggcggcggcgctgcgctgggagagcagagagctggtgcgaccaccacacccgggagccggcggcggaggaggggcccc

SEQ ID NO: 321482 - DNA, 726 bp, Homo Sapiens
  misc_feature (126)..(126): n is a, c, g, or t
caaggccatccactccgggccctgtttttccacccacggttacagccccctcccccagaacccatggcccacaaaccgggccctgaagtttcatgtactttcaccagccccaggggaagaatggtncggtctttcaggtcaatgtagtgctgcttccaggtgttcttcagaggcccggaggaacttcatggccacgaggcggaatcccttctgctcgaagcgcttgatgatctcgcccaccaggccgcgctgcacgccgtccggcttgatggcgatgaaggtgcgctccaggttggccatggtcctgccaacttgtatgcagaagtctccacggatggtcccaggcttggagtctgcagggttggtctccccgagcatgactcggcccgtcttcaccacattcagcccctcccagaccatggcaactaccggccctgagtgcatgtatttcaccaggccggcaaagaatggacggtccttcaggtcaacgtagtgttccttgagaagatcttcggaagcttgcatgaatttcagaccaacaaggcggaatcctttctgctcaaaacgcttgataatctctcccacaagaccccgctggaccccatctggtttgatcgcaatgaaggtacgctcacagttggccatggttccttccagctgcttaggtttgaactccggctgcagccgccagcacccgaaacgcgcccgggacccacgtggttcccc

SEQ ID NO: 321483 - DNA, 769 bp, Homo Sapiens
tatgctggggaggggaggccattttaattcaggatggtcgcggggatggttaaccactgtacaggggaggaacttcacagctccccaaggaggtttccccttccaaaattatggattgaagtttccctgtaaaataacttagaatttccttacaggcctggtccctctgccccatgggaaggagggggaatgggatgtgaaaagcaatgtggtctgccctcctgtcattcatagatccagttctgagcacagctcgtgtaatctaccagttcctcagggtgaaaccacaagccgatctccttctctgcactctccacagaatcactgccatgtataatgttcctgccaacttgtatgcagaagtctccacggatggtcccaggcttggagtctgcagggttggtctccccgagcatgactcggcccgtcttcaccacattcagcccctcccagaccatggcaactaccggccctgagtgcatgtatttcaccaggccggcaaagaatggacggtccttcaggtcaacgtagtgttccttgagaagatcttcggaagcttgcatgaatttcagaccaacaaggcggaatcctttctgctcaaaacgcttgataatctctcccacaagaccccgctggaccccatctggtttgatcgcaatgaaggtacgctcacagttggccatggttccttccagctgcttaggtttgaactccggctgcagccgccagcacccgaaacgcgcccgggacccacgtggttcgcagcccc

SEQ ID NO: 321484 - DNA, 1866 bp, Homo Sapiens
  misc_feature (1620)..(1620): n is a, c, g, or t
  misc_feature (1794)..(1794): n is a, c, g, or t
  misc_feature (1822)..(1822): n is a, c, g, or t
gttatttagggatggtcttttgttcatttccgcatccattatttaaaccagtggaaattgtctctatttttggaaagtacttaaaagttaccagaattttcaatggaaaatgaggggtttctccccactgatattttacatagagtcataatttatatgtcttataaattataagtcttatataatttataagtctcccacaatcttccagttcttacccagtgtcagataattaattactaattactttcttaaaaacatgaactatgccagaataaaaaatatctatgtttgtatatttttataactcctttcagtcctctggggctcctgtcattgagggaagtcgttacgcctttcactgccacagttacagctcaagtgcttacacttcaagagggaggacgctgggggcccctggggctgcctagtgccatcgtggtgtgtggcaggtgggccatcccatgtccctccagggggaccccacagcctggcagatgagcagatacccctggccacccatgtcctcagcgacatttctgatgtgctgctcttatgtgaggaccagtgctttctctctttgcacttccttcctaatcttggttaaggcatgttttatgccatgaagaatacattagaagaattgagggactttgtagagaattttgtggctttggtccgacgggtgagtggctgtgcggaggcctgtgttcgggagggcctgggggaaggagggcacccagcaccccggcgtctcttggccctttcttattctttggctcctcatccaccgtgatgagaagcgctgctgtggccacggcacactgcttggcttgggtggcgggttcatggccagttggtgtcatcagcaaagagaaaaagcacaggttagctccccattagatggaaaagtgtagggactgagaagggctgcagcctcagcagtgtacagagtccccggcgctctgaggttggagagaaagaacagaccagcgcccttcctgactacatccgaaacttcacacagggtgtttctgagcaccagcacttccagcgcttcacttaacggcataaagcaaaacaggaccttggcacaccgtcagctcgaactcaacactggcagccaccgtctcacccctgcggaggagcgctcccgtctcccacaggtgccttaccgcgttccctcccgctgctttcatttttctgacctaataattacgggaaatggaaagtctgggccagcatcaataaaatgacaccaaaaataagtagatgaaatcaaatgaatatgagaacatcttgttcttcaatatcacgggtttttgttaatgtttcataagtaattctccccacttgatttttcttctataaaatcccatagaacaatgtttatgctatagccatttaatatatgtacaaattgtaaagaatatgtataaatgttttacacgaatgtaagagcatgtagaagccaacatataaataaattgtttaaaaaaactgtacagtaaattctcaaatcactttttcaaaacactttttggactttgtgtgtgatttttgttgttgttgttaagtactttttattccagctgctgaaaatggtccaggtaatgaatncttccccaaatcctatttcttctgacatgaattcatcatttcagttccgtaggtcaagtgttgcggtccgggaagcgtatcataaccacctgggaagttgccaatgaagcagacaagtctcccagtgtctgactctccggatattttggattttgacctgggtgtgaggcaaangtgaaaaaagggatgggggggaaatggnagatggcacggggcttcctccagagcgttgggtaggccgacttg

SEQ ID NO: 321485 - DNA, 610 bp, Homo Sapiens
  misc_feature (93)..(121): n is a, c, g, or t
  misc_feature (419)..(544): n is a, c, g, or t
ctggtgtgtatcataggatttgttcacatagtgttatgcatgatcttcgtaaggttaagaagccgtggtggtgcaccatgacatccaacccgnnnnnnnnnnnnnnnnnnnnnnnnnnnnngtatgtaaattatagcactgagggccctgctgccctgctgggaccaagcaaaactaagccttttggtttgggtattatgtttcgtgtttgttatttgtttgtttttgtggcttgtcttatgtcgtgatagcacaagtgccagtcggattgctctgtattacagaatagtgtttttaattcatcaatgttctagttaatgtctacctcagcacctcctcttagcctaattttaggaggttgcccaattttgtttcttcaattttactggttacttttttgtacaaatcaatctctttcnnnnnnnnnnnnnnnnnnnnnnnnnnnnnnnnnnnnnnnnnnnnnnnnnnnnnnnnnnnnnnnnnnnnnnnnnnnnnnnnnnnnnnnnnnnnnnnnnnnnnnnnnnnnnnnnnnnnnnnnnnnnnntgctgccccctccccagcccacttccccgagttgtgcttgccgctccttatctgttctagttccga

SEQ ID NO: 321486 - DNA, 1016 bp, Homo Sapiens
ccggcagtaactctaacggttttaaggtagcgaggcctgggtggggacagaagccccagccccagcctcatctacaccccaggagccctggcctggccctaccgcccccagccctaccagccgcccgccctgggctgtggaccctgcgtttgccgagcgctatgccccggacaaaacgagcacagtgctgacccggcacagccagccggccacgcccacgccgctgcagagccgcacctccattgtgcaggcagctgccggaggggtgccaggagggggcagcaacaacggcaagactcccgtgtgtcaccagtgccacaaggtcatccggggccgctacctggtggcgctgggccacgcgtaccacccggaggagtttgtgtgtagccagtgtgggaaggtcctggaagagggtggcttctttgaggagaagggcgccatcttctgcccaccatgctatgacgtgcgctatgcacccagctgtgccaagtgcaagaagaagattacaggcgagatcatgcacgccctgaagatgacctggcacgtgcactgctttacctgtgctgcctgcaagacgcccatccggaacagggccttctacatggaggagggcgtgccctattgcgagcgagactatgagaagatgtttggcacgaaatgccatggctgtgacttcaagatcgacgctggggaccgcttcctggaggccctgggcttcagctggcatgacacctgcttcgtctgtgcgatatgtccgatcaacctggaaggaaagaccttctactccaagaaggacaggcctctctgcaagagccatggccttctctcctgtgtgagcccccttctgcccccagctggcgggggttggccccctagccctggaggggccctgggagtccctggcccctgtcattttctggggtaggggcttgggcaaaggggtttgcccttaaaccccctgggctcccggggccccaaagccctgggggggctcccctgtgaggcccctcggcccc

SEQ ID NO: 321487 - DNA, 977 bp, Homo Sapiens
gtggtggagggagtggggtgggaaggataaggtgggtggggcaggcccaggagccccaggctcgggccaggagccaggttaaggcaaccattgccagtccctacccagaaatgcagggccacgactccaggcccctcaggctaggggccaccgcggcagctgtgggcagaaggggctcacacatgagagaaggcatggctcttgcagagaggcctgtccttcttggagtagaaggtctttccttccaggttgatctgacatatcgcacagacgaagcaggtgtcatgccagctgaagcccagggcctccaggaagcggtccccagcgtcgatcttgaagtcacagccatggcatttcgtgccaaacatcttctcatagtctcgctcgcaatagggcacgccctcctccatgtagaaggccctgttccggatgggcgtcttgcaggcagcacaggtaaagcagtgcacgtgccaggtcatcttcagggcgtgcatgatctcgcctgtaatcttcttcttgcacttggcacagctgggtgcatagcgcacgtcatagcatggtgggcagaagatggcgcctttctcctcaaagaagccaccctcttccaggaccttcccactctggctacacacaaactcttccgggtggtacgcgtggcccagcgccaccaggtagcggccccggatgactttgtggcactggtgacacacgggagtcttgccgttgttgctgccccctcctggcacccctccggcagctgcctgcacaatggaggtgcggctctgcagcggcgtgggcgtggccggctggctgtgccgggtcagcactgtgctcgttttgtccggggcatagcgctcggcaaacgcagggtccacagctcagggcgggcggctggtagggctgggggcggtagggccaggccagggctcctggggtgtagatgaggctggggctggggcttctgtccccacccaggc

SEQ ID NO: 321488 - DNA, 893 bp, Homo Sapiens
ttctaacagccttgggtaagcctttggcagggaagccgcatccaatattatccacccatttccccagtgggctgcggctgccccctgcagtatcgtccagcatagggctccagctcccaggtattggtgagtctcctacacgggccatgtattttgaattttataccatttgtagatgtaccagcagcaatatgtcctgtcttatggattacaaccatgccaatagtgtcatgaccacgatcatcttctgtttctttatggataggaatatcctgctttaagataccaggtggtttgtagggtccgcagtattttgagggatctggtataacattcctccaataatttggctggcaattccgagcaagccaatctgaatgaagagcttgagaagcactggtagataagtcttcattgataaaccccatactttgagcaaatgtggtggctgactctcctactaaaagtgtgtgtgttgtatgttccagtactttccgtgccacaccaatagcatttttaattcgtctgagatctcctactgctcctacatccatagtagtgccatccatgatcatggcatctagtgtggtttctccaagttcatcaggacttcctccaaagcctacagagccgtcacactgctctctctcacacatggcacagccgctctccactgcatccagggcagagcctccagatgctaatgccctccacgctgcttcggttgcattcttaaagggccaagtgttgacgaccaggggcagagggctggagcagcgcactagggcctggcagagcagaaacggcacgagaagcacaggcaagttcgacttccgcgccatccctgaccaccgaagagaccagcgcgagaaaagtcccggcagccagcgatc

SEQ ID NO: 321489 - DNA, 421 bp, Homo Sapiens
  misc_feature (51)..(51): n is a, c, g, or t
  misc_feature (76)..(76): n is a, c, g, or t
  misc_feature (358)..(358): n is a, c, g, or t
ttttttcaattcaacataaatttatttttgtgtttattttacaaaaagacntttagaacacatgaggaacacctangatgatgagagtgagcagccttttcagcctttgtttctttcttctttaaatacagatgttgacagtaaagatggattagatgcagtccactttttcctcagttggctgatttttttcggaattataaaccatgaaactaaactgagtaaatgttgaaagtttattgcaagcagcaccgtaacttccagtcacattggcacatataacagccccaaaggatttctgggaaaatgcttctgggattcttgaaatcactttttgggcaagctatgggttggttcnttctcctcttctccatgtttttctacagcttgggtagcttggcagggagcgcatcaatatatc

SEQ ID NO: 321490 - DNA, 954 bp, Homo Sapiens
  misc_feature (30)..(30): n is a, c, g, or t
cgacatgtttcgttagtgtcctcgcgctcntttttcccctggaaaatcatctaatacttttattattaatatcagtggcaaaggtttaagcctgaggaaaaaagcgtacctctacgtattgacaactttgagttctgtagataacaagcagatttgggtctcctgtgattggctaatggtctccatctcccagcagacttaattcaggttttgcttctgctacatcccgccagtaaggaagcagcaaaggtagagaagagacctttttctctatcaaaggccagagatgcgagaacaaaaattcattcccctttggagacaaatgtagtccatctgataaataagatgagaagtcctggctgtcctgcatcagggtccacaggtcaagtacgtcagtcccacagtcttgggccacttgtaaacacgcattggcatattcaccaacaacagagttcaggcgatttagtttgcaaccttgtatgatgcactgttcttcccaggctgtttcacaaagtggggtcggcgtgatgagaatgactcgattctcagggatgtccacggacttcaggtactgcaccatgctctttaggttcgcagcgtactcctccaggggaatgtgctgcttgggattctcatcttttagtgcactgtcattggccccaaagaaaattgtaactgctactgggatgtccaaactgtttcctttcctgattaatcttggaaggataattttggcccacctggtattgtaacctgaaaatccacgattcagaacatcacattttctgaccagcctgtcagccagcgatgctccccatccaccctgctggaaggaaaactgggtgatggagtccccgaagagcaacaagcgaggccagagcagggcactcccgcagcccgcggcctcgcacagcgccatggagcagccgggcggggcggggcggggccgccagc

SEQ ID NO: 321491 - DNA, 762 bp, Homo Sapiens
ttgaagatattaaaattcaggttttattatttgttcagttataataatttaagttaatatttgctgtattctcagagcaaagatgtatttctgtaccactgtcctgtataaatttgttacccaagatagtgactggtatgaaaggagagggaagagggtgacagatggaaacgattgctgtaggacagtccatctggccagatgcggtgggggaggggagaagaagtgggagagagatggtcctacagatgctcccatgggtaaatgatgggtgcatccctccctgcagtcgggctgtgcctgtacttcacagtcctctaagaggtgtcattcaggccacctcactcagcctatgcccaaccccactcactttccctttccttatgggctgcccccgcaactgacttccatgatgattggttctcattaggccctttgtttctacaccagccttagatcattaagacaaagacgtacttgctaccctcatagcacataacaacgcctggcagatgaaaatcaaacaaaaagcattaggcagtcttagaacattatcttgtatccttactaatcacatccagaccagatattttctaatcacagtttcgtatcatgttaactttttaagcataaaatgtgtatgtagtaaaaagtgcttttcaagctgtaccaataggaagtcagctatgtttgagtgaggcttattttactaccatagtttaaagatcacctaaaggctcaagcttgaaccctgggcagctg

SEQ ID NO: 321492 - DNA, 659 bp, Homo Sapiens
  misc_feature (367)..(367): n is a, c, g, or t
  misc_feature (633)..(633): n is a, c, g, or t
gatacacaaaggcatttttattgcgccggggaataaccactactgctctctttggttcacaagagtcatctatgcatttcaaaagatatcagtaagtcaatgtgccaaagaaattattacaacttctttcttagaaagtatcagtatttctgcttttcttttttcacgtatctctggctcccttgcaacttgcctcacttgattaaaattgacaaattttggtaggacggttaccaatttaagtaggtaaggctcaggggaggtgtctcagtatgatactgagatcagaccaacagacagtgatctccaggcatcagcttcagctgctacaagctaactgtaccaactatggagatgtaagggtggnggctggtcaccccaagcagcctacttcaaaaacttttaagaatctttaatgttctattagggatcttcttgcactttcttcctgagcatcaaatatgtaaggtgctaactgacataatactcttcccttctaccaccaggcaatccagagccaaaagtgaggtagcaggctgcacactgagcaatctctgggtgtacctcctcccaatagtcgttcttccttctcttgcttggaatgttaaaaatgtttccccttatttgctttcntgccaacccgctggatgaggagtggg

SEQ ID NO: 321493 - DNA, 679 bp, Homo Sapiens
aaggaaccacatcccaagtttatttgtgcttttcaaaccagccagaacaaccagtaatgtcctcctcccaaggtttccttctctctcaccttctttgtgaaaagcttgtggaaaaggcagatgtggttgtgtggacacatttagagatggggatgagctatgactaggctggtttagtaacaggtttgatgaacgtgcctcttcccacttgtcttactggtagcttacagtcactctgaggtgtcaagagacttgggtctcttcagcaaagagaggagtccaaggcgttggtggggtggcagaagtagggagtgggaacttttgatgatcagtttcctcataaaggcaggagagagggaagaatatatttcctgggtttcatctttcttccacttcaaaggcagtggtgagatactcctttggaacaatcccaacgaggctgttcagttctcccacccaccagccatacatgttatactccttgctcagaatacggatgaggtcaccccgttggaaggacagttcatctggctggtcaccatggcaatcccataggccctggtagtaactggcatagtctactgatcaaagagaggagaaatcaaagttaaaaggactctattttttccgaggtgcccatgtttttgctgcaaatggaaaccagggttctgatattgcc

SEQ ID NO: 321494 - DNA, 401 bp, Homo Sapiens
  misc_feature (36)..(36): n is a, c, g, or t
  misc_feature (43)..(43): n is a, c, g, or t
ggaaacttttgatgaatcagtttcctcaataaaggncaggaanaaaagggaagaaatatattctccctgggtttccatctttccttccccacttcaaaaggcaagtggtgaagataactcctttggaaacaatccccaacgaaggctgttcaagttctccccaccccaccagcccatacatgttatactcccttgcctcagaatacggatgaggtcaccccgttggaaggacagttcatctggctggtcaccatggcaatcccataggccctggtagtaactggcatagtctactgatcaaagagaggagaaatcaaagttaaaaggactctattttttccgaggtgcgccatgtttttgctgcaaatggaaaccagggttctgatattgcccctcgtgcc

SEQ ID NO: 321495 - DNA, 651 bp, Homo Sapiens
gttttgtaataaataaggtaactctttataatctctgctgtcaggatgctctggggtatgttttggggttcattagttctataatatctctgccagttcacctctacatgccactccaaataactaatcagaggacagcttgtgtgcttgctgtgcaagctcagtggaagcactcagctcctcaaacatcagattgtctctgcccagttcttcctggagagaatttctcagttgccctgtattcttccaaggtctctccagcatgttttggttcctctgaatgtaaccctttgcttttgaatttctgagtggtagatccattttaccatctccttacagtattagtaccccataaagacattaccctgtgattgagtctctttgatcaagggctgtaaaccccatcccaaggtgagaatgtaagggtgggaaaatccatttttctgtgacatcaggaccaaataactgcaaaggaaaggtgcccaaatatattaaatattgtcttagtgacttttactaaaaaacataactgtgagatggagttctgctcgagtactgtcaggcacttaatatattccaaataaatatggctggagttagattgactgaacttattcacagagggagagagtttggaagtgacttactgat

SEQ ID NO: 321496 - DNA, 553 bp, Homo Sapiens
  misc_feature (517)..(517): n is a, c, g, or t
  misc_feature (540)..(540): n is a, c, g, or t
caaaaataaaaataaatcatacgattctttattatattcttgtgtctcttttctcctctgctgaaaatcttggctcttgattccaatgacacaagtaaatatttgttttaacacacataaatacccaaatgacactaccaatatcattgctaaaaataaaactactgaatgcagtttaaaatttatttgtggttgtttggtctgtaggatatattccattagcaaagtacagacaaaatactaagttttcaagtcacttgaagtaagtcttctgtggggttatatcaccaacttgacagactgttaagtttgttttagttttaagagttgccttttcaaaaaatgtttattatataaaacattgacagggcctcaaaataaaaggtatgtaagatacagaaatagttgccgtccttgtctagctccctaccaccactaacaaggagatcattttattagttattggtataactaattcttctattgctttacaaaaaaaggcaaatacatatttttnccatttgtctcttcgttatacancaggcagcacacc

SEQ ID NO: 321497 - DNA, 813 bp, Homo Sapiens
  misc_feature (44)..(156): n is a, c, g, or t
  misc_feature (163)..(163): n is a, c, g, or t
  misc_feature (165)..(165): n is a, c, g, or t
caagtagctgggattacaggcatgcgccaccacacccagctaannnnnnnnnnnnnnnnnnnnnnnnnnnnnnnnnnnnnnnnnnnnnnnnnnnnnnnnnnnnnnnnnnnnnnnnnnnnnnnnnnnnnnnnnnnnnnnnnnnnnnnnnnnnnnnnntgacacncnatgcctgcccagcaataccaaccattgtcttttaaattcgtgttggcttctcagacagggagatcactggaataaaataaccgatggtcttattttgtcacacgtaaatcaaaagaaatgtcctctttgaagttgtaagactccaccaatgacagacacccttttcggtggactctgagtggtgtgtagtggttttatagccatggaaactaggagtatctcactttccactgagaacccctgcccccaatccctctaagttggggtgtggcagttgggcagggtcaagtgacccagccctggctgttaggacagccatatacagtgaagagttctagaaccagctaaaaatggaagtttgggtgtttaccaacaaggtacctctttatggatgcagccccagtaagctggctttaactctcagctccttccctgtctcctcctaatccaagcccttttataaaataaagccccttctgtcccactggttcacatacttatgtgctgctagtctctactcaaagttcgcgcaagactaatgcttttaaaatgaggtctaaaaataattactagtccagactattattctttatacaaaactgcctttttctactctttatgtaaactctttctattgtgttggtctaa

SEQ ID NO: 321498 - DNA, 445 bp, Homo Sapiens
  misc_feature (23)..(24): n is a, c, g, or t
  misc_feature (340)..(340): n is a, c, g, or t
  misc_feature (356)..(356): n is a, c, g, or t
  misc_feature (380)..(380): n is a, c, g, or t
  misc_feature (388)..(388): n is a, c, g, or t
  misc_feature (393)..(393): n is a, c, g, or t
  misc_feature (425)..(425): n is a, c, g, or t
acttgataaaattgtatttctcnntttacagtcatgtgtacaatttgttacaaaaccatagaagactacaacttgttttaaatcatttttggtctgcaaatatgtaaaatctgtgtgcaattatcatgtatttacagggtcttgtgttagtcattttcaatgattattccaacaatgtcacactctcaacataagacatggcttaaggataaatatattaggtaaataaatattctgaggaacatatttccataaatgaaatgtgctggctatacatatacaggaatatacataagttgtcttctaggcttttaaaacattttttaaaaatggggaatgntgggaaaagagccccntagacccattttattaccaaatcntttacagncaggnccttacaaaatccccccttttaagtggccaangggggaaatttaaaaaattt

SEQ ID NO: 321499 - DNA, 415 bp, Homo Sapiens
  misc_feature (239)..(239): n is a, c, g, or t
  misc_feature (393)..(393): n is a, c, g, or t
acagtcatgtgtacaatttgttacaaaaccatagaagactacaacttgttttaaatcatttttggtctgcaaatatgtaaaatctgtgtgcaattatcatgtatttacagggtcttgtgttagtcattttcaatgattattccaacaatgtcacactctcaacataagacatggcttaagataaatatattagtaaataaatattctgagaacatatttccataaatgaaatgtgagcncgtgggacagaaggggctttattttataaaagggcttggattaggaggagacaggggaaggagctgagagttaaagcccagcttactggggggctgcatcccataaaagagggtaccctggttgggtaaacaccccaacttccatttttaagcnggggtcccagaactcctcactg

SEQ ID NO: 321500 - DNA, 437 bp, Homo Sapiens
gggggtgaaattggcagatgcctgaggtcatagctgtgtcctgggtcactgtggctggtgaggacctcaaggaccccatcaagtgtacacagcagcagcaaaatcaagggatgaccctcctctggggccccctgtcctcagcacattccaggcagctgtgccctgacccacagggacccgtggggttgggaggaggtccaggcctgtgttgccagagctggcagtgtgagctgtaggcagggacggggagggactgtcgctgtgatcagagtgggttaagctgaccaggaacacccatttaacccctttttctttttgctttcatttttataaaggaaaagaggacctgtcagataggcagccccatgctacgtgattctttatgttgtgttgttttgttttgtaaattgtataatttttaaatatctggagtttta

SEQ ID NO: 321501 - DNA, 670 bp, Homo Sapiens
  misc_feature (62)..(62): n is a, c, g, or t
gacttgggtcagtgccgtacactggttagagtgacatcatccagtgtagttgagtaacctgntaagataaatgtcattcccacacttgagaaaaaacacagaacattctgaatagaaaacaagacttaaaaggaacccctttaaagctgtttcattttctgatagccactttctcttagttttaatgatgctcttcatggtgctgtttgggctccgagggtcatgggtcataacaatgtttttccttcatctagtcattttaaagctttgcaaataatgagatttcattaggaaatcagaaagagaaaataaaagtttgtcatggttaccatgccaagtagtgtagaaaggaaatgaatattgccttaagttcacagcattgggatatttttgccttatagttacctggtaattgaagtgggagactggaaaactggaattctttagtaacctcgaaatctagtgttagctcaattttcaaccacttcctctgcaaaacttaaggaaaaactcttaagtacataatgtcccaatgtacattttccttgtctacaatctaataagtgatatcctgaactgtaggaatcatattttgaaaactggataaaatcatcagcatatccacaagttgacatttttgttaattatagatcggcattaactgtcaact

SEQ ID NO: 321502 - DNA, 970 bp, Homo Sapiens
ttttttttcaattaaataattttattgggggaaaaaaaccactttgagcaccaaagcaagaaaagtgtattattcaatcagtttcccagatcacatgccaagaacacaatgctcactgtggtgcctggcagacggtccacaaccagcgggtgcgttcagcttgaatggaccggggtcccacagtgtttgtgccacaagtcaatggccttgctcacgatcgcgtctgagctgtcctggggaatattttccagaaactttgttatcttctctgcactgttcagtgccataacttttattttaaaggttaataaaatttcgacagctagataaactaaggatctttcaggcgacgcgcaacacatcctcagatactcagcagactgccatcttccagattcaagtattgttcaaaccttttgcaactggggcaaggaatcccggtacttggtatttaattggttcacaaagcgtcgggtgatccagtaacagtcgacactatcttccaccatttcctccatggctttagctatggcaagaaacacttcatcatctggctccagtggaaaagagggacttcgaggtaacttcccagactccagctgatacatgcggagatagacttcagcctgaggtgtggcatcactaacaaagcgaacgactttcagggcatgaaggacatccaagtactgctccttacgatacatcatcaccttggcatgggactcgtggtgtggaggcaagattcctagaagcaccttccataccaatgcacggtacatggacgggagagggaacctctgactaaaagtacaaagtttctcagtatccagacggtcatcttttaggagaatttctaatgatttcttttcttcaactccacgaaaccccactttctcataatatactgaacgaaagtttctctgagagtcctcagtcatatttcattccaaatgcttccagcgtctgtccc

SEQ ID NO: 321503 - DNA, 979 bp, Homo Sapiens
  misc_feature (19)..(19): n is a, c, g, or t
  misc_feature (73)..(118): n is a, c, g, or t
acacggcatttttttcagntccttccgggggagaaacagtctattttctctctttctgtacagtatattttcnnnnnnnnnnnnnnnnnnnnnnnnnnnnnnnnnnnnnnnnnnnnnnggggtttcattcagtttgatcaatcttcttccccttcttcctcaccctgcagtagcagggtggcagcggcggtctcctcctgctgctgctgttgctgctggtgaagctgctcacaggcagcccgcttctccctctgcttctcttgaatcttcttcatctcctccgagtacttgcagaaggtgtgtccgaacttggcccacaccttgtagggcacggtgatggagttgcgataggtgggcttcacctcgctcactcgcataaacacgccgtacttgttggagcccacatcgaagaagaagcgcttgttgtccacagtcaaggaggtgccctcgggcagctcggccggctcctcctccactccgtagtcgtcgatgagcttggccagagcgtcacggaactcgatgagcccctgcgcgggcagcgcaatggtctggccctgcgtggagcccaggccaggcccccggttgaccgtctggcggatgcgcaggaagcggccgcgctggttctccttgagatccatgtagtacttgcggttctcgcgcaccaggaactcgcttttgagcgcccggcgcggctcgtcctgcgcctgggccaggtccggcggctggctggggcccagctgcgcgtagtgctcgatgaagtcgcccaggtagtcgcggaactccacggccactgacatggagagagtaaggcggctcttgttgccgcccgcgcccacctcggcgatcttcaggaagcggcccttggcgttctgcttcacgtccaggtagaagcgcttgttctggatgtccacccgcttggaggccagctcctgcgtctcgtgctgcagcccccctggggccccgccgccgccgccgccac

SEQ ID NO: 321504 - DNA, 1495 bp, Homo Sapiens
tttttacatattagaactcaatgaagaattatttaaaagagaggaaaggcagtgcagggctggaggtcctggagggtggcggcgggtcgtcctaactagcaggctgaaaggtgctggaggggatgccttcactcagaggaagttcacagccacctgccttggaacatgtacctgttcatcttttcgtaatgttagtattcattttgctatcttcctgttgccatttccaaacagtgtcagtatgtttttgttaaatacgaacatttaaaacatatcgtatctgtaagcctatttgggtgtcttcatttcatgcccgcactgcaccataatgagtaccacacaaagccagaggatgacacttcctccagaggtctcactgcacatggagaggttagccctggcattaagggtccttggaatctctcagcagtcatagtcagtcagatgcaccaagggcagctgagtcaatctcctttttgtaacaacaggccgtttctgcggttctcagtgctgccaacctgggcatactgaaagagcctcaaccaatactggctctcagggtactttcctttttaaaagaagttcaacttttgctattcttatgccccataacttttaatttgcacaagatcagccatgcccactcactgaattctattatattacccacacctctggaaattcacaaagtctgaattcagatctatgcataaggatgcaaacggattagcaataattgctggcactgccatcaacacctcctgtcgatctcacctgatctgaggataaatgaaggcaaagaatgtggccccagcccctggattggagtggaggcaaggagggtggcgagctgtcttcagcagtcggcctcacctctctgctcctgtatcaacaagtgccatttcatccccacttccaatccccaacatttataccccgtgaatcaattcttcttcagcatgccagttgctggagacagcaccatttacatacaggcatctatagcagttatcttccagggtggaagcaagagttttgtaatcataaaaaacaggatgagaaacaaggagttctgaaaagaagagaaggcggttatagaggtgctggggtaaaaagcaaagcaaaggggtaagataggaaaggaggcctggattgtttctggggcatccagggaaaggagttgcaagcagaaagaggaccctggattctgcacacagcagtgccccatcttggagatgccatgagcacagacagaaggtttactaggtgggcggcacagtgacttctccccagcactccacccgtttgtcagtagtgtacacgtggaggggtcaccaagatataacggcacaggcaaataagacacagttgcaaggacggcaaccagccctgcagctcatgggaaggaaagaatccttcaggtcatgatcccccaccatttgtgttggtccccctggctagtcccagttcagcccttatctccccttctcaggca

SEQ ID NO: 321505 - DNA, 520 bp, Homo Sapiens
tcttttgataatttttagactacgatcctcttgtccagcagtcctaggaaaggattcttgtccccgattattttctgggtctataggaccattctgctcttggttgttcagttccttgcagacatctttaacgggctgtgtaccattttcaacagcagagcaatctcggtcattaacaatttcatctttgaattcctcactcccagggggttccttgattttgggcttgttccttagccgagaaaggccaggcttatagatttccagatctggacgcctgttatctttgcgcggcctggcctcctttaattccttcatgtttttttcctgacgtggctggagacttgaaattaacttgcaaattgagcattctctctaataaaaactgctcccacacatgccagggccaaacccgagtagtctgaggtcccggatccctccagtggcgcagctttcggaagcctgtcttgggggggaaaagttcagcaacgaagtcgcaggctcttaaacctttctcccc

SEQ ID NO: 321506 - DNA, 946 bp, Homo Sapiens
  misc_feature (382)..(541): n is a, c, g, or t
  misc_feature (564)..(602): n is a, c, g, or t
aagtagagtgttttaaaggccctattagagaaaaaaagacattggaaactattaccaaggaatatggtacaatctttccacataggctttttaagtagcaaacaatacttctaggataactagatggtctgatgagttcttataatgccggacttctatgaagacttttcaatatatgttttctaatttaaatgattaaattttaacattgctactcagttaaaggcaataatatgaacatcaaggatcagatcacacagtacctgattattagtgattactttcaagcaggagaattgaggattgttgctttggagggattttcataaaataaattaaaaacctgaagggtatggtggcgcttgcctatagtcccagctannnnnnnnnnnnnnnnnnnnnnnnnnnnnnnnnnnnnnnnnnnnnnnnnnnnnnnnnnnnnnnnnnnnnnnnnnnnnnnnnnnnnnnnnnnnnnnnnnnnnnnnnnnnnnnnnnnnnnnnnnnnnnnnnnnnnnnnnnnnnnnnnnnnnnnnnnnnnnnncttgagcccaggagttcaatcannnnnnnnnnnnnnnnnnnnnnnnnnnnnnnnnnnnnnnggaggagacagaattgggctctgtctcaaaaaatacacaaatgaataaataataaaaaccttccaaaatcttgccagaataataccaacaaatagtgaaacttaaaatgtgactaaatcgacttttcaagttcacaatgtgcccatggctaatcaatacatatgcacagtagaaagaaaatgaagtctaataatgaccactcttgcctagacagggaactaagtttgcctgggcacagaaggcaaaataatttgggaaaagtaagcagaaggagcagagtcgtatgttgggaaactagaatccaatacaatttatcaaagagtactgaaacttggaatgtgacc

SEQ ID NO: 321507 - DNA, 930 bp, Homo Sapiens
ttgtaattaaaagcaattattttaaaatgtgcaagccagtatctcacaaggcatggatttctgtggaatttatttttattcaaataaccatatttatctccaggctgtggaatcgccactttctttgtgaagacagtgtctctccttgtaatctcacacaggtacactgaggaggggacggctccgtcttcacattgtgcacagatctgaggatgggattagcgactgttgggagactgcacatccgggacctgcccatgtcttcaaaacaaacacatgtacagtgggctctttttccttctcaaacactttaccccagaagcaggtggtctgccccagggattaaagaaggaaaattggccatctttcccacctctaaattctgtaaaattatagacttgctcaaaagattcctttttatcatccccacgctgtgtaagtggaaagggcattgtgttccgtgtgtgtccagtttacagcgtctctgccccctagcgtgttttgtgactatctccctgggtgaggagtgggtgcacccagccccgaggccagtggttgctcggggccttccgtgtgagttctagtgttcacttgatgttggggaatagaattagagaaaactctgacctgccgggttccagggactggtggaggtggatggcaggtccgactcgaccatgacttagttgtaagggtgtgtcggctttttcagtctcatgtgaaaatcctcctgtctctggcagcactgtctgcactttcttgtttactgtttgaagggacgagtaccaagccacaagaacacttcttttggccacagcataagctgatggtatgtaaggaaccgatgggccattaaacatgaactgaacggttaaaagcacagtctatggaacgctaatggagtcagcccctaaagctgtttgctttttc

SEQ ID NO: 321508 - DNA, 439 bp, Homo Sapiens
  misc_feature (418)..(418): n is a, c, g, or t
tgattaaaaacattttctttttattgagaacatctcaaatcctttgtctgtatttgacagcgtctcatgctcagttccagctggtcttgtgcgagaggaagctcatgcagttgtaacgtgtggtgtatacacagatttacatacagagaacactgaggattgcatctcagcaacatgtttctcagccgaattacattcatagaaagtgtccagattctaaaatcaaattaaaagcatgtaatccaaagcctgaaaaagcaaacagctttagggggctgactccattaggcgttccataggactggtgctttttaaccgttcaggttcatggtttaatgggcccatcgggttccctttacatacccatcaggcttatgctgtggggccaaagggaggtggttcttgtggggcttggggnactcggtccctttcaaacagg

SEQ ID NO: 321509 - DNA, 915 bp, Homo Sapiens
  misc_feature (151)..(151): n is a, c, g, or t
  misc_feature (287)..(287): n is a, c, g, or t
  misc_feature (788)..(788): n is a, c, g, or t
aatgtatcatgaaaagttgaatggcctgctcataagtttagctcattcactggaaatgtagattgatgttcaatgttaaactggaaggagcttggtttgtgtgtcagtggttatattagtgggtagtgtaacattttatccaggttggggngaggggagatggccacagtagcaagtggtgacactaaataccattttgaaggctgatgtgtatatacatcattactgtccgtagcaatgaaggatacagtactgtgttgtgggtgagtgttgctattgcccagcanttaatatttgggtgtgtatgtttgaggctatgaaacacgcaggagtgtttttgtgctattaattttaagagaaagcagctttttcttaaaattcactgttgagaaacttgcatgtctggaggcggtgtcctctccgccctgtcgggtcctggatgagtacgagttatggtcacggtcacagcctgatctcttatgtgttcatagccattccgctctcccatcagaactgtttgtcctgaatgtgttcctctagttctagaaaatgaccactaatttaaaaaactcggttgtgaggtttgcccagaggcacttgttccagaatttcccctcctgcttcagccatgtccttgtcacttgggattctaaagctaaaagctttagcttcccaattcggtgatgtgctaggccaagattcgggagctgtttgccagcctcgtcaaatatggaagagaaaacaacctgcggtcaaaaaggggagtgatttgttaagtggtgcgcgtnctatctcataactagatgtaccaaccaggggaagggccaaggatggaaaaggggtaaacttttgtgcttccaaaagtagctaagcagaaagttgggggaagcagtttagccagatgatccttgatta

SEQ ID NO: 321510 - DNA, 1128 bp, Homo Sapiens
  misc_feature (283)..(297): n is a, c, g, or t
  misc_feature (814)..(814): n is a, c, g, or t
accacattttttaaaattttattactgtttaccaatggggagatgcagtttatttacaccagcagccataggggaaaggggaatacagttaatcagctatctgtataggatggactacttatgcaaaaataaaaatctccaaaacaaaggacagtggtgagcttcactaccctcccccgatgatcccagcatgcgataatgccaggcagtggtccctgggcatgcgatggtgggaactaatgtatggaagaaaaagccacaaaccacagaatttttaaagaannnnnnnnnnnnnnnataacacacacatacacacactcagatacataataggattgcagggtgatcaatacacataatcaagggaaaaataggaattctgctattaaaaggaaggtaggtagggaaagggagagttcctaaccactgtcaactatatggtagggagcattctctccccagaaaggagtatgtaccctctgggcacctgttggaccaagcccaccttatacccatccagggcaggaggctactgccctattggtagaggggccagaaacaaaaaacaaaaggggggtaatatgaacaaagtattactcaaaactactttccgcttcctcctctaaccaggagaaaaggccagaaagaaaacagtaatttcaggatttgagttccctatctgaaggcagagggattggactgtggcctttctcctttaccatcaatcccacttccaagacattgttaggaagtaggcccagagtctcacttagactctcctttcttcatcctcttagatgtcgtctacaagtcnaagggcaaagatatctccatattattttagctcttgccaaggtttgatttttttaagttaatgcaattctttaagactaatctgtaactaggccccaagcctgatcaggacaactctaggacaaggcagtaacagttccaaggcccaaactctatggtttccttaatcctctaaagtatgtaatctaaatcagtctatacagtctaaatagtaccttctgggataaggattgatacatgcacagcaagggtgagagaatggacaaggaccaactccatccccctgtgtgtcaatcagcctttactgctcttcta

SEQ ID NO: 321511 - DNA, 536 bp, Homo Sapiens
agcgcttggtttcttgctggaccatactgcagaaaaatctagtaaattagttagaaattaaaattgatattcagaattgcataaaggtagttgccatactatttttgtgtttcaaattttataactgctcacaagtaacctgtgtaactttgatgttttaaatctggtcccaaatgtggtacttttggggtggcttggatgggaaaatagaaagttacttaaaggattaaggtgtaggacggaatgggttggttttcttgagtgttaaggcttgcaagatgctctgtgaactcttatgaaactttgtaagacatcagagggttcataggagagtacttcatagggcttcattgtgaggatctcaaggacagcttcttagaggtggcctgaagatcaattaactagtctatttttagaagaaaatttcatctttttggacaggaatattgcaaatttggcttcaagcaaataattttctgattttctgttcagacaacagatcagagaacaaaacgagaaaacataaaggaaaagcg

SEQ ID NO: 321512 - DNA, 668 bp, Homo Sapiens
ggcatttattgctagaaaggagaagaaaaacaactttgttccctggtagctaatatcttgccagatattttggcaaggtactttaacattattcttaaatagaaatgcccaaacatatttttcattgatttcacatgaaaaatacggcaacactttcaaatctgcacacgtgcatgaaaacttcttataatgatgttgttctatttcacttggttccctgtttatcaacacttgtaattctcctgttagatattctctctatatatcttctccctcattttatgtttttatcctttggattccaaagagctttatcttgtttctccttcaaaacacagactttattttcagctcattacccccttacacatgaattttaatatgctattacatttttaacttagtcttttttttattgtttcactccgatttcatcccatcttactgtcttttcatctcataaccgcctgactactttctgtccctttcatgagggacagaaataaatcataatactaagtggaaatactataacagaaataaattataatcaatcagttctggaggtctactcttctttcaaatctccagtatgatctccctttttcttttatagatggacatggttcagtaggctcggttaggtttttcctgtttatcactaaaca

SEQ ID NO: 321513 - DNA, 419 bp, Homo Sapiens
  misc_feature (189)..(197): n is a, c, g, or t
gctccaccttttaatttcttttaacatataaatttctcttttagcatgtaaatttgttgaattaacagccctttgataatataattcctagttatcagcaataagtacaccagtttcttttttaaattaggagtatgtaattctaaattaattgattctctcattgtacatattatatgcaaggttacnnnnnnnnntcaatggttaatgattttttagctcaaccaagctaaaagatgtgaacaagaaattgaactcaaaacaacttaagatacaaagctcttgttactgataatgtctaataatattcatcaatttaccatatcttgttcttatattaaaatgttctatcattttcctaattattttaaagtcgattacaaaaatatatatatattcttgtagtgccagaaaattga

SEQ ID NO: 321514 - DNA, 786 bp, Homo Sapiens
ttttttgcacaaaggctatgtcaacactgaacacttatagagagtttaccactctagaatagaagatataggaaagctgtagtcctggtcttcatcttcctcctcttcctcggtgtcttccgaaatggagttgcaagatccggagtgctttacttccagtagcacacctgaggagcaggcagcttccttcatggcacactcgctggcataagtggcattgtcactggcacagacaggctcatccgacttactgtcagggcacagctcatcacagagggaacaccggcctctcccaaccttgaaatcccataaacattttttcccaccagtgcactggatatcttcacaggactttgctttgatacactttccctcataggctaatccaatagatctgcccagcaggcaggtagcctttctcaggtggcaggcactggagtaggtgactccatcattcccacagagatattgctcagaggaagcaggctctgggcaaatccgattacaggtcacacagtaggcattattggtctggtccaccacacatgtggagctgcctggacagaaaacatcccgacaagtctttttacatctgccttggtactggacttccagttctggctgctctttacatcttgcctttaggagtgcacattcattgcggtaggttttcccatccagcccgcagactggacccttccaggtgatgttggaacaatccggggcgcagacgcagcggggtttgttcttcttgctcgtgccgctcgtgccgaattctgtgcctcg

SEQ ID NO: 321515 - DNA, 596 bp, Homo Sapiens
  misc_feature (353)..(395): n is a, c, g, or t
tttcagtccccaaggcttgtacccactcagtacaaatgtttttgctactgggttatcatcaggaacatgatgtttacccaattccccaggaaatgaataaaatcaacagaaacatcctgtgacaacagagcacattttcatagaaatgaaattgatgagcttattacagtttgaatcagttcagctattagatctacacataaaacatgaaacaatattaacaaattacatttgtattaagtttttatttaaaaatatttatcacacttttttgtgcaagggttccattgatttctttggttttaaacacgatagatctattttacctaaatatatatagttctatttgtacnnnnnnnnnnnnnnnnnnnnnnnnnnnnnnnnnnnnnnnnnnntggaattattgcttcaatataaaaaaggcctagcccatttgagaactactgccattattgctttcctatttgaaaaactatcctggaaatcaaggaatgtaccccatagctccctgcagaaagtataaattggttgcacattatcatcatattaatatgaccctaccttcaccaaagctatcctgatcttgtccttaaaaa

SEQ ID NO: 321516 - DNA, 456 bp, Homo Sapiens
ttttttggaaacatactagtttttattgcattttagggattatagattattgaaaattatttaggacacggaaaatatctaaaacatgaaacctttcttaacaaaagcatcatagtctattttggtgtgactgttcattacctacagaccccaaatagttcttcctcttttgaaggttacacttgtaaatctacactcttggttcaatttatcactgtccaaataaggtggagaagctgttcaaactgatccacagaatgcagtatgcctggaagaggcaaaacaagtattttcaagacataacaggccattacattttaatatgctgccccaaattcaaatatattgtagacaataacaaatacagatgaagacattttgtgtaaagctcaaacctttagcatctaacaagtgcactctagttccagcatctatgaaaagatgacatcctccacc

SEQ ID NO: 321517 - DNA, 621 bp, Homo Sapiens
ttttgtttgttttgccattatgtttgctttattgccaagattgaatacaactctttaataaaatatatgcaatatggtaagatgagcaaaatgagattttccctagttcaacagatagaattgaagtaacaatcaatttaattaggcaaacagggcttgccaattagaatgcaggattccctggagccttttaaaacacaatgtagagaaagttgttctatctagcccaatatttacagttgtggaagttacacatgtaattacaacataaatattcatcaagatttcttgagtgaaactgggtacaagtgaaataaaggaaagttatacatcagattaatatgagagagaaaaaggagctagacccctcccctgtaatccccatcactgcacgtccccagatttcacagagaagtggggtaaacttgtggtcgtttactctcccatgacatcagcatctcagcgtggtgatgattgaatgtccgtaattcagtcaggcgacccaggagacaggcaaagtgttgaggattttcaggctggtgaatcttacacaacttttgtagcacatcaagaagtggctcctgaagcttctctactgcctctctatcctttatgtattgt

SEQ ID NO: 321518 - DNA, 1618 bp, Homo Sapiens
aacccccaaaagtctgaaccctgcctaattaatagtccccaagaccctaacccatgcctaaaactggaacaaaacagctcccctgggctgccccatttgcctgaaggcgcaatgcgtgtgctttttccttcctccttctcccacaggaaaaggtgagagatggaggaggcaattttcagttgtgtgtgggtttgatttaaggctttggctgtggtctattgatattaaaatactttctgggaacgccatcttccaagctccccattggaacaaatgtattttcaaaaatgaaaacattgagcaaagatgtggagcggcaatgctgctgcttgcccaggcctctcatgtcaggatggtgtcgtccacctgctccgtggagtcggcctggctggccagcttcttcagggaccttcggttaacctcgttcagcacctccaaactggccacatccaggatcttggagagggactgaaacacctcttcaccctgccgcatcttgaggaggttgacaatttgcctggtcgctgtaggccctgaccacggtgttcttatccttggtgttgtcaagaagagccttcaggatgggcttgatggcctgggggtccaggggaggcagtgggtccttatttgcccaccagatcatcttctcagccaccagcctgatgtcgctggatgggttctgcagacacttaacgaacaggctggaaagtttggccggcaactgccctccgcctgtctcgatgtggtgtctcatgagaaagcccatgccccggaccccgctcaccgcaatggggatcctgtccgccgtggcactgcgtcaggatcatttcctgaacatcactgctatatctgccggcacaaagtctgccaggagccacattcacagccacggaaagtgccaggctccgcccgtgccgaaccatccagtcaatgccggacacgtccgccagcaagcactgctgtagaacggcactaagctcctcttcagtcaaaaaggcacacagttcccctaggcacccggctgaggagatgcgagtgttgtcctcatcgtgtcccagcatgctcagcaggagtgagacgatgtttttccggatggcggcatccactttggcccttgctccctgaatcacaaacctcagggcctgcagcatggtgtccctgacacctgggtcctccatggcgcggatgccattgagcagctctgtgaagagggggtccaccttaatgtggatggaaatgagcttccccagagcatctgcggccttcaggcgcaccccccggttggagtcctgcagggctttggtgaaagtggtctgcagctggggcaggaagggcttcagggcaatcccaaccttagccaacaagaggctgagtgtctcgagcagagccgccttcacattccagctgaacctgtcccccaggatgcggatcagagggccagtgatgctgaccacggagggcctcagggcgtcagccgaggtcaggcggattaccaagcctaaggctttggctgcctcctccttctgctcagggctgccagtcaggactccttcccgcaacacggaaggatcctcgtgccgaattcgccacccagccccccggtggcggggtatctgtt

SEQ ID NO: 321519 - DNA, 586 bp, Homo Sapiens
acaagataaaatcaaagcctttattaaacattcctctttcaaacagcctttcaaacctatacccctccccagacttgggaactgccagagctgtgaatcattttcatctgacagggatcagatccattcagacctcacaatattgaaaagccaagccagacacaccacactgggcagagatccaccgtctgtgccccactcgggatataggaaaaaggttggtagcgccagctctcaaaccagagctcaagcacaggagaagaggaacccacagtctgaccctgctattatagttccagacctagccatgctaaactggacaaacagctcctgggctgccatttgctgaggcgcatgcgtgtgcttttccttctcttctccacaggaaaaggtgagagatggaggaggcaattttcagttgtgtgtgggtttgatttaaggctttggctgtggtctattgatattaaaatactttctgggaacgccatcttccaagctccccattggaacaaatgtattttcaaaaatgaaaacattgagcaaagatgtggagcggcaatgctgctgctggcccaggcctctcacc

SEQ ID NO: 321520 - DNA, 475 bp, Homo Sapiens
aattgattctctgtcaatgattcttttgagaaaagcacccataatttgctacttgaggattttattccctggattctctggatgctcattgcatgaaaagtggaaaagtttagatctatggaaacagaactgttgcctatatggaaaatcagtgccttgtggcaatacaggtaagaacagtgttgctcttgaaaaagtggacagtgggtggtctgaatgtgtcctggtccctggagtgggtttttagattgatgtggactcttcttagacttgtaagtaaaaaagttgtttcttcccctaaaagggaactgtgcgccttagacctggaattgctgggaaactgaaacattctgtagacttacttgtttccaactgtatcgcagcaagaagtctatgtgccccaggatccctggattacctgaggaagaagagatcaaggtaaaaaaacccaccagtcaagggaagttcaagtagc

SEQ ID NO: 321521 - DNA, 606 bp, Homo Sapiens
  misc_feature (52)..(52): n is a, c, g, or t
  misc_feature (54)..(54): n is a, c, g, or t
  misc_feature (79)..(79): n is a, c, g, or t
  misc_feature (84)..(84): n is a, c, g, or t
  misc_feature (86)..(86): n is a, c, g, or t
  misc_feature (88)..(88): n is a, c, g, or t
aggaagaatgtagggagtcctccagtggaccacactccttctagcgagccgngnaaaccatagagatcagggctcagcngaggncngnccactgctgtcacgtggcctccatccgtgcgctttattggctggtgctggctttacggggttgaattttggacgctgcctgccattcgtgggaccgagtttcaggcagctggaataaagagagacatcgggggaaagccgcgagaaggccagcgtccctggctgggagcagagctagccgagtagggcgcccggctgtcaaactggccggcgcagtgcacgctgggccgccccggagcggtcgcagagcccgtcgggagtcgtagtccgggacgggcccgcggctttgtccgcgacgcagctcgggatccgggtcggggtgtcggccgggttgctgccgggcaccgtcgagcgttagccacccagcattgagctgccagcggctgttctccctaagcaccctcgctcacgtcgcctcgcctcgcctcgcctgaccggccgcagccttggataccagccttaaatcgagccgactacggcccagccccgcccgcggcgaggtgcgcggggttcggtgcc

SEQ ID NO: 321522 - DNA, 942 bp, Homo Sapiens
  misc_feature (264)..(264): n is a, c, g, or t
gttggctggcccaaaccccaaccctcgcctgcccggggaatggccataaatccttccccccagctgccaggggtaagctgatgggccctgaaaccccactgctgccctcgagagcaggcatggaaccagcacctccccgtgactgttcacttgcccgctccctggagccccgctgtttgctcatggctgtgagcatctggctaatgtaggaagtcaggaggtcatccatcttgtagcccagtgacgtctcgcagagcagttttntcccgcgcaccaagttcccaatggtgatgtggaagtaggtgttgccgctgctccagttggagatcttggtgaagggatgagtggtgaggatatccttcgttttgggatcgatgaggctgaccccatacttgttgatggcaattaggaggatctcagggaagtttggctccgtagtttgctagaaaaaaagatgagaaggcatcagatgggggcccagagcaagaaaagcatttggggacaggaatgaagcctggccccagctgggataaagtcagcctctcctgttgcctatgtggtactgacggccctgccatgacctatggcttccacctccgctgggccctcagtgctgccccacatcccttcctgggtcccccaggccatcctctgctttgtcctccctctcagcccaagggcctcccatctttaaaaagcctcctggaccctgcacctgcctccagctacctacctgttctcctcgcacagccaagctcctcaaaaggcctcccatcctagctgtgtgataagaccatacgtatcctctcacaccagcctcctcaccatactcctgcctctgttgtgcccctcatgtccccccataacagtccaggaggtgaggggtatggaacagtctcagggttgccagctggtcactctgagtttcttcatcttgaaatg

SEQ ID NO: 321523 - DNA, 882 bp, Homo Sapiens
  misc_feature (823)..(823): n is a, c, g, or t
  misc_feature (845)..(845): n is a, c, g, or t
tcataattatcttgtttaatctctattttattttcacacttgactttcaggtcagcttttgaatctcattgtacagatgagaaaattgaggctcagaaggaagtgacttgtgcaaggtcatacagcaaaccagatgctaacgcagactaagaggcgccctaggatcctgcctggtgccctgcagtgcccgaccatctgcttagtaaaacctactgcttgctgaagttcctgcacatccaaccagcacacctaacgcaaagtatgacttctttgtggaagttaatgattaaaacctagtctgatctaaagcatcttatccatggttactaattaagccaatttcagtgacagaaagcatttcaaacagaacagtgttctcttaagctaaatctataggcctcaaattatggtggcataaactgtacaattatgatattttgagtacacttaaaatattttataatacaatacattaacctctgtagctttacattttctcttcattgcatgccacatgttgggccctgataaaatggttttataacttttgggggagggctttaactaaaataacttcatgtagtgtttgagcgaactaggtaataaaatctgtttgctgtattcgctgtctccagatagggctgtaattacacccacatgaggaagaaaggtagctgagtttcaatctagatcatttatgtaaactcagccttcttgtcaacggtgttctcaaattgcatgagtgcaaacctcaaaaatcatctcctatgaaccacacagagacagtgtccgattgcaggcctgtgagattgcttatattctntctgtaattggatgtctgtggntcaagaccaaaatttgacattctgaggttaaaagaag

SEQ ID NO: 321524 - DNA, 284 bp, Homo Sapiens
agttagattttcctactttcttaaagtgggagcttagagtgttaatttgagaactttttcttgtttagtaaaaagcagtcgattgttataaattgcagcaccagcatggctgcattccaagcacggtgatattttcatttattttaaaatattttttaagacttccctgtagtatcatgagttatttagaaatgtgttgtttaatttccaagtgtttggagattttcttgctgttactgatttctagattatggtcaaaaaacatattttatatgatttcatct

SEQ ID NO: 321525 - DNA, 505 bp, Homo Sapiens
ctgaaagctactctctcagcttcagagggaaaaaatggttgtagatttctggacttgggagcagacatttcaagaactaatccaagaggcaaaaccccgggccacatggacgctgaagttggatggcaaccttcatctagactgcctggctcaagggtggaagcaataccaacagagagcatttggctggttccggtgttcctcctgccagcgaagttgggcttctgcccaagtgcagattctgtgccacacgtactgggagcactggacatcccagggtcaggtgcgtatgaggctctttggccaaaggtgccagaagtgctcctggtcccaatatgagatgcctgagttctcctcggatagcaccatgaggattctgagcaacctggtgcagcatatactgaagaaatactatggaaatggcacgaggaagtctccagaaatgccagtaatcctggaagtgtccctggaaggatcccatgacacagccaattgtgaggcatgc

SEQ ID NO: 321526 - DNA, 270 bp, Homo Sapiens
tctgcaggctcggatcacagttttgtgacgatgcaaatgtatttcagcttctaattggttccaaagcttatcatgagcaggtcccttcatatctcgtcctagcaattgtatctgttggacccttcatattgggaaaagagtacattgatttttcattatattcactacagtgagaattcaggaaaattagtgaacataagtagcttttgcatgaatctcaaattagtgataaaactaatactcacgaacttcttgatgtctctcagatat

SEQ ID NO: 321527 - DNA, 678 bp, Homo Sapiens
ctgccctggaggaaaaagcataggcagctgtagtacacaccattgatggatggcaggatgttcaatttagaactgttactgaacaaaactggcctttattctgagataaagagaaaatgctttaaagatctcattttaaaagccaaatcaaatgaaatctttagggcaatagatatctcattttttgcatttatatattctttcaataacttgaatattgtcagttaacataagaaaaagggttaccatggtgttttctctccagaatttctaggatggcttcagtttgtagaatggtattcggaaaattgagtaccgtcactgtttgttccatttctttgtgattaatattcattgccagcactctggcatgtgaagtgattgttccttgattcatggtgcacgtgtgggcagcaacaaacactgaggaagtgtcataattttaggccatttacaaagacccagctaccaaagcagattgctcagaggccatccacccacactgtgttccatggcaccctgactctctgctgtaaaattgacctgaggtgtcttgtttagtaatgagcaaagattaagggagaacatgttttgttgcttttcactggtccataaaagttgagaatgacttcaaatttgatggaggctttgcacatttaacttggatttttctcttga

SEQ ID NO: 321528 - DNA, 832 bp, Homo Sapiens
agtttgtataagagaatacaactttttatgtgtgaatatgcttcaagagcagaaaacaaagggctgggcctccccccaaactctggagttctattaggttcaaagctgggaaaaagccaaggtggggcagaaactgaaagccaggcagaagtcagaaataggaatgtgacagagaagagctggccaatctcctgccattaatgcctggctgggagtgggtggaggcacatggcaagcgtgcctgcacgctggacccacccccttctttaaactgcagcctgccttcttgttcccgagtcatttgaaatagccagctctctgcaggtacgtacctctaaggccatgtcctactactgctgggacacgagcgtcacctccatatgtgaggagaatgtttttattttcattaggtttttaaattagggactgcagttttaagctctgttggcttgaagcactgactctgaagacagctgtgtttgtttcccaggggtggtctcctctgcagactctggagtgcggtctcccagtacagaagggctcaggaggcctcagaaaccaaagacaaggcttgataccaatcagctaagctgtggcagagtgtcccaccacgctacatgttttgttaaagcttctgttagtgtatacacgaattccgctgtgtttacatatttaaaaatgccattgttcaattaatagtttaagaacttgttttaaatactgtcctgagtttcttttgaaacctgttatttataaacatagaactgtgtgtattgtgaaaacagtgagccttggttttgacctcccggaatattaggaaattcacttgtag

SEQ ID NO: 321529 - DNA, 333 bp, Homo Sapiens
aaagttagattaatatcaaaataagaatagcagcactatgaagagttaataaaatgcaatttcatgttagagctagaataaaagtaattgagcagtcatttgcaaatgcttcattataacatttatgtgcttaagatttctaaggttttaaaaagttacctttaatacaatccttagaaactcagaaatttcctgatattcattagattatggtgtttgcctaatttataccggttttcactgtatattttaatgaactttgattgggttacttttccagacatacagatttaatttggaatatgaactttggttcttcatgagtgcattttg

SEQ ID NO: 321530 - DNA, 488 bp, Homo Sapiens
agatataattcatataccacataattcacctttttaaagtgcataagtcactggtttttaatatattcacaaggtttgtgcataggtttttgtgtgaatactggttttcattcctcttggataaagatttaatttggtattacccttccagacacctttctgtgttttcatacgtatatatgtatgacggtttgaccttaggcagagtagcattttcaaaattttacatggggaaactttctagagtttaaagccattttatttttctgttctgtctgggttttatctacgtgttatttacaatctgctgtgtaacaaattactacaaacttaggtaccttaacacatatttatttcacagtttctgtggggtccgggagatccaggaaatgggttctatttccaagggtctctcacaggggtggcatccaggtgttgggctggccgggggtcccatccgaaggccgggccggagaggatcaacttaa

SEQ ID NO: 321531 - DNA, 617 bp, Homo Sapiens
  misc_feature (476)..(476): n is a, c, g, or t
ggaaaatcacagttcccgaaggaaaagtagtcgttctcaatttccgattcatagacctcgagagtgacaacctgtgccgctatgactttgtggatgtgtacaatggccatgccaatggccagcgcattggccgcttctgtggcactttccggcctggagcccttgtgtccagtggcaacaagatgatggtgcagatgatttctgatgccaacacagctggcaatggcttcatggccatgttctccgctgctgaaccaaacgaaagaggggatcagtattgtggaggactccttgacagaccttccggctcttttaaaacccccaactggccagaccgggattaccctgcaggagtcacttgtgtgtggcacattgtagccccaaagaatcagcttatagaattaaagtttgagaagtttgatgtggagcgagataactactgccgatatgattatgtggctgtgtttaatggcggngaagtcaacgatgctagaagaattggaaagtattgtggtgatagtccacctgcgccaattgtgtctgagagaaatgaacttcttattcagtttttatcagacttaagtttaactgcagatgggtttattggtcactacata

SEQ ID NO: 321532 - DNA, 585 bp, Homo Sapiens
  misc_feature (14)..(14): n is a, c, g, or t
  misc_feature (54)..(54): n is a, c, g, or t
  misc_feature (283)..(283): n is a, c, g, or t
  misc_feature (316)..(336): n is a, c, g, or t
ccaatgcatttccnttgctctcaggcagccggcattggcttccagagctctgcnagacccacgcatcactctccttccttaaggtggcaccaacgcccaccccgactctgccctgaaagcggccagctgacatcctccaaagacatggagatattcgccccagctctctaccatgctgcatgcagtgggctgtgtcctcgccccccaccaggagggtgaagcacatttctacctgaagcaccacgtgggccatgcctgggagagtaagaacgttcaggttacntctattcgtgttgcttggtacctgcgcgccttnnnnnnnnnnnnnnnnnnnnnttacctggagacttgacttggtctggtttccctggagaacacctgcgtcatccaggttgttgatctgtgcacctctttggtgacaacgtgaatttaaacacgcacaggattttggtgcaggatgggcaactgatgaagtttggcaataatggtaaatagagagcttttggttgtcattaacctggcacacagaagttactatgtttaagccagactttttcttctttgattctgaacaacttctttgag

SEQ ID NO: 321533 - DNA, 719 bp, Homo Sapiens
tacctggcctgcttggttaactttattcttccaactttaccagctgcattctcaggtcatttaaaggatataggaatggaggccaaaacagaccatttggaggtcagggatgccatgttttctattggggcaatttcatggggcactgtgccttgtgaatgacagtgagtggaagacaaaggattctccatattattccagggatgggagcccattcgactgtaacactgtgcactttgaaagagctgaaactattccctaataccgggactcagctggcaacccaaggaagcactgttcatctgccacccaggcttgggtgttagggacagggagaaagcaggcctgtgggctggaggccgtcacagggccgtcaatgcagacaaagggatgatctctcgagtctttgctgagccacatatggggaccacacatcacagtcttcactcctgcaaggtccacagtcccgtgcttctggagcacctccttatccctcctgttccaaaagcctctggcgtgtttccatcacaatctcctccattatttctggctttaagatgtctttgatctgatgtggaagggatgcttcatagcagtacaggatgctggtatcatacagcatcatcctctgagttaccagcgagatgatgcagttccgaagccgggatatcacctctcgatcagcaagagagacaggctccaggtttgcaatgaagccc

SEQ ID NO: 321534 - DNA, 465 bp, Homo Sapiens
  misc_feature (347)..(347): n is a, c, g, or t
  misc_feature (390)..(390): n is a, c, g, or t
  misc_feature (415)..(415): n is a, c, g, or t
  misc_feature (424)..(424): n is a, c, g, or t
  misc_feature (429)..(429): n is a, c, g, or t
  misc_feature (453)..(453): n is a, c, g, or t
gagttccagggtgatactgtctgagtcataaatgatttatttgtgaatttctgtggctggtcacgtattttggtcctgtttgtatttcccttcccctctctgtgtctccttatagcctgtctctcttgctgatcgagaggtgatatcccggcttcggaactgcatcatctcgctggtaactcagaggatgatgctgtatgataccagcatcctgtactgctatgaagcatcccttccacatcagatcaaagacatcttaaagccaggaaataatgggagggagattgtggatggggaaacacggccagaggttttttgggaacagggaggggataagggaggtgctnccaggaggcacgggggactttgggaacctttgcaggggagttntaaggactttttgatgttgtgggtncccccttantgttngggctccaggcaaaggactccgangagatccatccc

SEQ ID NO: 321535 - DNA, 448 bp, Homo Sapiens
tggtgtgtgtgttaatttaatcatacaaatattcatttatacaataaggaaaaacctcctcatctttatctcctcctaggcaccatgaggccccaccacaaacatccagctggctttctacacacaccactgtccaggtgggaagggcagccactgctgctcctgcattcacccaaggaaacaaaggaaaggtgcggcgaggcagggtggggtgagtaatcagcttgcacttctgagccctggcaaccctaccatcctctcctgctgggctcagattgaatttggggaggtatttattctcatgcccatttcccaccatggccaccttcaggccacaccagctgtttggtgaggttttctccagggtggaagtaactttgatgggcttaaggttacagccagtctttatgggggagagaaggatgattgttttttgtagaaaaatgcc

SEQ ID NO: 321536 - DNA, 774 bp, Homo Sapiens
  misc_feature (25)..(25): n is a, c, g, or t
  misc_feature (88)..(88): n is a, c, g, or t
cgaccgcttttacctccgaaggtcngtggggtctgccacaaggtacctccaggtcctgtgtatgtcagttgctgcagaaatggatttngaagatggaggagagatgcccaagcaacgggatcccaagtctaactaaaaccccatctggaaccctgatgtggaaaagcaggggtttcctggtcctactggctagagctaaggaagttgaaaaggaaagctcacttctttggaggcacctgtcccagaagccctggcctaggcagcttcaacctttgaacttactttttgaaatgaaaagtaatttatttgttttgctacatactgttccagacttttaaaggggacaatgaaggtgactgtggggaggagcatgtcaggtttgggcttggttgttttagaagcacctgggtgtgcctacctactcctcttttcttttaaaagggcccacaatgctccaatttcctgtctcctttagagagacatgaaactatcacaggtgctggatgacaataaaagtttatgttcctaaagtctgagtggcttcattttatatagtatctatctctaggacagctcccattagcctagaaacacaaagactaaaatcaatcttatgcttgaaagtatatccatcttttctctctcaagctagctgctgaaggctgataaaccaggctctacacaaaggcagacaacagaacacttaaactgctctagtcaaatgttggattgttacataaaaatgacatgaacttcctttttgagacaggatct

SEQ ID NO: 321537 - DNA, 218 bp, Homo Sapiens
  misc_feature (116)..(116): n is a, c, g, or t
  misc_feature (166)..(166): n is a, c, g, or t
  misc_feature (173)..(173): n is a, c, g, or t
  misc_feature (182)..(182): n is a, c, g, or t
  misc_feature (207)..(207): n is a, c, g, or t
agttctagtaaatgcaactgtattcaccctgttgtatttccagggatgtttgaataaacccagtagactggtgcctggaaattgcccagttgagtctgcctgttaatctggatctngggtttatcacacctaccttccctcctgtcccgttccaccccagccaccnacagttncccacgttngcctttattccgagggaggcattcntttgggatact

SEQ ID NO: 321538 - DNA, 1227 bp, Homo Sapiens
ccagttcagggagcttttgccaggggagagaccccagaggtctgggaccttggggaacaccccttagatgggacaaagcctggaggaagggactgagatgtgattgggtggggaaacataaggccaacagaagacctggagtcaaagttggacttgaaaaagtgggtctagggacaagggaaacctgctggccaccatcttcctgacaatcccctctcccccagctggctggcccgcacagaccccaaggatgtggcacgagtagagagcaagacggtgattgtaactccttctcagcgggacacggtaccactcccgcctggtggggcccgtgggcagctgggcaactggatgtccccagctgatttccagcgagctgtggatgagaggtttccaggctgcatgcagggccgcaccatgtatgtgcttccattcagcatgggtcctgtgggctccccgctgtcccgcatcggggtgcagctcactgactcagcctatgtggtggcaagcatgcgtattatgacccgactggggacacctgtgcttcaggccctgggagatggtgactttgtcaagtgtctgcactccgtgggccagcccctgacaggacaaggggagccagtgagccagtggccgtgcaacccagagaaaaccctgattggccacgtgcccgaccagcgggagatcatctccttcggcagcggctatggtggcaactccctgctgggcaagaagtgctttgccctacgcatcgcctctcggctggcccgggatgagggctggctggcagagcacatgctgatcctgggcatcaccagccctgcagggaagaagcgctatgtggcagccgccttccctagtgcctgtggcaagaccaacctggctatgatgcggcctgcactgccaggctggaaagtggagtgtggtgggggatgatattgcttggatgaggtttgacagtgaaggtcgactccgggccctcaaccctgagaacggctttctttggggttgcccctggtacctctgccaccaccaatcccaacgccatggctacaatccagagtaacactatttttaccaatgtggctgagaccagtgatggtggcgtgtactgggagggcattgaccagcctcttccacctggtgttactgtgacctcctggctgggcaaaccctgggaaacctggtgacaaggaagcccttgtgcacatccccaactctcgattt

SEQ ID NO: 321539 - DNA, 958 bp, Homo Sapiens
aaggcatgtggttttggcccaacccagccctttcatccccggggccaaccgagagggcgatgcgtaggggcaaagcactttcttgcccaggcagggagttgccaccatagcccgctgccgaaggagatgatctccccgctggttcgggcacgtggccaatcagggttttctctgggttgcacggccactggctcactggctccccttgtcctgtcaggggctggcccacggagtgcagacacttgacaaagtcaccatctcccagggcctgaagcacaggtgtccccagtcgggtcataatacgcatgcttgccaccacataggctgagtcagtgagctgcaccccgatgcgggacagcggggagcccacaggacccatgctgaatggaagcacatacatggtgcggccctgcatgcagcctggaaacctctcatccacagctcgctggaaatcagctggggacatccagttgcccagctgcccacgggccccaccaggcgggagtggtaccgtgtcccgctgagaaggagttacaatcaccgtcttgctctctactcgtgccacatccttggggtctgtgcgggccagccagcagttattgtacttggggagctttcggatgaggccctgctgctccagcagggtcagtgtggcagtattctcagcctcagttccatcacagatgtggatgccctctggttggcacaggcgggcactgtgctctacaaaatctcgaatgccagtgggaagctggcccagatctccactaagcactcgcagggtctggatgctacggcatgatggccagcccaaggggctcagcccatgccagttaagccgcaggccagggcggtacaatgcggccatggcacctgggcaggggctgcggggtggccaggaaccgagcggagccggggaggtatggaaggccctcgtgccgaattcgccacccaggcc

SEQ ID NO: 321540 - DNA, 1774 bp, Homo Sapiens
  misc_feature (62)..(70): n is a, c, g, or t
  misc_feature (73)..(110): n is a, c, g, or t
tttattgtggggagattttttgtgttttccaaaagaaaacccgcctttccgaggggttgttnnnnnnnnngcnnnnnnnnnnnnnnnnnnnnnnnnnnnnnnnnnnnnnnaaaattccccagaccgccccttaggttccctgggccccccaggggtttttcccctgaggggaaaacccaggtttttgtgggcccacggtttcccgcttttcccctaaaggggggccccggcgcgccccaaaatgagaaagggttttaaaaaaaagttttttggaggggccgaaggcggcccgacaagggaacttttccgaaggatgcacagtgtcgttttagaatagataagcatctcttattattggacagtctttgtgggaaggtctatggcacattgaagatgttagttaatatcaaattgctcatattttctgcaaggtgccttccctattcccagatgagggtgctatgtcctcttgctagactagggcctcaggtcacattttgtgcacacgtctctccagggcctcaagctcagccaacacctctttgggcagatcctggttgacctgctctgtcaggtagctccgaatgtcacgaacctcctgttcccagaagtccttggggagggagaacagctgagtggtgtctatagctctgaggccgctgagatccaaggctccttcctttggcaccagcccaatgggtgtctctcgggcactgtcctccccctctaaccgccggcagatccagtctagcacccgagcattctccccaaagcctggccacaggaagtgccctgcctcgtcacgccggaaccagttgacatggaagatacggggcagctgggcccccttgcgcccttccatgctcagccagtgttccaggtagtgcccgaagttgtagccaaaaaagggccgcatggcaaatgggtcgtgcatgatgatcttccctttgtgttctgctgcagcagtggactcagagcgcatggcgctgcccacaaacaccccatgacgccagttgaaggcctcgtataccaggggtacccctttgggtctgcggccaccaaagatgatggcgtcaatggggacaccctctggggcctcccaggctgggtccatgatggggcactggcgagccggggcacaaaatcgagagttgggatgtgcacagggctccttgtcaccaggtttccagggtttgcccagccaggaggtcacagtaacaccaggtggaagaggctggtcaatgccctcccagtacacgccaccatcactggtctcagccacattggtaaaaatagtgttactctggattgtagccatggcgttgggattggtggtggcagaggtaccaggggcaaccccaaagaagccgttctcagggttgatggcccggagtcgaccttcactgtcaaacctcatccaagcaatatcatcccccacacactccactttccagcctggcagtgcaggccgcatcatagccaggttggtcttgccacaggcactagggaaggcggctgccacatagcgcttcttccctgcagggctggtgatgcccaggatcagcatgtgctctgccagccagccctcatcccgggccagccgagaggcgatgcgtagggcaaagcacttcttgcccagcagggagttgccaccatagccgctgccgaaggagatgatctcccgctggtcgggcacgtggccaatcagggttttctctgggttgcacggccactggccctcgtgccgaattcgccacccaggcctcgctacctt

SEQ ID NO: 321541 - DNA, 491 bp, Homo Sapiens
  misc_feature (29)..(29): n is a, c, g, or t
  misc_feature (76)..(76): n is a, c, g, or t
  misc_feature (114)..(114): n is a, c, g, or t
  misc_feature (134)..(134): n is a, c, g, or t
agttgaatgtaaatccttctcaacggaanaggtacaatccccctggtggggcccgtgggcaactgggcaaatggangtcccccaactgaattcccaacgaactgtggatgaaangtttcccaggctgcatgcanggtaaccagggcaggggcaacagtggcaaagggcacggaaagatgtgaaacaggtttggaaaccctttcatcccaggggatgccttcctcccacaggccgcaccatgtatgtgcttcccattcagcatgggtcctgtgggctccccgctgttcccgcatcggggtgcagctcactgactcagcctatgtggtggcaagcatgcgtattatgacccgactggggacacctgtgcttcaggccctgggagatggtgactttgtcaagtgtcctgactccgtggccagcccctgacaggacaaggtaagcacctgctcttgcccaaggggaacacagaggccttcttgtactcagaggaa

SEQ ID NO: 321542 - DNA, 691 bp, Homo Sapiens
agccattataaagttatgggctgtatgtcaattcacgtcttaaattgaaagtcagccacacagctgttaaaacaatgggaaatttgcaaatgcaaatatataatgcatgcacagctatcacatttattctttatccttaaagccatttttaaagtaaactgggagaggcaacttagtaatatatgtacatcaaggcacattcttttcttgtgctttaggaatgatttacatgtgatctgcttatatcttaattttatactttataacagcttctaatacctaaaagcttaatttttaacaattattctttgagtggtagtttcccagagagaaatgtggcatctctcatggttattttcaaagtcagaaaattggatagcttgaggaggtgggatttaaaaatcaaacatatgaattaatataacttagttttcataacctttaaaaataatttatcttcaacaatttagtggaactgtaatcaatttcttcaagtatgatactatgagggctgcactgaataattttcaacattctgaaattacctgacaattacatggtatccacagagctgctgtgaatgtctatattgctatctgatttctcaactgcagtttttcaaccaaattaaacaattaaacatgatacaaaagctgaaaacataccaaatctagtttgtttgttcattaac

SEQ ID NO: 321543 - DNA, 1343 bp, Homo Sapiens
ttcgatgtctgatatattatttttattataaaaacatagaataattttcatacataattcagacatgatcttagccaggaaaaattaaataacacagcacagcatggatgagggaaagtatgcacagtccgtgtcagggttagaaaaccctgaaagaggtacctgagtatagagaactccaagctaatcctcctggagaaagcctcttaggcctaacatgagatcaggtaagcaatatagaataaaacctttctcttagccccaaagagattccatctgtgtagaagactgggtgagaagtacatttgcctgtcttcctcctgtccttcctttttattataagatacatttatagaccccatagaagaaaagataaatttcagaggctgttaaaagaggctaggcctaagttataatcctcctcctcacagccccatttccccaaggggcattagcaccagtgcagctttctagctgtaaacaatgccaccagcatgagtgatagtgtccctgtagggtgctcccacttctcaaggaccaaatacaccttagcagaggccaaggtttcctgacaaagtgaatgggggcaaacagaaaatgcacaggtgcaaacatggaatagaatggtagttgatgattggtctgaggtgcctagaaactgagttaaatctagctctagccatgaatgaagaaaaccttttcttattttctatttggagcctctgacaaaaaaaatcttgagaggctcctgaccaagggacctgagggatttcggtggtttctttcacctaaggcaatcggattggctgacatagctaagctaagtaaaaataacccttttcacataaataagcagttacaaaaattaaaatggtggaatgtctcagagaaaaggagaaaaatcccaataccccaaattgtgtattctttaacaataatttaaataatcgctgaagggcagctctctgattcctttcccaagttcctagcagattgtgtttatcagaagctggttccctcctgaagctataacccctccctctcagcactgccttgaacagagcccataaagatattaaaacatatatgtgcttttgcattttccatcaggaattgccttggattttggcaagtgattttcctagttgcttctagtgggttctctgaagacaggcttgccagaaggattaggtggtattctagctaagcaccaaggtgcttagaccctgatcctacaggtagacaaccctgacagtggacaaaggtgtggcatttcactattggttatatatttgattttcttgtgtttggtgagttcacacaaggctttggagaaatcaggc

SEQ ID NO: 321544 - DNA, 775 bp, Homo Sapiens
  misc_feature (333)..(343): n is a, c, g, or t
  misc_feature (546)..(554): n is a, c, g, or t
agttttatataaaatatttaatttttaaaacacaggctattcatgtcacataaatatcttcaactgtaggttagctgcttatggtcagcagaattatcaagtgtgactattaagaataacttagatactgtcacttataggaaagtctaaagctctaagactcaccatattaaaatttcagatacttgaatactgttgctattttgctaatttcaaaatatttcttcatttcctgcaatgtagtttataagttgttagtaatcaatattcaaataaaagcaacatatttttttcttccattcatttctttctcccaacaaaaagagtccatcnnnnnnnnnnntggtcaactgatatcaacttattttatagtagtaaaatggtaaattatcctctttaaaataattttactcttatcaaactacaggacttcccacatactgttttgaaatgaaggttcataagttagagggcacagggttaactggctttagaactggagcaatatacattctgtaacagttgttccaatttaagattccaatnnnnnnnnntaagttaccagaacagttgatgaacaaaatgattaattggcacaactctaacttccagtcaatttttccatttagtgataatggaaacactggttatttacctttggttcctttctagaattagtataattgtgtgtgtatgtgtgagagtgtgcacacagtgagacttgacaccattacagtttaaataaggactactccattctttgatgctcttcatt

SEQ ID NO: 321545 - DNA, 2152 bp, Homo Sapiens
tttttctaggtccaatggtagtttttattccccaggaacaaagataatgtggagaagaaactccaaaaggaaacagagcacggatgacagaaatgacaccacggcagcctggctcaggagtcaggtagatagatggctgctccacagtggacccggtcatggccctggtttcttggatccacatttgccccgtctcttaagtgtccatctcagaggtggaggatggagacagtgaggtggaaaacgtgcttgctctacacaaagacaaatggatcttctattcccagaggaccagggacaccaaaacctccctcttcagaatggaggtagacagataaaaatgagaggggcttgagtgtcacagacaatctgaaagtaataataggggctcactgtggctggcagaactggtactgaaatggggactacaggggaagcagcttccagttttatggtggagagtcagtcctgaatcaggccctggggcaattataaccagagtgctgtttctagccacttacttcaaaggactatggctatgttgaatcagaagccattatctttttcccagaggatgcacttccatccctatttctggcatgatcctgctccctacgagcctgatcctttaaaaaacagattggcaagcgacgagaaaaacggtgcctcacatgcttgagatgtgacagcttctcctgcaggcaagaacctctcagaacaaggtcctttggtatgagctagatcatccaggcctgtccctgcagaacgcaccaagactcatccctgtactacagggtggcctctggctatggcctggcacagtgaggacagaggcggggtcctgagtcaacatcacagggaggtctcctggaggatgcaggtggagctgctcccctgataggctgtgccatccagggccatggcctccttgtctctgctgtcccccagcacaccattcctcggcttctcaggaaacaggccagtgtcgaggtggtcctggccgtagctcctgcagtggagccgcttctgacaggacaacggaaggagggacaggagctttggcaacactgggtaaatggttgcagggttcagggaccggcctcgcattctcccagtgagtagactgacaatcaggcccaccacaatcactgtggtggagttgtgagcactgtaccataagtaagacaaggaatagaaccgctgcagccctgtgggcttggagaaggtagtcaagggcatcagtgtggtcacagtggcaacggttagattggtgggcagggagaagctggacccattagagggagagggtggcatgctggagcccatgctggtcacgatgctcccgatgccaatccagaaggccatgacgagcccagccaacaggcccacaacagcaccaggagggttagcacatggaaagaacattccaaggcagaagagtcccagcagcggtcccccaaccatgccaaagatgctgattgctgcctgcagcacaggtcccatctgggaggaaatataggccattcctagacaaagcagcccatagccaaaggcaaggcctctggaaagcatgatggcccgggcttcagagaactcagggaaccaaggtcgaatcaggtcttccatcgtaacagttgccaatgaattaaaagcagaggatatagtgctgagagagccgctgaagaggcaggcaatgaagagccctggcaggcctggcaggcccttcaggagatccatcacaaagtacaggacgaactggtctggggctgcctgagcctgctgaatgctcatgggatactcctggtaatacgcgaacatgacccaggccaatgaggcagccccacgccagagggacacctgctggaaggggaacactgcataacaggagagcacagcagccttctccgtgcgggaactgaggtaccgctgcacctgagcctggttcaccccgtataaggagagcatcatgaagacacccccgaaggccaaggtccagaaggtgtgccgcacaaaggggtctggatccagctcaaacccagagaatgcggccgtgctgggaagccacggcccacacacgccccaagccgcccaccttggctgaccccacgatgataactgccagctgcccgaggaacatgaccagtgtctggaa

SEQ ID NO: 321546 - DNA, 878 bp, Homo Sapiens
  misc_feature (553)..(659): n is a, c, g, or t
ttaggccaagacaacctctttatttaatgggctcagagagcaagggaaccacacaaaatttacagtctgagttttgcgcgcagagacccctctccacctttttcatgcctgtgtgtacacacacactgtccaagcctcagaagagaagccgtttattggtaaaaagacacatggaaatgtggctgccaggcctcagagcatcctgcccttttcccaaacagctggcctctgctatccacccaggacttgggcttggcatcccaggctggataccatgagagcaccttctgtctctggtctattctgccagtgtctccgtgtcagggtgggttggctccctccagggcacaaaggtctgggctctgtccaagagtgcccctccataggggtgggtaccaccatgccacacagcagtatttgccccatccggatgatcaagatacccctgcctcatcctgttaccttaaattccagaagccccatctctgcagctcagaaggtaaacaaaccctggttcaggcattggtctcccagagcaaggttgggaggcatnnnnnnnnnnnnnnnnnnnnnnnnnnnnnnnnnnnnnnnnnnnnnnnnnnnnnnnnnnnnnnnnnnnnnnnnnnnnnnnnnnnnnnnnnnnnnnnnnnnnnnnnnnnaaggggaaagtgtcagttcttaacagatgaggcagcaggaatttagggttgagtccttaggtgaaagccagtttatttattcaacaagtattgaatgcctactgtgtgctaggcagtcttctagaagccaggggtacagcccgtcctggcaaggtcctgactcagcccagccaggacagtttcctgagcttcaaggttactgtctccaatccctatttc

SEQ ID NO: 321547 - DNA, 874 bp, Homo Sapiens
  misc_feature (802)..(802): n is a, c, g, or t
gactgagccagagactggagttttattattactcaaatcagtctccctgagcattcggggatcagggttttaaggacaacttggtgggtgggggaaaagttagtgagctgggagtgctgattggtcagagatgaaatcacagggagtagaagctgtcttcttgcactgagtcagttcctgggtggggaccacaagatcagatgagccagtttattcatctggtggtgccagctgatccatcaagtgcagagactgtaaaatatctcaagcactgatattaggagcagtttagatagagtcagaatcttgtagcctcagctgtatgattcctgaaccataatttctaatcttgtggctaatttgttagtcccacaaaggcagtctagtccccaggcatgaaggggttttgttttgggaaagggctgttattctctttgtatcaaactataaactattaatataaactaaattcctcccaaggggagttcagcctacacccaggaatgcacaaggacagcttggagcttagaagcaagtggagttggttcatctctttcactggctcataattttgcaacggcggtttcatctctaccctgacaataccttttagttttcttacccactggggtcgagacttaattgaagacctcagacggacagcataacacggaacctgagaccttgatttgcggggacaggcttaaagtgtattctggagttggtgcccccaccccaggggccggctcagagggttcactttccagcctaacggcaggggaaccagaggctgccgacctgnatctcaccttgatggaggtcttgtcaccttcctccttggctggagagacagactgtggatgctctcctgctg

SEQ ID NO: 321548 - DNA, 608 bp, Homo Sapiens
atgaaccaccacacccagcccggacagcttctttgggagtgctgctaaccttgaaattatcagacacttaggagttattagtgctaaaaaggggaccgtgcaaggcagcagagttacgtggttcttcagatcatgtctgaacctattcttggaatcttctctataataagggaagttctcttaccccactgccacatacctctgttttaaaagataagtccactaactgtgagtaaaaatgatatatataggcattaaccacacactttaatgggtataatttcctggctgcctcccttcctcagcccattaggttaaacaccaaacgaaagactggtgtgtactgaataggaaagggaagttttatttggaaccttctaagaggaaatcaaccaggaccaaagagccttaaaggacacacagcaatgcacagccacttcccttccccagcttggctgccctaggtgatttctcaagctccttgggggactgttgtttctcatctggaatcaatgtgtgtatgagttttgtctggtaggattgccgactctgtccaacagatatcactgtgaattgaataaatttgttgaaagagcacacaggcacac

SEQ ID NO: 321549 - DNA, 467 bp, Homo Sapiens
  misc_feature (335)..(350): n is a, c, g, or t
cacgcccagccccctgtctctttttttaaaacacaatttaaaagcagaaagaaaaaatctgtgctgtttagactcagattcttaattagctagtatttcttaattcaatcaataaattattaagaccttttcactgctccctttttaaagtcttctttggagtgatttaagtgcttcttattaccaagctctcaaagagaaggataaaattaaaatctgatggggtaaccatttaaataaggacaactgggggtaacccatttctccaggacccctctctgcaacagagagctattctctttctttggcctagtaaacctctgctcttaaccttnnnnnnnnnnnnnnnngcaattggaaaaaatttcaagtcaatgaataaaataagatttggggataatggtagatgctaattatgaaagtcgactgtttcctttgaagggggagttcaaagctgtttttttgat

SEQ ID NO: 321550 - DNA, 564 bp, Homo Sapiens
attgtactaaagtgggagtcggtgttaagccttgtgtgggaaggtatgcttgggcaaatcacttcacttcgatgagcctgagttttaaagtttataacatgaaagacttgatttaaaatataaaagcacataagggacttttatggtttgaaattttgctaaatctaggaaaggtatattcaaccaacaaacatttgttgacctttaatgtgcaaaccactatgctactgtcatgattgtacatatcaagcagaaactaactggaagccaatatttaatgactcattcacatattaaaattcagaaaaaggagatggttaaagacccgtgcttctgatagcatcatgatgagatggggtacatattaacacatgtccaagccaccatcctgacaaccaagctgtctccctctttgttgtctgctttacttaactccagatataagatctagagaattgtttatatattacatgtctttctatattatctccagtgccctacccttgagcttctcaattttagaatttgatcgttcctaaaatagaatccattttataaatctgc

SEQ ID NO: 321551 - DNA, 555 bp, Homo Sapiens
ccatttaaaagtattttatttttttccagtcaaatgactagttaacaagaagagtaaacttattaaacatgctctaattataaatcactgcattaaggacaatgaaaataatcaatttcggttatacaatatatacagttgggctgcaaccaaagtaatcaggtgaatgaactgaatatcatacatctcaaaatagcatcctaagctgcatattatgttatccaccccttaacagatcacacagttactcttagtctgtgtacatgttctgagccatcatcccaaatctgatggaaaatggcatgcaaaatgccaaaatcctgcagctgcagttcatgaaacataaactttaaatataaatagatatctacaatgtttttctttctcttagtggcttttttaatttgcaaggagcaaataactaagaaaggatattagcagggtcgttaatataatttctcctctggtaagagtactattagttactgcacaatagcaccaaattgcggacgcctgggtcgacgatatcccgggaattccggagccggtaccagc

SEQ ID NO: 321552 - DNA, 1053 bp, Homo Sapiens
  misc_feature (57)..(57): n is a, c, g, or t
  misc_feature (581)..(590): n is a, c, g, or t
aaggcagcaccactggactacgggtctggtttcaacaatgatgttaaaaacagtaancctagataccccagtcggtctgaatacagttcagagctctttaattttataagctagctcaccattcaacttgcccatgagcattgcagaacagtgagaactggagcccacacaaaaaagctcagtttcagccaccgcatgccaaagtccttgactgtagaggaaatatttcagtcatccaaacctttctcagaaaatgaactcagtttccattggcacagcccttattgttagctaaaagttagtttcgggccttcaaccttttagtctgcaaggtaacgtcatattcacctgcctaaatgtgccgttttttacccataaaattgccagtccaattatgtggccatgtaaaatgtttgcacaactccactgtcattctcagagatttccattgggaagccatgcctactttatattaacacatggctaggggccaaactcagccagtgaaatggattacatatcggagtaacacatatacaatcatatttacacagatacacactcatgccacacacgaaagnnnnnnnnnngggagaaggaacaaattttggaaaacgatgccaaggatgctacactacatgaaactacatgactttttttagcaacagtaatttccaggcctttacataatattacatggttatggttcaattattagacagcccaggaagtaatcccgagccaaaacaaaggaaggttgtaaagcctcattgtagacaaggcctgagcatccacagagaagatacaatgtttatgtgaatcctggtgtgcccaagtgtgatctactctcttcactgactactctgagtgctgatgagaatatatatattatcctctgactggcttgaatagctaagacaatacagaaaggtaacagagtggtttcacaccctcatgtgcttcgaaataaaaccatgggctcattagtgggtagctcactatctgtggcaaagactagacattttatgcaaaacacaaccactgcaaaccccc

SEQ ID NO: 321553 - DNA, 1457 bp, Homo Sapiens
  misc_feature (149)..(149): n is a, c, g, or t
  misc_feature (631)..(642): n is a, c, g, or t
  misc_feature (698)..(708): n is a, c, g, or t
  misc_feature (868)..(881): n is a, c, g, or t
  misc_feature (892)..(1018): n is a, c, g, or t
cggggcggcgggcggggcgagaagtaataaccaccgcgacgttcgtatttgggcggggagcggtgtttttgagtcccattatattattttcccgagaatactggttggcgggcgtgttcgcggcgggcagaaaatacggggcgcgaatnaatttctccgcggcgggatagaggtattctgaggcggcggggcagaggcggataatagtgcggaaaaaaaaggcgggcgggggatccgggagggggaaggggaggttgtcctccccccaattttttataactattgttaggccggcgcattagccaccataatagtgtaaagcggcggcgttttggatattttaacaccccgctgttttatttgcgggcgcgcgcggggaggtgaaaaattatatttatgtagcgcgcgcacacacaggtgagagccaaacgcggtaacactgctaatttgcgccgccctctgcggccgcggttcgcccgggtatgttatccctccgcaccacctcgttgtggtgtggagggtactcctcacgggttgtcgacggaagaaacggtattaatggagagtggctcacccccttttcttctgcggagaaatctgcaaacatgcgggggcgggggttttatatgtnnnnnnnnnnnnccataggatgcgcctggtatggcggggtcccggaaaaatattcgcaaaagcgcgcnnnnnnnnnnnttttaaaacgcggagggttgtcaccgcggggggtttttttgtttggggaggaataaaaccgctgggcggaagccccggtttttttgggaaaaccggggagggccaagtcgtttttcttttgggcgccggcgccccgagagaagtttcaaaaacttttttnnnnnnnnnnnnnnccgccaaagannnnnnnnnnnnnnnnnnnnnnnnnnnnnnnnnnnnnnnnnnnnnnnnnnnnnnnnnnnnnnnnnnnnnnnnnnnnnnnnnnnnnnnnnnnnnnnnnnnnnnnnnnnnnnnnnnnnnnnnnnnnnnnaaaactgaaaatatttattagtatgaatcagtgtgtgttaaaccaaaaataacagatacaattaggcattgttgatggaaatgctttactacagaatagaatacatggcggaaaggtcctagctgactgcagcggtgtcttgtatgtgcaagaactgggtccagcccagatggaagctctttacaaaaacacgagaaaaaggagcagtttgcacaacagggcagcaccactggactacagggtctgggttttcaccaatgatgtttaaacagtaggctagatacccagtcggtctgaatacagttcagagctctttaatttataagctagctcaccatttcaactttgccattgagcattgcagaacagtgagaactgggagccccacacaaaaaagctcagtttcagccaccggcatgccaaagtccctgactgttag

SEQ ID NO: 321554 - DNA, 614 bp, Homo Sapiens
  misc_feature (542)..(559): n is a, c, g, or t
agaggtgtgagccaccgtgcccggccacaatgcccttttctaacatttccaaaccacggctgcctcccttcctctctgcttctttcaaacccactcctcctcctgccatttcagtaaatgacacccccctttttaagtcagtcagatccagggaccttgggaactcctttgtccctcccaacatcaaaagacaaaatgacttgggccaaggctggcggaagcggacgacggaaccagatctttgacttgcaatttcaaaaggcactgaatggagaaatcatgccctgcgacacgatggagagagtattccgcatttttaaaagccggagaaacccacctgggagtagaatgcagtgtctcctggcaccagatcctgaaattcacaacacacaagtgggcacatgagcggattccacttttcacccttggacctgacattcccgacagcttgccatggggattgtgaaacgctttggggggtacctgaagacacttaagtgtgaccagcaggccttcttgcactgcgtggttctactgatgcnnnnnnnnnnnnnnnnnncccttccactatttgattcctgggagcagttttctcagattcgcatttggaaggg

SEQ ID NO: 321555 - DNA, 991 bp, Homo Sapiens
  misc_feature (91)..(100): n is a, c, g, or t
agttctgttgaaaggcaaaccaccaggacctgtcaagattatctctctctctgcaccaaaactgaacatgtactgtattttaaatgaaagnnnnnnnnnngggctttactttctagcatcttaggcagaaattgtggtcaaggagggctgtatttccattctctttttagagaggcactcttaaaagatgatggatgagtaccaagaggttcatgaatatgagcttgggttgttgatttgcaataaaaggacttcttttagctgaagttcagtgtggtagagtagaaagagatagggcttttgccctagatggacaagttcaaatcctggctcagtcacttaggaaatttggctgtttgtcttgggcaagttgctcaaattctctgaacttgattttctacatctatgaaatagggatcttatctcccagattaatgtaggaatgaaaacaaaatcgtatatggtgtcaggaacatagcaggtattctgcaagagagggcaccattgactagacaagtgtccacagtgctagacggaggcgcacctgggaacagtttcctgctggtccacaattggataagtacagaaattaagagcatgggatttttgaaatattttttagcaattagacgttgtaacatccaagcatgtgatcactggactcatctcattgaaaagggtgaaggccaggttgggtgttaccaaatacaagtggtactgctacatactagccacatgcaataggaccatacatgggtctttgatgcattggaaatgtaaaaagcaaatcagaatgggactggcccttcactgtagatggtttgaggagcactggactaggtccctaaaagctggaaagaatcaaaggcagagtggcctatgtgagaatgggcacatttatcttcctgttggagtattaattacaatagtgacaataccagtagccaccactcagtgggccagagctgatgccagacatgaagctcagtcc

SEQ ID NO: 321556 - DNA, 1150 bp, Homo Sapiens
ggatagaagggggtaacaggggcgggggcgaggatgattttaaatcgtgcagcgagcgcccgtcggaagcatccgcgggtaagggaacccccaggagataccccgggggaacgcgcttgggggtgggtttcacgggagggctggttcgccacgcggggtgttttttcgtttggggaatatcccaacccggtgcttatgccccatggtcttcggggagaacacggtaggggcttttccggctcgcattggggcggcgcgccacgaaaagagggttgagcaattctttcggaggcaggggccgcccgcagatgcggctgagggtgccgggagcggatggcgtgggtgcgttcgccacacggttacttttaaaaaatagttgtacaaaacagaatgaattcttaaggcatatcagaaatgctgagtcccaggccggggccctgccccagccagggctgggactctgcagttgggagcttgtccagctgccccctgtaatgcttttctcctccaggacacagggagcctccggaagcacagtagtccccgtgtgtcaccttaggctgacctctgtccccaggggtgacgtaatgctgtcactgtcttgaattcttcatcgtttaacagggagcccagtgttttcactttgcacattgggtatctggtcttgcctgtcctaccctgaacctgggttccctgggccatgtaacacccaggcagctgtgctgcccctcgggtacttggaggagctcccaggaagtccaagcctgcgccaggaatctctggctttcaaagtcttcacaaggctggagcggctgcccctgccacccacagactccacatagctctgacaacctgctttcctgaacgcctcgttcctgggtcctttcacccaccagacctcactgtgtggcctcaactctgaggcacctgccctctgaacccccagttctacaataaacggggtggattccaaacgtcactcagctctgaccttctctgacctttattcctcattcgtctgcctgctgagctcctattcgtactccaaagcctcagctaaaatgccctttccgcaaggacgccttctctgcttcctgtctggactctcacagttgcaggtctcttcttctggttctgtgatgctggaact

SEQ ID NO: 321557 - DNA, 513 bp, Homo Sapiens
ggaaggggtacatcaggattccactcatagccctggttcgttattgttactcatggctctgacgtccccaagccctcttgaatgttgcaagcaatgttaaatatcacacctcggtctccttttgagcagcccaggttacctaaagcaaggtcaccaaacttgggtttaaacttcagttgcccatcacagcagggttcaggttatgcagtttttgcagtgtggagttgaacgctgggtaaagaagggagagctgactctccattgcttttctagtggaaaccagccagtttgacggcacggtgcggatacaggactccatcaggctagtgttggggaaccagcccggcagccttccatgtgaattccaaagctgtttcaacactggctgataggcagacaaaaggttacttgtgtgtttctctgagaagcggtgtaaatgaagtcaccttagaatatattctgtgcggatgcttatattttgttaacttcacgacttatggcatgtcttattta

SEQ ID NO: 321558 - DNA, 968 bp, Homo Sapiens
  misc_feature (581)..(615): n is a, c, g, or t
ctcgtgtcatatgtgatgaagtcctcacttgacaattccccctgcaaattgcaatgcatgtccttgccgtcacctttttctgacactttaaaattaatttgtagaaattgcaaaagcaatgaaattgtacttccaattctgaacctctgatcagattcctgctttgacacaagacttactcctctgcagtgtaccccaccagcaccagcggcttccctttctctcatattctttggccctgaaggcaccttctggattgcttaacggtgtgctctttggctgcctagacagtcaggacacttaaggccatctggacttatcactcctctcctctttcttttctatggggtaataccactttcctgcttcctttctgctgctgaatctccagacttggtgctgtcatcaggggggacagagtcgatttcggcttcgagctcctggttggtaaagctgcatcgctggacgatctttgtttcttattcgatctctcttgaccacttcttctttcttttcagttttttctgagctgcctattgattctgtactttcagccttctttcctttatcccgaagtgtgnnnnnnnnnnnnnnnnnnnnnnnnnnnnnnnnnnnaaaagtcttctctttctcatagcgctccttctgcctacggcgctcttcttcttgccgcttcagcctctctctttctcgaagtatgcgctcctgatctcgttcatattcccgttccctctccctatagtctctgccgctctcatcttcaggtctctttggtttttcatctttaagttcgctatcagaacgcttgggcaatgtacaactttgcccactggctctttcatcactgagattctctttgtccaatttcttggctttttctcttttgtccaattcttcttcatctcctttttctggcttcttgagcagcttaatctttggttcatcctttaatttgtccctttctggaa

SEQ ID NO: 321559 - DNA, 880 bp, Homo Sapiens
aaaagtgcacatattttattgaaagatatccagtttcagctttgaagatataggctcaaagtctgttcttggctcttccagaaattctgcttctagagtgttcataatttcaaccaaaacttagaaagtttttctaaatcagacttttcaacctgctgaacagaactcatgtctatacttcgatgtttattttggcagcatttgtctctgtgaagcatatcaaaatcactcaaaacatcaaaactgctgatctgatagaatgatttattttcccattacaggtaagtcatgaatggcttgttctgaggtatgtttctgagctatgaaggacacctactagaaagctccacacttgaagggttctcttaaggtggtaacattttatggctggacagtctctgcaggtaccagattccccgttgtatccaactgcatacatttacacgtgcatgcagacacagggcactctgcatggtcccctgaaccaactaagcatatgtccagcatgtccaccgtgcctgcaattatgacaccatgtaaaccagttgttaaattgggctaattttttgtccttgctcaagtccactttttcatctgatttggttcctccaggacagctagaaactggtgttcccatattaatgagacaaagcgcacatcgaggaagtggttttcgacagccaggacaacttgtgactttagatttcgttggtgagccactcacaccatactgactaaaacctctgccctgatgaggcacagctgaacagctgtaggagattgacttgccacagaaattgcaactcacaaaaacttgtgctaaaggcttggaactgggatccaacttactcctgtgaatatcaaattcagctcgtttatg

SEQ ID NO: 321560 - DNA, 885 bp, Homo Sapiens
ttactaagctaaggtgaatagcctaaagattttattttgtagttataattaaaaaccaggaaaactaaacaaaaacactgaaatgcagaaggggtatggaggaaagaaaccaaatcagtttcatcagaacagtatgaaacagcccatgctaaaagctgaattctattagtgggcctgcagggagcttggccgctagtccacagcccaccacgtggtccctgtaggtgtggtgtgttcacacctactgtgcacagtgcagaaggccactctcacagagcccagtccaggggcaagtcagcattttatcagtgaagtctgctgatttctgaggacttctacctcaggccacaaatgactactaaccactttgcctgacaaaccatattagaaaatgtctttcaaggtggtgcaggatcattcaacattgtcaaggcctatcatttttcctggcaagatatatctttcccaagatcaagtaaaccattcagaaaattcaagccaaaaccaaatgaatagatctccagcccacatctgctgctgtgacccatgaggcttctcttctgcctctgacctggaggggttctggccacggaagtaccctgaaggaggggcaggaggtgagaagatgggaaaaaagaacagtctaaaagaccaatttcagaaacaagaaggcatttgctccctggcacacatgtacacatttgaagaccagtgccaagaatataaaacttaaaaaaacatttaaggaatacatgtacatagttatcagcatgtaacatctgagaggcctgtggggaggggaactgggtgctgaggataggacaggagagagaatctcctctggtccattttttttaatattggaatcatgctaatactttacat

SEQ ID NO: 321561 - DNA, 620 bp, Homo Sapiens
attcttgacattacttttaaagtaatttaaatgactacttttaaagtaaaaggaatttccagagtaattataaatgatcaagaatgatctataaattggattaacagaccttaatctaatttatctccactttttttctgattatcaaaacttcattgtggattataaccatagctttgttctaaacacttttggtagcttactagtgatgatcatttgttacaatgagtaggagtaaagtttcctaaggaataagtagtgctactgctgagccattaaaatgataataaatgaaaactcatattcttaatagaactttaagactagaatataacttccacagaaattatataatcttattcagaagtaaagagattggaataagcaacacttgtgaacttttcacatattgtgggctcttaatgtgttattttttagcattaaataagtaattttcagcaaaaaattttaatgagatcttattttaataagatctaaaatatatacatactatatatgcacttgtgttatttgtttaattccagagattctttgaaaaccttaaccccatgggaagtgcatctgaaaaagagtttacagattatttgttcaacaagtca

SEQ ID NO: 321562 - DNA, 813 bp, Homo Sapiens
  misc_feature (72)..(72): n is a, c, g, or t
  misc_feature (76)..(76): n is a, c, g, or t
gacaagtataggatgttcataggggatttggacaaggtggtcaacctgctgctctccctctcgggcgtctanctgnttgagaatgtccttagcggccttggtgaagatgccagtaatgaagaaaggagctctctttacgagaaaaggaagatcctggctggtcagcatgaggatgcccgggagctgaaggagaacctggatcgcagggagcagttagtgctgggcatcttggccaattacctttcagaggagcagctccaggactaccagcacttcgtgaaaatgaagtccacgctcctcattgagcaacggaagctggatgacaagatcaagctgggccagggagcaggtcaagtgtctgctggagagcctgccctcagatttcattcccaaggctggggccctggctctgcccccaaacctcacgagtgagcccattcctgctgggggctgtactttcagtggtattttcccaacattaacctctccactttaacctcttctaaaatacccaaccaaaagatcactgtttctctcaacactatttaatctgaaaaatgtttcagtacaaaccactgtttgaactatctgggttattggtgtttgttcctgatgaaaggaaaaaaattctctccaggaggaagcctttttccttcttgcccttcctgattgatcttctgagagctcgaatgctgctggacacgtacccctttctattattactttgtagtagaaagaaagttaatgaaactgagaactgattggagggtgtttgatcatttagtttttaacaggctgaggcaacatggatca

SEQ ID NO: 321563 - DNA, 1178 bp, Homo Sapiens
  misc_feature (324)..(337): n is a, c, g, or t
aaaggaccatacttcctcatcctgagtcaactgctcttaacttactgacaacaggtggtgggcaataggccagctccctttcccagacctgaactggccttagtagagagagtcctggcatcaagggcctgcagtctcctggaataacagcatcaggccttcaaccagcacactgtctcacatataggcactcaaaaaatctgcttcctgaatcaatggaagtatattatttcatttgaaagcatactgcaaacttcagaggctctgtaatgggcccaggaacaggtaaaaaaaatcccattagggagaggggtaagggcaggnnnnnnnnnnnnnnaaagtacccaactcgggtacctcctttggtagacagcaggctgcagtttctgctgggccctgccttggacaccagtctcaccagcagcagcaccagggtgtctttggtgtggagggtcaggttatcacttctggatgtgctcagagccttctggggaaaaggctggtttttagatcatacagacaggacagggtaggccagaatcatttcaggctataaatagaatggcagataagccttccatgccagtgtgactcttaaaaccttcccatctggagtcctgtattttctctgcccatgctgatgtactgctcatttgtgctttagctctgcacacagcctggcctctagctagagttagaactgcaaagctgcctaaaccactgagactggcttcaaaggtcacagaacagccaaaggcagatgcttctgtttggaaaaggttctacgaccagatgacacaaacaggaagcgcactccacagcctactagtttttatgatggcaagaaatgaaagtgaccaagctagaaccccaccattcagagtcaccttaaatgtagcccatccttaccccgggtcctgagggaaaaagcaatttcaacatggagcccagtatggagagattgcaagattacctagaaagttaccaaaaggctatgctctggaatgtctttttatattccaacacttcaatgatggaatggtctcttctcattttatctaacaacagtttagttttataaagaggtatgagctacatttggctttatttcctataaatctatgaacgtcttcaggacacatgctgactttctgaggcataggtgtgggcttgggata

SEQ ID NO: 321564 - DNA, 258 bp, Homo Sapiens
gaagaagaagaagaaaaggaaaggagaaggaaagaaggaccaaacatcttttgtagaaatatgtttgctttcatcataacagcttgttatcaaggatgaatttctccctgaaattaatggaggcacagactggaaagtttaaagtggctttaagaggttattttatttattcctctgtcttaatagaagcaaattattatctctgctccttaggtagagtagctaaggctcagaaagtaggccgggcgcggtggctca

SEQ ID NO: 321565 - DNA, 1178 bp, Homo Sapiens
ggcacatcagtctctgaccaggtccagcagcctccacgtacgtcccagtccttcaacacacatttactgaatgcccactgcacacaggagtgtaggtaatagcatggtatgacagtaaaattaagtaaacaactcccacttctacctttctggactacgaagagctcctcctggtcttccttatcatttcctatgtgattacttccgggtcctcttggagaacagagcattttgcctcccatgcagttttccactgcttgacagggagaaattcctcgtgacctatggtccatcggctgatctggaagctgaacccttggaataaagacacctgcatgctcggatttgcaaaagggatgggaaagaacccttaaatatgagtaagtcgtgggagtagatatgaaacagggttataagcacatctcagtgtctaattttacagaataaatacttctattctatcgcagctcacatgtaaatccaggtaggtatgtccctatcccacttagaataaaatgaacagccaagtggccaaagtttccataactttcctccttgctgacaaatccaacccgaagtctgtgcctcctagggaaaggacaggacaaaggtacaattcagttcctaaagttatttctccctctggggagagaaaggcactgtcaaagtacaaacccaagtcagcgtgctttgaaagatcatgtcacttgtttgtaataggaaatcatgtcatccagagttttgaaagtaactgtgggggcttgtggtgggttgtcgggggcaggagtgggtgacgtatgttcagggctaggtccgtggctctggtcagggcactgccctgggtcactctgtgctggcccaggtctgctccatgcctggctgctggaaaaaccagttctcttctgacccacaaagtaatctgacggcggggcaaactcaggatctctctcagcccggagatctgactgcctcttcgaccagtatccaaaggaaaattcttttccgcggtcccactcccggatgtgtggcactccaggcttggtgtccttcctctcctggacaatgacttctactttgctactctgggcagcaggacgtggggttggcacagcctctggctccggtgggcaaggcccaataacatctccatctctattttcttcttctgttccaccttc

SEQ ID NO: 321566 - DNA, 808 bp, Homo Sapiens
  misc_feature (668)..(668): n is a, c, g, or t
cacttgttattaaggtttattataaacatgcaaaattcattgcatgatgcatttgcaaaacgtattaaaatccttctattaacaaaacatctttgagctgttaggcatccgggtttcctgattctacagctccaggcctgtcattcaacgtgaactagaaatgggaaccaaaaccatattctttttatccctaagtggacatccagggctagagaagggaggaaaatcaatcggtagaggctgatgctagagtcagcacttccattaagttactgtacatcgtactttcataagcgacactgcagcctattaaataaataagcacaaaaggggagagggcgtacacttcagcttcttgagaaggataacaaggtaggcagcaaaatgttggtgtgtgtgggggtgggtgttggcgaacaacactggtgagtagtggcatgattactgatggcaccctggatggaaaaataatctcccagagattaaaatgaacatatgtacacactggcttatccttgatctgaaatgatttcacacgcttgttcagcaacgtccttagacgatttggcctcttacaaagaatgaaaagtatcaagacagttatcaaccaaggagggtaccagatgacagattcacccaacactcatctgaggttttttttgtttaanctggtaactgctggaccatggttgggttaggatttgtcaatgtttgggaacagtgattaggtttatcccggcctttcagattctaggggctgtttccatggaggcagagaatggacgcagtcggtattttgaggcctccc

SEQ ID NO: 321567 - DNA, 803 bp, Homo Sapiens
ttttgcagtaagtaactcagaatgactttactcaggaaatatgaccatgactcactggctaggagtgccccatgcccagttcttagagacccttgatagctcctagaagacaggaggctgccgtggtcaagaagggccaagccttgaagtctcacggcaccccctgtggtggaggtataaggctcaggggccaactactgggtcttgcagtccccatcgttgctgtgggctgtcttcaccttctttagttccttctgtagctcagactcggccaccacaacctcctttggcttctggtaagagatgatcagggtgcagttggcgtgggcaaagctcagcaaggcgtcatccagaggtagctggtgtctatctagatcaggaatggagaacttcttgtagtacttcttgttggttgttctgacaatgatgcagcgctccttctggtccacagagacactatagacatccttaggataggggaggtttcgaatccgccactggaaactcatcttggtgtccttgcgcatgaagataggattggcattgctttccttgatgagttcaggccccaggttccctgctcctaggggcgctgggtctcctacttcaagctgccactggcccatggctcccagggcacttttcacacgccactttctcacaagtagttcactcgtcttctcgtcatattcttcagccatttccttgccgtctgggaataaatagtgaaccttccttctcccgtcctgcagcagcgcagtcttctgggctgtccgcagactctccaaccagcccgtcaccgc

SEQ ID NO: 321568 - DNA, 292 bp, Homo Sapiens
tgagccaccatgcctggccaccatatgtttttaagtataggttggatgataatttgttgggaataccatagaagggatgatgaaatttaggctggagatgatcaccaaggtactttctatctctaagatcctgcaacccttgaaagacactctatttgacagtttcatgaataaaggcagtgacaatgaacaaattcataaattacggtgttatattacataaagcttagtttcttattaaaattggcaaaacttgtcaattggcatgaaatgtaatgctgttaaaatatac

SEQ ID NO: 321569 - DNA, 192 bp, Homo Sapiens
atttgaccaaagtcggtgctgcacttgacgcagtgtgttttaggtgtttgtctttgtacttttttgtgatttttgaatgcacgtgcgcaggaagggctcctcttagagaagcagtcaaactgtgaagcactaagctgaccctgcttcaagcaattttgtttttacaactgttcctttcacaagcaagcctta

SEQ ID NO: 321570 - DNA, 825 bp, Homo Sapiens
ataaatttagaattataccgcaggtcttcctggttctattgaggaattatacctagaaaataaccaaattgaagaaataactgaaatttgtttcaatcataccagaaagatcaatgtcattgtactacgttataacaaaattgaagaaaataggattgctcctttagcctggataaatcaagaaaatctagaatccattgatctctcctacaacaagctctatcacgtcccgtcctatctacccaagtccttgctgcacctagtactccttgggaaccagattgaacggatccctggctatgtgtttggccacatggaaccaggcctggaatacttgtacctgtcatttaacaaacttgctgatgatggcatggaccgtgtctccttctatggggcatatcattctctgagagaattatttctggatcacaatgacttaaaatctataccacctgggatacaagaaatgaaagcactacattttctgaggctgaacaacaacaagatacggaacattcttccagaagaaatttgcaatgctgaagaggatgatgactcaaatctggaacatcttcatcttgaaaacaattatattaaaattagagaaataccatcttacacattttcatgcataagatcatactcaagtatcgttcttaaaccacaaaacatcaagtaattccaagttttcctttgctgtttataaactttactcatgtatttgtagtagctgcatttgtcattaataagagagacataatcctcctgttatactcagtatcattatatgctagtcaacctgattcactaacacacagatgaaca

SEQ ID NO: 321571 - DNA, 976 bp, Homo Sapiens
  misc_feature (778)..(877): n is a, c, g, or t
tctgacatttcccttaaatgttaagttgaagcctgatctacactgctgtgtcctgtgaaatgaacctaattttccgagtgaataggaacgcctgagtggccatttagagtgctgcattttccttccctcatgattcctgctgggtcctcttcgctgaggcttttccctgagtcatatatttactggaaaggctacctgaagagcctttaaactgtgggcattcctttttaatgtgcccttctcttccacaaataaaacaacgtttttctcttaagtctttgtcatcctgtctcttccatttttctactggtggcctgaggatcttctccctccccaggtcagcagctgcccgcattggcttggctttctgaggtgtgcactgtatgggcttatcttcttttgttgacacctccctttctgtgtacttgttgtgaatttctttgtcctctttgcttcttttttccttgttctcagggtatctttggttcagggcatcttcctgatctcgccgccgtcttacttttctcctcataggacagtccttcatgaagtgtccgatttttccacaaattcgacaacatctatcatttggggccagctctccttcagttaacacatctggatcaaaaaagtattccatttttgaggggtagtcctttggaaatcccttgacaggaataccaaatactcttctaccattgataaaagccttcattataaaatttgtcattttccttgataatccagctccaagattatgattcaaatcaaagggatnnnnnnnnnnnnnnnnnnnnnnnnnnnnnnnnnnnnnnnnnnnnnnnnnnnnnnnnnnnnnnnnnnnnnnnnnnnnnnnnnnnnnnnnnnnnnnnnnnnntcaataacaatgtattttgaggtccactgtttcttaaaagttgtaagcagactttttctcctgatgctaataacatgttctttaaaatcaaattcctct

SEQ ID NO: 321572 - DNA, 610 bp, Homo Sapiens
  misc_feature (50)..(51): n is a, c, g, or t
tttcagatatattgctcctttgtccacacaatatactgagtggagcttcnntcacaccaacagacagtctctctgtgaaagtttgaaaacagggctactgctttcaatttaaagtaggaacaaaaagtgctaatttcttttttaggaatgtctaaatcagattgtatgtttggatcgccctcacctgtcccattgaaaccaactggtttatttgttcaggtaaacctagctcaaacggagaaggaggcgtgtctgtcatctgttcactcaggagctgctccctgagtgctctcagctctgcaccatgtccttgcgctgtgctggcagtgtgggccctccttcctctggctgacctgcagcactcctgtctgtcctgcgcgggtgtggtgcgtggtgaggcttactgggcaccggatggcggggccttgtttcagaactcctgcccatggtcttgcttttcagttaacttgcaaaattctgccacccacatgccttatttcagctctccttggatatggtttcggttttaaggctgtttcagatgctcttcctttcgattttgtaaaccagtctatttcattttttaggcagtgcttttacatgaagacaa

SEQ ID NO: 321573 - DNA, 999 bp, Homo Sapiens
gcacagacaccgcacatgcacacaccacattatacccccccaccacaaatgggtgtaccccctctccccccacatactcactggtgcacatatacacgccacaccacattctgtagtggggaaaggatcatgtacagccttaagggctggtttgcgtaacgggtgcatatttctgctagtgtttttgttcttgcagtcaggactggccgttgtctgaaagcaaacctcaaggacaggacttctggactccgcagccactccaggctgctgctccatcgcattaattccagcaggtggcgctgcaccccgcgcggacccggcttgcctcccggccccagggaggtcggttgatgagcagtcgggaagtgggtctgcgcgcaccccgctgcagctgtggcaaacgcaaacgatgacacacaggcttgacgagggcctttgtcagaagcaatggggatctggcgtcaccgcacaatggaaaacaaagtgcttctgcctggctggccagaatgcacgtttgctcactattgatgctggggcatttacaggcagaatgagttcatgtgaaatttcaggatctgccatgactcagattcactttctgtaaaccagagtcaacattacatttccctttactctgggccattccttgaatttttaggtcaccagttgtttttgtactaactgaagggatttgagtatttcacaagcaccttatttttattagcatttttagggcattaccaatttgggacggatctgtagtgtgagagattgttgtcactcttagctccaaacataggttgactttatatattatttacatgttcagaattatactgtgtagaaattcaaatgaaacttgcaaaatacttttctggcaggaagccctggagaggatcgttcatggaaacaaggatgacgactggggtaagaaatgcaggtgactcgtgagtggtcagggagtggaagagaagacggctggaaggttttagcattctg

SEQ ID NO: 321574 - DNA, 804 bp, Homo Sapiens
caagatgattttaaattgcaccccctaaaaatcctttttaatagttatacatttaatacatattaaaatataactaatagaacacaaatattattgcttatgagttttccagtttagttttttaaaaaaaattctaagtgaatgaaagtacgggttttagttggaagtagcaaaaatcgtgagggtgatttgggaaacactgctatctgggaaacactgaactctgaagtgcaatactcttttgagcccagtgactacagcatgccagacccctaaatcaggacctggggaggagccatggagttaacatttcagactgagtggtggcgagaaaacgcaaagggaaagacttgaaactctagcaacattataataaaagtagaaactcttatgtgctgaggcgatgatgaagagagtttagagaagcttgtgagaaagccacatcacctccattcagatatgtttgcaatcctttttcaaggctgccttattagtcagggttctccagagactcaaaacaaatcagatctgtttgtttagctggtgtatttgcctgtctttcaggtctgccattatggtccctggactcctcaagccaggccaagcatcctggccttctgtggtccttgatggagacctatgttgcaggttttttttgtgtaataaataatgctgctaccttagaatatcaacagtatcttatttctctaagcacgtggttcaatttctggtactcgttgagccttactattgagtaaattctcctgctagactgagttttttgagaatggggaccttgttcat

SEQ ID NO: 321575 - DNA, 802 bp, Homo Sapiens
  misc_feature (671)..(688): n is a, c, g, or t
tctaaaagaggcctctgcccctttagaaaaatgaaatgaggggagacagcccacggtgggggttttaattggaagaagtcctcggccagaaacagtcctgaatgttgaacctctgcctttcaggagagaggtctgaattttatcatctgtggggtgggatgaaggtgggggactgagctggaggtctttaggcttggtcaggtgacaacacaaatcaaggtgtcgctcaggttccatagctgtggatggcttttagggtgtcagatgtctggggagacggagggaacagagcactgcgaaagatactttattcccacctacaccctgaataaatatgctggaagtattcagcttcaggtcatgaattcgacctgctgtagaggtgtaggttttttcaggttctctcatcagcaacccaccggaaggtaagtgtggggaatgcaccagttagttcccactgtccgggctgatggagctctgacattacctcgtcctggcagatgggcttggctttggcccacagcagtcccttttttaaaagttaaggtcatctctgttccctccctctcctcacgcatcatatcctgagccacagtactgggtgtttttgttttaaagtttccctccacttggatggaagatcatattcttttagagatttctctttgtannnnnnnnnnnnnnnnnngccattaaagaaaatttcttaggcaaaggtaacaacaggagtttctgggctgcatgacgttgtctggtttctaaattcagctctcgcaatctaggtggtcttaattccaggttg

SEQ ID NO: 321576 - DNA, 411 bp, Homo Sapiens
ttttccggaacccccggataccgttcaccttaatgccccctgatttttttggtccccgtatcctaatgggataaaatgaaagggaaagaaagtaataaagatataaaatcaaaaaattatcctgggacctcatggaccacaagtctctcccataaaaagggcccagaagagaagtggaaaatagacccatactgggcacattattgtaaaacttcacaacacccagggttgagaaaatcctcaaaccatggtgcgtagagtgcggagaaaaggaatcagaatgatgttgacattctcaacagcaagtccaaaaactagaaggtcatgaagcgatgtctcagcatcctgaaggaaaactattttagtaccaatgcagtccagggggagggcagagtgagacattttccaatt

SEQ ID NO: 321577 - DNA, 762 bp, Homo Sapiens
  misc_feature (612)..(687): n is a, c, g, or t
aattggaaaatgtctcactctgccctccccctggactgcattggtactaaaatagttttccttcaggatgctgagacatcgcttcatgaccttctagtttttggacttgctgttgagaatgtcaacatcattctgattccttttctccgcactctacgcaccatggtttgaggattttctcaaccctggtgttgtgaagttttacaataatgtgcccagtatggtctattttccacttctcttctggccctttttatggagagacttgtgtccatgagtcccagataattttttgattttatatctttattactttctttcctttcattttatcccattagatacgggacaaaaaaatcagggcattaagtgaacgctatcctggcctccggaaaccctcgtcccctccagcgtcactaggtgtatgcattcgaagtagcacatttgaggattatttggggaatctggataacgttagagaaagatctctaaggtcagatgcttggggaggggtgtaccccacagcaatgggagtgtctcctagctcagcctgatgccaacaaacaagtgcctcatgtagctcagagcagatctggctgctaaatcactgtnnnnnnnnnnnnnnnnnnnnnnnnnnnnnnnnnnnnnnnnnnnnnnnnnnnnnnnnnnnnnnnnnnnnnnnnnnnngggtggctgggctgaagaccaagggctgacctgctgcccttgctccgagagcctgaccagctagctgcctcttga

SEQ ID NO: 321578 - DNA, 429 bp, Homo Sapiens
  misc_feature (396)..(396): n is a, c, g, or t
  misc_feature (411)..(411): n is a, c, g, or t
ctcaagcgggtttttggaaaaatttatggtctccattaaaatacatattacaactggggtagattatttgtggtccaggtgtctgtgatttaactttgcgttttgctatctgatttttatttttcacagggctaagcatgagctttcattctcactcactcttaatttgtcgtgcgtcactacacatgcacgtgttgcagtccctgaggccctgtgtgttatctgtgatggagtgtgaatgtgtaacgggcactgtgttacactctcaggtgttggcggggcggtcgcagatttcagggtcccctaacggaaaggccagggtccgcgtgggacgggccaactccctgcccgctcctttcagcaggtgactgtcttctggccacttcttaacctggntgaagggatcttggntcagtaggctgggaagga

SEQ ID NO: 321579 - DNA, 614 bp, Homo Sapiens
  misc_feature (55)..(63): n is a, c, g, or t
  misc_feature (180)..(195): n is a, c, g, or t
  misc_feature (284)..(325): n is a, c, g, or t
ctaaatgtaaaatgaattttgagatatttgttttacatgacaatgaacctgtccnnnnnnnnntgcaaatttacccaaacggtgctagtttattatttacaaaaatgctcttatctgccataagtatttgggaaaaaactgttttacactcaggaacactaatgaaataccttaacgacnnnnnnnnnnnnnnnntcttccctaccctcaatgaccaccactcgagaaaagttacagaatgcattaaaaatgaatatatgcggaaacaaacataattatttccnnnnnnnnnnnnnnnnnnnnnnnnnnnnnnnnnnnnnnnnnnaatacagtgttgtgcaaaatcaacttaatgtttatttaaggtcaacagccttggtgacaaggaagataatgaatatggcttcagtaaagtttgcaagtaaatatcacaaatgttaattcttttgctagctaaccagctatcctgagtatggaatacgtattatttagatagctaaaaggttataaacaaaatggaggggtagggagggggaagcactgtagcagattccactgaggtaccttagtttttatgtaaaggtctggtatactcatttaataatttacataac

SEQ ID NO: 321580 - DNA, 1023 bp, Homo Sapiens
ggtacggcccggaattccgggatatcgtcgacccacgcgtcccgagaagaatggagaagggggcagccaagaagaacttctgggttcagggtactgtttatttgctccttctcttcatgcctgtggctggatgtcccacaacactataagaaatataagtcaagccctttgtgttaagcaagaactacagactccatcttttcacccaaatcatgaatgaccaataaaaagcaagttattccagaggaagaagcagcccttgaaatgttaaggcttaggcttgaaaggtgaagagcaggaattctctctttcaaatcctagagcataaacccatgtgtggccaagtgagatcagccctcaagggcacatgccaagggcagagcagcccatgtagacagcttcggagggcatgggggtgtagggagttcggggtagctcctcattaactatttgttgggtgagtaaaggggtgaggctcagtggcaggtacctctgcaatgacaagctgcctcccctctatgtgtttagcatatgttattagaacatgtccgacacccctaccgctgccatttgggccctttaataaagccaagtagagaaatctggcaataaaaggcaaatgtaagcatgctttctttaagaccgcattcataaactggtcatcttctaagtgactggcacgcagtttgaccagacgatacacctttgctacgaaacccttagaatgctggtggtgcggtggctacaacctgtattccaggccttggaaggctagcagcagcattgctagagccgggacttcgaggaccgcagggcaacgttggaagagcccatctctacaacaaacactcgaagcttgccagcgcgcggggggcccacaaccaaacaccgggaagccagggggacacaactgcgcccaagacgaggcccacaaccaccacccctcgcgcacagaacgcgcaaaataaaccaccaccaccgtgcaccagctgagccccgagagcacgcaccatcgcacccacg

SEQ ID NO: 321581 - DNA, 1094 bp, Homo Sapiens
gctcatcatacacatgagaactcatacaggagagaaaccctatgaatgtactgagtgcgggaaaactttcagccagaggtcaactcttagattacacttgcgaatccacacaggagagaaaccatatgagtgttccgaatgtgggaaggcctttagcaggaagtcccgactcagtgtccatcagagagttcacatcggggagaaaccctgaaactccagccaggtcttactgtggaaaactcctgccagaactcttcaagcgggtgaaaaacctcatgacagtattgagggaacatgggaattcatactgagatgcaatctctcaactcaaaaatgtattaaaaataggatcccatgagaacattatactggaagttacatgtgatacccagctaaagaatacatatcagaatatatccagttgtaaatagccatacccagttgtactacaatgagctttttaaaatcttgaatgaattgagtattctagacagcagcataagaaatatacaaacagtatcctatgaatttagtggttttatgtggatatgccacaaaacacaagtggtatgctttagatctgcacatgtgaatttagcataatcactgggaatttgaaattcttgtcctctgtgataattaggacataacaagattttccatactaaacatcacatgtgtttttcagtatctctgcgaatccagtatgcattccaaatgaaatgtgtaacatttaaagtagcatggaacctacgtctttccctactgcttgctggcatatatcagttggtatgaacattgttcttgagctgcctcttaggaaacagaagacagtgttgaagttttccctgcttctggtttgctgaagattttctagactgcttctggtttgctgaagattttctagaagcactatttacacaaatatgcaaatgtgaaataaccgatctataacgtgaaggaggcagacatgagctgtactactcagtatgcaccacagaataagagtttgccgtgtaaagacaatatccccattcgtcatgctcttattttcccgtgggatatttgcatacaaatgcatgtctgttaccaaa

SEQ ID NO: 321582 - DNA, 1046 bp, Homo Sapiens
  misc_feature (1008)..(1008): n is a, c, g, or t
gattcacaacagaggtttatgtttgaggtgatcaccactaatacacactttgaaaagtaccatcaccatatatatatttgctttaaaaaaattatgacaagcttcaggtaaaaataatttttaaagggtccatttttcatttacgtacaatcagtacatcttatttacatatatgactggatctttattctattttcttcatataagatattttaactggtaggtaactgctctattctgtttttatagaaagactaaacaccttatttacaggcagttttgatgatgctagtttgtctccaaattacgtactgaatatagttaaaatcttaatgaataacataaaaattaagatccggtattaacagactattttatgggtcacactggatattcaaggagtcagctgcctagtgtgtgtcaattacagctgcaacaaaacagaaatcaagtgtggttctgaagaccttgaaaaagaagtctgacttctaagacattaaccactgcttaatactgctactgatggcaaattcttaaactgggttcatttcttcccttgtaataacactgatttttctagtgatatttaactttaaaaaggtattttacttctttaaccctcagagaactagtatatttcggcaactaaccaaaaaaataatcagacacatgtatctttgcccatagtttccaaagggttaaagtgcaggaattttctatactgctatataaggcaccttattccacttttttcttaaaggaaactttttctttggtttcttgtaacttttcagtgagtctatcttttgtttcttccattttctctgtgataagctcctttgtctcttccatcctgtcctgcagatactccttgacgggtggcggcgtggacatgtagccatgactgcgcagatacttcacagtgacagatgttcctcccaaagtcacggtataccgagcaggtgttgcaatcttaaacaaggcatatgctgtgagggcatttccacnctgggagtttttcaggatgcctcgtgccgaattactgg

SEQ ID NO: 321583 - DNA, 730 bp, Homo Sapiens
  misc_feature (36)..(36): n is a, c, g, or t
  misc_feature (70)..(70): n is a, c, g, or t
aacattaaaataacatacaaaacactaaataaaatnacccctgaataaaaccaaagtgccatatgccccngaacagtattgcaaccttcccccaagttcgccgtgtcgctcgcatggcctcgtcaaagttggaagttaacagtcgtgagattagtacgcaggtgcacaccagttatttacagaaacgcggtcagagccgcgggagtaggggccggccgcccggcaggggtgcggtgtgaacagaggcggtggctggggtggaggggcggggaggagtgctacatggatcgcggctcaggggccaggggtcgccccctgggtgtaaggccgcgctgtggagcaccctcgggggctccatgcaacagtcagcgccgactggccagtggggcatcagggcagactccagtccgcggagacggacggtgcgcaccgctcagcccaaggagagaagccgtctgcacttggaaacctcaaccttggcaaaaggtggatgaacgcaccggctcccctacaccttccctgccttctactggcccacgttccccctctgaagctggagttggcagccaatcccgttacctttcaactttaaggcatcttctacatagtttttctaagcaaaaaagcaataaaaattgaggtaattctgtagtggttcacacgcgtgggcgaggcacgcgcgcaccagacggccactctctctctcagccctgcggcgggggagcggcgg

SEQ ID NO: 321584 - DNA, 607 bp, Homo Sapiens
tttttttctcattgtttaggattttctttttattatcaaatctctgctatagaaacactgaagaaaatgggaaaaaaaatcactggagaggcagcataaaatggtggctgaaaacaagaactctggagccaatctcagctctactcccttactagttgtgccccttaggtaggatccttcaacatctctgcttcagcttagccatttgtaaaactggggtaacagtacctatctcagagtaaaggggactaaacaagttaacacttggaaagcatttaaaagaaagcccagcacataagtgttatatgtatttgtaaaactttttaaaaatctcaactgggttaacttttccatggatctttcaggtccttacccatatacatttttttagatgtgttacagtaagtatgtatatacaattctgtatcctttttattccttcatgttatgtatactgatgcagtgtccataattataatttatagtgattgcctaaaacaaattacaaactaattgcccaacaatgcagtgatgagtaacaatggacgctgacacactgggctaaggatcactttctgtccagcaacatcagtctcacactcctagg

SEQ ID NO: 321585 - DNA, 649 bp, Homo Sapiens
  misc_feature (104)..(166): n is a, c, g, or t
aacttcttcaaaaataactatttttgacatgccagtgagagacataaaggtggtggttaacaatgaaggctcgaagtagttaaacttggtttctattccactgnnnnnnnnnnnnnnnnnnnnnnnnnnnnnnnnnnnnnnnnnnnnnnnnnnnnnnnnnnnnnnntcctaaaataaggatacttcatagaactaagaagaaattatcttcagagagtttaaatcagctcctgtcacatagtaaagcacttttaagaggtgggaacaacatattcatctagcagatctttatcgagcagctgttgtctgcagatgatatgctgagagctgggagtacagaatgttgtcccccattccctgctcccgagtaacttagtctgatgggatagacagataagtaaaataataaataataatagcaatgatagcttctgtttattgactacctactatgtttcaatcgcaatataatatctatttctattaattcaactacttcatgaaatgtaagtgttgtccctatttttcaaatgaggaaaccaaggctctaagaagttaagtaatttgtccaagattgcatagctaatagaaaacccaggatttgatccccaatctgcctaacaccaaagtcttccttaacccattcttc

SEQ ID NO: 321586 - DNA, 1028 bp, Homo Sapiens
  misc_feature (870)..(932): n is a, c, g, or t
aatcattttagaatgttctttattctgacagttgttggacaaatataaggcatgttcacaagtatctgaagttatgtacaaaacacactcattcaacggatgttcctcttctccttttgtacttgctgctgcaaactgatcctcatgcacgttaacacccatagcgctcaattcttatggatatgcagacagtgttttggggaccaccgtggagaatctgtttcaaactaaggcgtgagcttctaagaactaagtcactaagacatcagaactcacagtgaacaaaggcagaggaaggtgaccaaatcagctcataaactcatgactctaagtttccagtggaacaaagaacacattgaaaaacattttttgatccttcatgttggagagaaatggaatgtgaccagaattcatggttctatatttaccactgtctaaaagtcacaaaacaatatctaattttttcatggtttctaatgcagttacagttttgttcttaggtcacagtacaagactgcatgcatactttacacaaatatcaaacacagaacgattgtaacacagatacctcagggttgtctaaagacacagcttctctttttgtggtggggtggggaaggagaatggtggtggccatttccacacacagcctgttgtgtgctcagcacggctggatgcggatcccaagcactcgctgactgactcacagaagaggacagaagctgctgaggagcgcagcggagttcaaagagcaggctccaaccgggggctgggatgacggacacacagcctcgattccagggggaaaaagtcttagtcgatactaattaaaaagtgttaatgatttttgaaaatcagattacatctatnnnnnnnnnnnnnnnnnnnnnnnnnnnnnnnnnnnnnnnnnnnnnnnnnnnnnnnnnnnnnnntgcagatgggatttcacaaagaggagatttgaatcttttggtctaaatcagccaatattttaacattaactataaattattaaaatatagtttgct

SEQ ID NO: 321587 - DNA, 535 bp, Homo Sapiens
  misc_feature (390)..(390): n is a, c, g, or t
  misc_feature (517)..(517): n is a, c, g, or t
gcataagcaaactatattttaataatttatagttaatgttaaaatattggctgatttagaccaaaagattcaaatctcctctttgtgaaatcccatctgcatttgattttttattattttatgttcccccgttagattgttttaagtgtttgcttttcatcttttatagatgtaatctgattttcaaaaatcattaacactttttaattagtatcgactaaggactttttccccctggaatcgagggctgtgtgtccgtcatcccagcccccggttgggagcctgctctttggaactccgctggccttccttaggcagcttctgtcctctttctgtggagtcagtcagcgagtgcttggggatccgcatccagccgtgctgaggcacagnaacagggctgtgtgtgggaaatgggccaccaccatttctcctttccccaccccaccacaaaaagaggaagctgtgtctttaggacaaccctgaggtatctgtgtttacaatcgttctgtgtttgatntttgtgtaaagtatggca

SEQ ID NO: 321588 - DNA, 845 bp, Homo Sapiens
  misc_feature (43)..(43): n is a, c, g, or t
  misc_feature (66)..(66): n is a, c, g, or t
  misc_feature (80)..(80): n is a, c, g, or t
aacagcaacccttaagcccaaaaaagggtttccccaagccctncctgccctaggccccgggcttcnccctcgttaggttnccccaggaataaaattgaagttccccattggcagcacttgcaggtattgcctagtcccacggcaagatctgtccttagggattttctggtacagccgtgaagagaaagtgagggttttccacataatccgggatttcttggcaatgcccaaagactttctgggccttctaagagcaacagtggatcaagctggtaacccccatcaacactcagaaaagcagcatgggtattttagatgggggacaggaggagataaatcaatggattgacagtctttatcttagtaccataaataaagtgcaccatgaatggaggctataagccactcgcctgaggctgaggtatgggtagaaactaccatcaccaccctcagggtggcggatcatttccttcagccagaatcctggctgctgagactgtctttattgctttatttccttagtactatggaacttttagctataaaggaaatacttggtgggcttggcagagagcgtgtcacaaaattacaggaactggctgatattcgatgactatacacgacaatctcaataatgttggatgatggctgtttttccccttcattctgatgaacttaggaaaactcaagttatttttaaaacacctatcaaattggctcatgatgcttctcttccaaagcaggatagctgtttatggccgacgtagtagaaatggttgtctttgtttacagtttttcagatgcattaggaagaaaatcctcttactaccacatttcaggagact

SEQ ID NO: 321589 - DNA, 499 bp, Homo Sapiens
  misc_feature (402)..(422): n is a, c, g, or t
cattcaacaaaatttatcgaaagcacccattctagatgctgatatttactgataaattagacatagatcatcgtccacatgaagactgtagagatcatctggtcattcgatgaagactgcttaccatggcagcctgacttggtcttggccctttcttccaaagcagtagatggtttgattgtaacactgatatacaggtgttatgctttccctgtcgaaattttctctgggtatagaactctaggttgcattctactcccttcctaaacagcacacttaggatatcatttcattgactccagatttcatttgttatttggaaatagcactcttttgaggatagtttctttacgtctttcttgtctttgttttctgcacagtttcactatgtctatatagagnnnnnnnnnnnnnnnnnnnnnacacatttactctgcatgggatttgaatttcttaaatctaaggatggtgggctttcatcaatcctagaaaattgtgt

SEQ ID NO: 321590 - DNA, 496 bp, Homo Sapiens
agggctgattttaccttcctgtccctcatgaaagaacgggctggaggacgggaataggacctgggccagccactctccaaggacacaagctggatccagacaggaagcagcggcaagtagattgcttctccccaagataggtttgtttcacaaatatatttaatacaaaatggcagcagccactgtgcagttataacaaaattagccatagggtatctggagaaatgtacacaggcagcctcagctggagtcatgcgagccaactccggcctgctcgggtagggcctgtgcctgctgcccagtcagctgtgggtggtcacacggccaggactggatggtgcccgtggcagggcggtgcacaagggctcagaggtgctgtacaggaggagccagtcttccaacagtacacaaaagcacgctgtcctctgctctgcccccctgcggactcagcagcatgtgtgttcatttattttattattattttttgagacagagt

SEQ ID NO: 321591 - DNA, 510 bp, Homo Sapiens
tgtggaaagaggccaagggtggatttaacccagtttcttcagtgtgtccagcagtttctgtggggtgaggatgtgtgtggatcctggaggaggcagagaagacagtgagcttgccagttctggtttccaacacttcctttcctgcgcttctcgattcccagatctgcacccacccccctccccaaccctggtctgggtatagtggaagcagggaggggagtcagaattggggttggggtcccgtcgcaataggcctgggagatatttgggggctgtggataaacaaaacacatcctctggctcaggcagggtcccaggctgcaccaaggaacgagctgcctcaccatcagggtgcagagccatctgcaggtgatgggcagctgcgtttctaattcactcttaaactccaggtgaagccagggagagaaattccaaacatggcaaggcagggaaaggctgaaaatggggccagagttggtagggggaccatgtgtggaaagcatggtgcct

SEQ ID NO: 321592 - DNA, 771 bp, Homo Sapiens
ggtttggcttcctttattacctttttgcttttgagatacaaaccaacctctcataccacacaaagaacatccattcttgggatttttaaagtgcatttccccttgaactctgtgtacaaaaatatttatcttttaaaacatgcaaaaatttcttgacaaggcacttttaggtttaaaatgaagatgagtccttggttctacattcacactgaagtaatagtgaaacatcatcacagctgcactctcaaagccctcagaggtccagcagtctctaaaaactcgtcaacaagactaaaaacattcacggctttacaatgtgggttacagagctttacaaccatgaccaggaaaaactgctcgtaacaacagctgtccttcccagttccacatgtgttgtctcactgcaggaaattaagataagctgccaaattgtctttgtgtgaccctataagatcccatcatccatgtaacttcttgtctccgatttcagtgaacatgtcaggagagacgtgatcgggactctcccaggactacattcaggtgagaaattttagaagaggaaacaaataaaaggcaaccaaggttttcatcccctatccattgagagggaagatccagaaaatgggcagttccaaaaaaggaacacttttttgattgataagcatatatggcccatttaatgtccatgactacaactaatgccttttttcaaaaagaaaatggtttgaaaagatcaaaaccacggagcaatctcctaacagttccaaattt

SEQ ID NO: 321593 - DNA, 464 bp, Homo Sapiens
attctttgatcttccttgtaggttgggataattcttcactattccacccttgccacagtactatgggtaggagtgacagctcgaaatatctacaaacaagtcactaaaaaagctaaaagatgccaggatcctgatgaaccaccacctccaccaagaccaatgctcagattttacctgattggtggtggtatccccatcattgtttgcggcataactgcagcagcgaacattaagaattacggcagtcggccaaacgcaccctattgctggatggcatgggaaccctccttgggagccttctatgggccagccagcttcatcatttttgtaaactgcatgtactttctgagcatatttattcagttgaaaagacaccctgagcgcaaatatgagcttaaggagcccacggaggagcaacagagattggcagccaatgaaaatggcgaaataaatcatcaggattc

SEQ ID NO: 321594 - DNA, 837 bp, Homo Sapiens
  misc_feature (679)..(679): n is a, c, g, or t
ttttttatgtattttgaaaagtatttacttagtttaaataaattaattgcaaataaaaattaagctacaatactatagcctgaataaaaatgactagaacaaatacaacacaggacttgctttcttgcattagtcacaaagcatgtgacaatctagaaaacttcaaaatcaattacattttctttgaaaaaggggtaacagcagttactgatacatcacaactaataaacttataatacaagtttcctgacatgcatttcctgagtgaacccaaatgatcatttttttaaaacaaggatgtttcgacagttgaagtaaaataaaataattcatggcttctaagcaacaagttttgttttttaaaaaccaaaagaaaattcagaacagttttgtaataggataaattaaaggtatgctaccacatataaaactttgctacagtcagttaagtattatacaacttttcaaacttaaaggaaaacaaatcaaaatattaaaagaagatactgtctaatctaaaagtgtactggtttctacaagtgtcaaaaaaagatttgatgtagtgcaactgtctatacttgtggtgcctttgaaaaaagggtgggaaggaggggagagaagaaacttttcttgcttctggaagcaaaagacatattggaattagagaataaacagaccnatgcagtgcgtcactccacgctgcagtcattggtgctcatctgccaaccaaacatttccttaagtctcactgtggcaatctccttaggattcaaacccagagttaaggctggtctgctaaaaacgggggcactattgtcattcaaccctttagatctc

SEQ ID NO: 321595 - DNA, 1021 bp, Homo Sapiens
  misc_feature (383)..(394): n is a, c, g, or t
  misc_feature (434)..(508): n is a, c, g, or t
  misc_feature (806)..(878): n is a, c, g, or t
  misc_feature (898)..(898): n is a, c, g, or t
tttggtcaacagccgtttttctagttccaagttttaaatacatggaaggaagtccgggagaaccatatgaaggagcaggaggagaggaagaaactttttttccttcttttccaggagtagctggaaattaagatcgggttccttttctgccagcttggaagggcaaccccatgactgattgcgattctgaggatgtctatgcaaagttggattcttgttacagtgtatccaatctgaagtattgcacatctgaactggggactgttaacactgatgccaatacagtgtggggtgccagaaagtgtctgctgatatttgtggaaaaaaaatctattttgtttacctactgtatcaaaggggagtctgggggagaatggtagtannnnnnnnnnnnatcagctgtgaaaaaaatgttacagatctgcacattttcnnnnnnnnnnnnnnnnnnnnnnnnnnnnnnnnnnnnnnnnnnnnnnnnnnnnnnnnnnnnnnnnnnnnnnnnnnnggttggcagtaaccgattttaatgactagcttttaaaaatacagtacaaagactttgtaaatgtgattcagggcccccagcacccctgtgtctgcagagtgccttcaaaactcagctgttccagccggtgccaacctgtgaacttcccaccatatcccagaatctgctattccccaaaccacttcccagtttcctttcagtaatctttctgaaggagccaggacaatagggcctgttgtttagtgaatttctttattattttcagcctttaaaatgtaatttccatctcttgcaatgnnnnnnnnnnnnnnnnnnnnnnnnnnnnnnnnnnnnnnnnnnnnnnnnnnnnnnnnnnnnnnnnnnnnnnnnntaattttttaattacctggntgtagggtgttcctccagaagcaaagagcaaaaatttactgttgtgatgtaccaattctaactatttgaaatttttaatttcatgcctttaatcattggctcttcattttaagacttttaaaa

SEQ ID NO: 321596 - DNA, 834 bp, Homo Sapiens
  misc_feature (468)..(468): n is a, c, g, or t
  misc_feature (570)..(614): n is a, c, g, or t
  misc_feature (654)..(663): n is a, c, g, or t
ttgggtttgtttctttaaaaatgacatttgtattaaaagtcttaaaatgaagagacaatgattaaacgcatgaaattaaaaattacaattagttagaattggtacatcacaacagtaaaattttgctctttgcttctggaggaacaccctacaacaggtaattaaaaaatttaaaaataatatgaaaggggagctaaatacctgaaaatttaaacaaatgaagcaaaaaaagggaaacaaattcattgcacagagatggaaattacattttaaaggctgaaaataataaagaaattcactaaccacaggccctattgtcctggctccttcagaaagattactgaaaggaaactgggaagtggtttggggaatagcagattctgggatatggtgggaagttcacaggttggcaccggctggaaccgctgagttttgaaggcactctgcagacacaggggtgctgggggncctgaatcacatttaccaagtctttgtactgtatttttaaaagctagtcattaaaatcggttactgccaacccaaaaaccaaaaccaaaggctaaacttaannnnnnnnnnnnnnnnnnnnnnnnnnnnnnnnnnnnnnnnnnnnngaaaatgtgcagatctgtaacatttttttcacagctgatnnnnnnnnnntactaccattctcccccagactcccctttgatacagtaggtaaacaaatagattttttttccacaatatcagcagacactttctggcaccccacctgtattggcatcagtgttaacagtcccagttcagatgtgcaatacttcagattggatacctgtaacagaatccaac

SEQ ID NO: 321597 - DNA, 761 bp, Homo Sapiens
  misc_feature (680)..(680): n is a, c, g, or t
ggtgtccaaactgttggaagaacgaatgagtcacgctgactcgaagacttgacatcttgaaggctgacagctgtggtgtcactcaaaaccaggaaggaatcacttcttcctcataactcttccttctcctcctctgcacagatgcaagctgcccgctgactattcataaaggggcggcagcccaaggtccacacggtgttgaacacagtgtcaaccagggaatcacaggctgcttccactttggagacaaagcccagactccgcttaaggtcagagcagatcgagtggagacaccatcggaattttgcatcacagcgatatttgttggcaccgcaagtgtcataacagacatccagctggttgcagcactttgtcattgctggaatgcccaagtccatactttctggtaccttgagacccaggaaataggagccgcagccattgggctcttggggcttgtagccaggtctgggcattggtgcctttccatatcggcacctgtactgacagactccattcttccctcccagcagctccagaaaagaatcgaagtagctattgacggattcaaagcttccccggaggtgccgaaggccccagtctgaataggactcctccgtgtcagggctcgtgtcgctctgagccaggccacccccaagctgagccacaaaaccaagaancactggccagcttcatcctgcagccaggtaggtactggcttctctcctcaaaccccagccagtgtcccagaattccaggga

SEQ ID NO: 321598 - DNA, 1365 bp, Homo Sapiens
  misc_feature (479)..(480): n is a, c, g, or t
  misc_feature (1232)..(1232): n is a, c, g, or t
ttttttgcctcaaatatttgaccatttttaaatatcatgatttttttctttctgatcccacattttgacgtgtcaaagcttagagcaggaagtaggaatccacactttcacggagggggaccagcctgccatgtcgtccccaggctcacagcagcggcggctactctgctggtggtttggtggcaggtggagatggtgacggcgcattggaaaccgtaaggcatgacaacgggaggcccgcggggtgtttcaggcgcgttgacgcaggtgcatggctggcaggcggcctctacagaaggagggagcgcaattcacagcctcttgacgtagtttccggggaaagtaccaaagaatttggttcttcttgaggtccccacaaaccagccgtcatcacacttttccatgacatcaatgacatcactttctctgagctccagctcatcttcattcctgggagtatagttatacagagcctgaannacggttcccccccactttgaaatattttcatgagtaaacacaggacgctgtggcttaatttgagctcaagctgtgaatcctatcactagaatagctgtggggtattggagggtcagggtagtcctcagcaccttttgtgttcttcttgacgacctccacataggaaacagggaagatgccttgtctgttggttcctgggattttaccttcataccagttttgatcaactcttttaagaagaataactctatctccctttctcagtgacagctccacatttgtgtctgcgttgaagttgtatttggctatagcttctccgatttctccgggctgggctggcggaggtggtcttgcaggctgtgctttctcaggaggtgtgagtttctctacgtatgagatcgggaagatgcccactctcccgtggtgttctccctcataccaattttgatcaattttcctgaggatgtagacagtatctcctttcttaaatgacaactccttagatgtctgaagccttaaaatcataaacagcttttgcaggcaatttctctttttctggagttcctcttctttcccttggtgcacttctccccatgtcagtcaaagtggatgagtaacttctaggggactcacggtcttttgctcttgatggggaagaaggagaagagctagtgaaagactttgtaagagtggtgcttgatcctgggaggtccactcggcctgggctagtcctgctcgcactttgatctccnaagccccgtggtggacccactgcaggctcgctcttcctccgcttcctgaagtcactggccatgcttgcagaactcatgggtctttccaggcttctgtctatagaggactgatacaaggaggctggtctttcat

SEQ ID NO: 321599 - DNA, 577 bp, Homo Sapiens
aaaaagtaaaaaatgaaaggaatcttttttagaaatagagatgctttatagtagatcaccttaaatactggatcttttgcctagtgtgaaaacattgggaatttaatgacattattgagctgaaagaaattacatgagtccagctaccctcatttcttttttatgtgacatggagcacaaagaactgaaaatatgttttgagggagcatgacatccttgacctcatttgaaattacttccattttcaaaaaccatcatgttttgtagatacattttgagaaaaaccatcatgttttgaggatacatttgtgaaagtgcaggcatgccaatgactactcagttttaggactttctgtggaagaaaaaagggagaagaaatcaattccactacttttgaagttctgcaacagatgagattttgtttgtaaagttttgttgtatattaaccattggtttatcactctagattcaacatattaaaatgtattcaagctcacagatttttaatcagtaaggcctatctatattagttgtcttttatttcttctccttgtggacagttgttaatgaaaggagt

SEQ ID NO: 321600 - DNA, 608 bp, Homo Sapiens
  misc_feature (226)..(226): n is a, c, g, or t
tttttgcactcaatgaacaaatctttgttgtttattttaaaattcaagacaatttttttgcaaatgctgattcaaaacgtaccaatccccatctatcatgcctatgccaatacaatctgtcacaaaaaagtttgcttctcattgtcacatagctatggggactggtggccttctaaaatcactgtccagctgctgcaagtgtgaggccagcaacccacggcagggnatgcaggagggaagccatggctaaggctgtggggcctgggacaaaggccacaggatgggggttgaaagggtgaggaaggcgggtaagctaggagggagacagacgggcgttgccatttaaaaacaattcaacttcattttaatgttgctatgtaagttcacaataaaatccctggaagttcaaattggaaagagcagtttggggtcatgggctcaacaatataaaggcagattcagtgaggggtaagggtagtggctctgggggcagactgacctagatttgaatgccagttgtaccagactcaagacaccttgggtaagtggttttatgaagtacctcagttcttcatcagtagaaagagtgctaacacctccataagact

SEQ ID NO: 321601 - DNA, 507 bp, Homo Sapiens
acaatgtatttcatctatgtttttattaggtaaaaattaaccattccatataacaaaatagtaatttttaattacaatcttaaaacagaaggaagttaaacaactcaagtgaagttaataacagcagtttttgacaatattagtccttaaaagaaacagtaaaatatttggtttctataacagtcaaaacaattagactgattaaaccataaaaattaataacttataaaagaatccattatgattcatgcattgtatgtattataccactttaagttataccatattgaattcaaacgtatagttttgaattaagaaataaattctttgctcttatttacttgttatcataacaatttaaactgtgttacaactaaaatggtaaaggcagttgtaataaatacctgaggaagattttgaaagttttcctctctaagaattaacagaattattagagttatttcctaatgcagttggctcaccttatctgtaggttctacatccatg

SEQ ID NO: 321602 - DNA, 796 bp, Homo Sapiens
tccagcttttcactgcagacatttattgtgggtcatcttccctaaggcaccagcagagggggaatgggccacagcagggctgcagccacggtctccagatattgcccagcctgtccagctgcagaggaactgggctgagtgtccgctggtgttcccacaccgcctgctggactcgttccatcacctgatagaacacgggctctgaggctggtgtgaggatgtgggtctcagaagggtctcttgagaggtcaaagagcaaaggtggatcgtggtggactactttttccccaaagcacgggcagacctttcttccatagcaggcaccggctccctctggctggaacacaggcgtcacaaagtggactttccacattgttcctctgtcccgttgatgccacctggctgcgtgcagaaacctctcacaataatgcatcaggaactcgtggtctgagtgttgggctgtccccaggagcaagggcagaaggtcttggccgtcaatcactctgtcctggggcacctcgccgcccgccagccggaccacggtggggaacacgtccatcagactcgtgggctcgccaatcactcggccggccgggagcaccccgggccagcggaagatcccgggcacgcggatcccaccttcccatcctcccatgcccttcccacctttataaattccattccagccaccatactgggtgtttccaagttgattctctagggaaccgccgtgatccgacgtaaaataaatgagggtgctgttgctcaaaccctccacgtccaaagtgtcaaggat

SEQ ID NO: 321603 - DNA, 742 bp, Homo Sapiens
  misc_feature (64)..(64): n is a, c, g, or t
ttttaaatgaaatacacaccaaaaaaaagacacatgcagataattcacaaacaatcaaatcctngggaaaggctctgcatttgttcaacaaggtcaagtgtcattaggagcacagaacaaccgaatgtaaaatttctttccaggagctttccacgtggttggaataaacacaatttagaccatgcaaaactcttaatgtatattggtctgggaacttaaagatggaaacagagattacatagggagctatgcaacacaccaagggccagtatccacaataataataacagtgacaacaggcaataataatatacaatgctataaggttattaaaatctattctataatgcacagagaagtacctgcttgaagccattaaatatatgacagggtctgtcttcagtgcaacatatcaaatttggcaattgaagggtatatcaaatatatattttttgctttcaaaatgtggaacaaactaaaatataaggcttttctgataaactataaaaatttaatcagcacttggatctaatgacatatctttgtaatacttcctctgcagatacattcacttagttcaaaccttaacatacaaagttagtctcaggaggatcatatttccttccattcatttcttataaatattgttatccacttgaagtcgttctgatgaaggaatttcctccctattttttcagcctttttttcctcctcttagctaagaagacatgaggaagatact

SEQ ID NO: 321604 - DNA, 368 bp, Homo Sapiens
ttaatggtatcaaaattaacattagttttcacaaattaacctttccttgctctaaaaatcagagaactaagaaggctttgaaaagaataaagtccttaaaaagaaaccaagaacagtatataaaagattatttatttagaacagaatacttagagggtgagaactaatatcatttggattttttattaggtcatagggaggttctgtccatgcaaagtgatgtagtattttgaattcttgcaataatcacagatcaaaattgaggttaaatattgttgttttctttttcacccaggcctgggactggcaggctgcatggctttgtggctgaggctggaagcagagcctatcaaagtcccctctcttgc

SEQ ID NO: 321605 - DNA, 945 bp, Homo Sapiens
gaaggtgattaattgtctttattggaggaaaacaggaagtcatcaatctcattatcattatgatagaaatcttgatatgtatacatgattgtcaaggcagagaatcatttgctacatagacccatgaacaattttgcagtgccgcaaacctatgtgggttaaacttcttgcagagtttattacatgcatggaataaattcacagtttcccttcttttggacaaacatgtttttatgggaaaattgaaccaattgcaagcctggtaatagtagatgcggggacattcctggttttgatgttgtaattttttgggaagcatgctcactgttgggggagctgaaagaagggagattacattatgtgtagtgacaaaagccaattgagagattgttccaatgtttattctggacagagggtacctttgaggtcttctcacctgaacgtgggactaagataaatgttctctgaaacatggcgccccatctttcgaagcaaagactctgctgccatgccaatgtcgctgccatttctgccaccatttcgggacagcattttcatgtccctctgatagggccaagtgccccaggaaggagagtggcaggtgtcagggctgagagacaaacatccgagctgatgttcttgttcctttttagctctctcgcagcctggctgccaaccacgtcccagggcccctgtgccctgaagtgcagggcttccaggagagcctgggaatctgaatctgtctagattaagattttcctccgagaagcaatttaactagagtttggggtttctgagcccctgctgaagtcttatctctaagagtaaaaccaacctcctccctcattttcttttttcctgtccataagaaaataaaatcacctttaaaataacatggcaaatcatcagaagacataataatcgaatgagaagttccccggagac

SEQ ID NO: 321606 - DNA, 2257 bp, Homo Sapiens
  misc_feature (1461)..(1471): n is a, c, g, or t
acatggtaggatttttattcctggatttggtcttctgcgaagtaataaagacactgcttttatttagtttgatatgtttctttacagaatgcagaaaacacatcttaaaatcatatagaaggaaataaaaacacatcagtggttggtgaacacttgaatgtgagattggctctccatctcacagagtccaacggccatcaccagcccagcgctcaggggagcaggctgcctgcaaaggcattgttgctgttgttattctgttcactgccccatcgcctccagttgctatggcaacaggccattctgggccagccacgtctctgcatggcagtgcccaatggtggagttgctaggggcgacggagctgtttggaaggcctttcaaagccctcacctggaacattgggaattgtttattttttgatgaggtcatcagaaataatctcaccaggtcagatcccacttgtgctcctgtctctggggcaccagggaaactctgacttggaggcatgagcccagtcaccagtggtccactgagcccgcatttacaggctcccccacaggggcactgctcactccagagtaccccctggggactggggcaggggagaggggctgggccctgtgggagaaggcgcaaggggaaatgccctctggagaagcaggtaggacagagacctgtccccccatcctaccagccctcccctcctgaggcagcacacacaaatcctctgcaaaacagtcgatatggcttagaagtagctgctctgtgtgcaaagggagcctgggtccacccacccacccctcaatcagggaatggatacattattgcgaaaggcattcctccctaaaaagtacccaaaataacgcttcagacatcaagaaaagtcatgctcaaaatggtttcttccacaggaggagaatcgaagcagagtgggcgcccctgagtcatgggacagagatgcagatggacggacggatgttctgctaaaaaaggcaaaagaaccccagtgtaattccagaatttaaaccattaggaaaagtagggggaaaagaatcaaaacaagcaaagccgtcagttccatggaatcaacacttaagagctcgtacaaactgctgtaagcatcaccattttaaatcttttcttttaataaaacaatttgaggctgtataaaaactttagtaaaaaattagctttgagagctaacagatttttattatgaactattgctggcactcctccccagccgccagaccttttccagtagttcaggcccaaggcctgggactggagtgccagagaaaagggatggggtgggtcggggcaggactgtggactgttaggacaaagcggccaaggtcaagtgaggaaagagcatcacatgacataaaaatattgcatcttcaccaaaatgtcccccactgagtgtttcaaaaaaccgtgatattccttttaggaggnnnnnnnnnnncaatgcacagaaaaagggtaaaacaaaataggttgatgtggtggagacctttgacctcccaggtgcccccacaagcagctggcccaccctggagcaccaaagttgggggccacagccaccactgcctcttggagtccctttttcatggaaatgaagaccccttggtcgtgggccactagtgtacatgggctggaagtggggatgtccatggcccaagagacccctccagcttccagccctggcaacagcgggagagcaaacccagcaccagggacttggcgtgagcccgggccgggaggcccccaatcaggctctggggtatcagagcaaccaagttgacgtagtgtgaaaaaatagtattcctttgataaaaaatactgtcccttggtcttctctaagtttgaaacaccctgggagcttatttttagcaaagcaattccccatacccacccaaaaattatacatacaagtttaggtaaacagcagattaaacgtaaaaacttaaccttaacttctgaaagtcctttgaatttaatctttagttactgttttccatgttacatcctgcagctagacacacgtgaatagaaaaaacagtacagttagtgttaaaggcaaaacgcagagagccagggggccgcccggcactgcctgcgagttcattcatggttcctcgctccctccacctccactccacatggtgctttcagagccagccatcaaaaatgaagcgaagaattctccggacgcgtgggtcgacgatatcccgaaattccggaccgtacc

SEQ ID NO: 321607 - DNA, 1502 bp, Homo Sapiens
  misc_feature (515)..(527): n is a, c, g, or t
  misc_feature (887)..(929): n is a, c, g, or t
  misc_feature (1030)..(1038): n is a, c, g, or t
  misc_feature (1113)..(1160): n is a, c, g, or t
tattggggaatttaagggttattttttctcttttacccaatagccaaaatgcttaccctttccttaggtaaaaaccaaagatcttgcttccaatccaatgctggtttgtaaaaaatagccaaagccaacgaatggtgaaatccattcaaagcggcattactggggtaaaatcagtttctacttagaacacaggttaaaattttagtactaaaagccttcaaaataattagtgacagaaatagtgttattaatttgctaagctcaacaataagcaattccttaattaaaatcttcgagatataaatttgatgactattctcttcagaaatgacatacctggattatgttaatcatgacaagccttattagtcacacatataaacatggcctcatgcaatcatttgtctgtatatgttactctaagttgcatgagcacaaggtttaatatctatatctttaagaaaatacttgatattataaacagagtaaaagacatgatatagtagtgattactnnnnnnnnnnnnnttagcagcttaaatctatctatatttgaaaaaacgtagtcacaagtaccacaaatgcagaatcagagcagcaggaagaaggttagtgcaattatactttcattaaaaaaaattctgaatcactgctatttaaaaacaccttgaagcaagtcttttgtttgagattgttttttaaactaaggtagcaaacattttgccatgtaatggcagtgttatatgccgttatcttgctttgtataaagaaaacaacatgagagatttttaatactggagtttggttacattacatatttaagcttttacacagaatgatggacacttcgagaagctaatccttatccagaaacattttaattttttnnnnnnnnnnnnnnnnnnnnnnnnnnnnnnnnnnnnnnnnnnnacgttgctccttttcacaatagtgcacatttttaccataatttagttatgggtacaaaacatcagaagattttttttaatgtattttctctatggtaattnnnnnnnnngttgtgcccttttagtctttaattggcagaaatatgtcccaaaaaagaaactattgcatttaagccacatcaccnnnnnnnnnnnnnnnnnnnnnnnnnnnnnnnnnnnnnnnnnnnnnnnnccaacagagcataatacccttttactgatgtgtcttacagattgacatgaccaaagtcataggttttcatttaatttccaattcccccttccacaacatgcaccaactgaatatatgctctgggagccataaaatgtaccaaacatctacctcttcaaaagaatgcattaaaatattttaaagaattttttgtttaaaaggtgaaaaaaatataaacaagaaactgattcactcccttacttcatgcatccataatctaaaccaaaaacgaaattttaaagcaagaacaaactactgctgcaagtttttgtaagtccattttctctgtacatacaaactgct

SEQ ID NO: 321608 - DNA, 631 bp, Homo Sapiens
ggggccgcaaagacatcatcaatgagcattgctgcaggcactcagccttctgaaggttcgaaccagacaaccagacccaccttcccagggcacctccactatccctgcctctctctaacaagaggtgctccaattgtctgaatccacctggtctccttcctgaattctgagtaggacctgggcctgctcatcctgctgcctggacccacccacagtcccaactgagcaccaaagccctcagaatgccaggcccacctgcacccgggtgagcaggtgcctaccttggtgtcaatcttccaggtgatctctcggatgctctgaaaccactcaaagagctcctccaccctgtctgtggcaaactccaccggaggatcgccctgctgcttgggctccaggatgaagacaaaggacttctggtttttttccctgaggggctttcacttggggtaagagaataagaaatgtcccaatcagcctattagagggccacaaagaccagactgcaccctgcctgagctgtttctctcatggaccaaccaccactgctatgaccacggttagcactgatggggacgtctactttccatcggggtaagtacacatcacagatgactactcaagggatgcagta

SEQ ID NO: 321609 - DNA, 712 bp, Homo Sapiens
tggaagcatttgcctttgaaagtttgtagtcatttcccttaatattaattcacacttacataagatgagggatactgcctgcattttcttaacatcatgaacacgagacaaaacaaccctcagaacatatttaaaatggcaagctaacatattaatagaatttcctattagctgtttgcaggtctaagacacagacactcaaaattaggctgttcatgatttggtggagctaccactgggtgtggctgaacacaggtccttagtacagattcggtgaccacagggcagaggtgctggggccttcaaaggaagagggaggggctattgtaggtacagctgatgcattcttgagaattgtttcagttcagctttaccatggaggaatcctgtaagctcaaatcccccgctgtataagcctaattaataagattagttcctaaatttcttcatagtggagatcagtttaaatatacaagaaccgttctgtccgtttttcttctgaccgtgttggtatccatctgtgagttcaatccactccattacaatgtcttttatatggaatcctctggggctgtgaagcctttgattcacagtttgcaatacaaataccctgatacatcatttatttgctattaagtatttgattattatgcctttttaaattcaatatctttaaagcaagtttttaattagcgttacttggagcagttca

SEQ ID NO: 321610 - DNA, 542 bp, Homo Sapiens
gacaatgtgacctttctgtgtgctggctgcgggtgaggaggacgagggcgacatcgcgctgcagatccattttacgctgatccaggctttctgctgcgagaacgacatcgacatagtgcgcgtgggcgatgtgcagcggctggcggctatcgtgggcgccggcgaggaggcgggtgcgccgggcgacctgcactgcatcctcatttcgaaccccaacgaggacgcctggaaggatcccgccttggagaagctcagcctgttttgcgaggagagccgcagcgttaacgactgggtgcccagcatcaccctccccgagtgacagcccggcggggaccttggtctgatcgacgtggtgacgccccggggcgcctagagcgcggctggctctgtggaggggccctccgagggtgcccgagtgcggcgttgagactggcaggcggggggggcgcctggagagcgaggaggcgcggcctcccgaggaggggcccggtggcggcagggccaggctggtccgagctgaggactctgcaagtgtctggagc

SEQ ID NO: 321611 - DNA, 779 bp, Homo Sapiens
  misc_feature (88)..(88): n is a, c, g, or t
  misc_feature (167)..(167): n is a, c, g, or t
  misc_feature (194)..(194): n is a, c, g, or t
tccagcaacaaatatttgagaacacactgtgtcccagacaatgttctaaggactggcagcgaagtccaagacaaacagtccctacctncagcaagtttgcagtcaagcaggatcggaatctgagcattacaagggaaatgattattctgagagaggaagtatggggngctatgggaacatacaaccagggaccnaattttatgggaaagggaccagcccagatccaacacttgctctcccagtttacctccagtaggttctttttaacttgaactaatcttgtttggtggggtacacagtgaggaaaaagaagagctagtgacaaaatctaactcccttctcagtcttaagcaaggtgaaggcaagggagtagaagatatcaagggagtgagtggtggtagccaccaaaggagatagcagactgaggccctaaaaaaagaaaggaaatctaaatctatccagcaggaccagagaaagagtgctgagggtgattagatggaatccctgcatgtactctcccggcattctgaaaagaagccaaaacaaggaagaaaccgggttatctagttaagacctcacaaatcactcatccattcctctgacatgttcataaactttttatagtggttacgaaccaaaagcttggcatttcttggcacttttccaataccctttaccagctcacattatctgggctcccacccaggctacagatagcctggctgttagcacttcacagaagggatatagactggcccagattcaagagctgcccttct

SEQ ID NO: 321612 - DNA, 501 bp, Homo Sapiens
ttgattctaacaaaatttattatgcagtaattacaaaggttaaagactcttccatctcaaataaaaataacagttataattacacacataatatagtaccttatagaatgattccaataaatatcacaggaaatacagtgcattttcaagttggagagacaaatactttctcattcacagtgtttgacataggaaagcctatttacataacaatctgtataaagtcatgctcttagtaacagtctatacagagctgtgccaacacaattctttcagaatgtgaagtaccgggcaaaccactcctgggcgctgggggatctgggagaagccactggagaagcttcactctgagcaggactggaattcataaaaagagagacatgtaaccccgcattaagtcattttgtaaaatgaaggccaaagcacataaaacatcagcatagattaccacaacgggttcccctggttgtaagtcgtgttttaaagatttgctaccccctc

SEQ ID NO: 321613 - DNA, 548 bp, Homo Sapiens
ccaggatacaaaaggtttattgcttataaaaataagttaccaaaacccaagccccacaaaacacaagaaccccgcatgacgatacccatgaacacaagggctcattccagtaacagctcgcggagacgacagacaccagcactgccgacacacatggacgaggagcatgctgcacagcttccttctaccaggttctagaaaggtcttctttgccttcagtccgctggctagtgggaataattagtcccatcagccacagagggagtctgctcttcaagagtggcctctgcacacatggcgctgctttatgaaagggaggagcagctgtacacatctgggcagtgaggaaccagctgagccttctgtgggcttcctgcgtgtctgggaaggtgctgggtggggtctgaggctggggccagcgtgggggctactgccggcaggtgtcatggaaggcttcgagggttcggaaatccctccatgtcgggggaaggccgtcctgcagaaacttcccgcagcgctggcacggggcctggaacagctttatgtac

SEQ ID NO: 321614 - DNA, 567 bp, Homo Sapiens
  misc_feature (206)..(242): n is a, c, g, or t
cataaaaaataaatcttttaattgctttgtaattggcacagatggtgtaattcaaactcacatttttatttaatagactctgaaatatcacactgtagctctcactgaaataatacaggaatcataatgtttaagtttacaaaagtacatttggcagcatcatgatgttttgaaagttacctgtaaaatcaaagactggggcttcnnnnnnnnnnnnnnnnnnnnnnnnnnnnnnnnnnnnncaagccatactgaagccatttgtcatgactattagagaatggtgtttttgggttttttgaggatcttgctactttattaatgatccagaagagttgcacaattctggcttgtaaatacagtggggaagctgtaactatgcctggaaagtgctcctccaggacaaggaatgtcaaagccaggctttggttggaaacccatgtgcctgaaaaggctttgaaggaatctttcgtttcttaggagtaatgagattcactgggttttgatttaaaaaatcaccctaaagaggattatagtggaggagataatcattaaattctcatcact

SEQ ID NO: 321615 - DNA, 658 bp, Homo Sapiens
cacacaaggcttccgcctcagccaggttatgggtggtcaggaggacacctctctctgtgtttttaacgactgcctggattgcctgccacatttgctgctgccctgtggggtctatgcccgtagatggttcatccaggagcaagacaggtgagtttcccaggaggctcagcacaaaacacaactttctcgtgattcctgctgttaatttctgcacaggaacattcagctgctcatgcagtttgaaagcactcactaatcttgcgatggcgagcctcgcgtccgctttcctgagccccttgacggcagcatacacctccaggtgttccctcaacgtcagcatgggccacagcacgttctcttgagggcagtaccccaggtggcccaaaactgaactgcagcctttcagttccacctctccagcagttggctttgtgatcccagatatcattctaatagatgaactttttccagcaccattgggtcctagcaatcccaaaatttcaccttcttgaacacagaaagagatatttcttgctgctattttcttcttcctctttgaaaagcaacttttcttctggcctgcatattctttgtgtagacagctggcaattataacaggtttctcatctaagattgaagtggtcagagcagtggctgt

SEQ ID NO: 321616 - DNA, 568 bp, Homo Sapiens
gcagacggcccaccctcgtctagccctgggcccctgtccccaaggccagctcgctgagcctgcgctcctcctggaagcggatgagggcatctctctggttgaccaaatccaccagcttcctcaggacctggtcctcagcctgccgatcagcagctgtctttaggttttcttcccggttcatgtagcctcgtagctcctggtccagctgccactgtttctcctccagattcaattcctgcaccgtgatcatgagctcggcctcctcagccaccaggctgtttttcttgtcaacgagctgtagcagctgtcctacccatagtttcttttgctgttctggggaactgctctggcgcctcaaggccagctccagcttcacgccctcggcctctagctccctcaaggcagcctcaatctcatttagtcgccgttggatggtctgggccttgcagaacctcttcatctcctcctccttcgcacggcgcagcagagtccgacgccatgttgggtagttattcatggtgcctgaggtcttggcaaaggtctgcagggcctgttccacatctgagtc

SEQ ID NO: 321617 - DNA, 817 bp, Homo Sapiens
  misc_feature (251)..(260): n is a, c, g, or t
  misc_feature (700)..(709): n is a, c, g, or t
gaagaaaaacatttaatttttattttcaaaatgttgccataaacatacatacaacactgaatttgatcccctccattggctgtctgtgtgccaggaagcacttgtgacagaaaacatatataagcttagggtaaaagtttataaggaatcaaaatatcttccaaaaagagggggtaggggcaagaggaatcaataagtttaaaaatcataactttcattttataaaaaatagtttgaataattttcttatnnnnnnnnnntgcttacaaaagcaggaaatacatttaaaatagtctttttaacacagattcatttgtacaatgtggtcataagaaaaataactaaaatgacatttcagtagtctatattcttttctcagcaaattccacataaaatttaactaatttacaattcaaaataagattttaactgccaacaatgtcagactagttgtggttagtacctgaatatcaagctcttctccattttatatattgtaccaaaattttaaatacagctcagcagtgataggtactaataacaatacctgactacatggttaccacccgtgactactgcattgcagcttaaaacatgctttggtcagtaaatttaaaagatatacatcaaataacaaggccagaaaagttgttttagaatttcctgaccttaagtaaactttaaatacattgacaaggcnnnnnnnnnntatgatcaaatatacagaaaggtttctattttttcaaccatttggcattttatattattaatttcgctgtttaaaataatattttatactcctgtgcactgattatca

SEQ ID NO: 321618 - DNA, 845 bp, Homo Sapiens
  misc_feature (709)..(742): n is a, c, g, or t
ttttattaggccatttgaactaatggttccatgaatcccaatttgatgggccacctcgtaaaactccaagagttattcttctttcttttaacttacttccatgaagatacttggctctatgatgataaaactccgcacaagaagggtcattttatttagctgaccatggcccttttcttcttatatttgtacagtccctgttttttcttccttggttttctgatctgggtagaaaatcctgctgcctgctataccctcacctttacccttactctcttggcctgtcagaagaattctagggaagatagtcttatggtcccaagagattgtggttgtgtagattgagagtggtaagatcaggaaccaatgcaaatgtctgggctttaccgtatacctctgtaacaaaacaggtattctttttgccaagagcagtaacttcttaattaaggtagatttgtactagtcataaggtattttggaaatgaaaatgtggaactttttgatccttagtttatcttcagtgatcttaatgcagggataaaactagaagaatacctcttttgatgttatgctttctttatctgtctatcaatttcttagttccaccttaaaggccgtagcttacaggaaaaagggatttgacattgttaattatgcagaaaatgttaaaatgcagaaaatagctaactataggccagagaatttacannnnnnnnnnnnnnnnnnnnnnnnnnnnnnnnnnagcttgttttccctagtcgtcatcttttaagaatgcttcatccttctactcttctctcattctcttttctgaaagctgttcacaaatgggatcataagctgag

SEQ ID NO: 321619 - DNA, 1060 bp, Homo Sapiens
  misc_feature (140)..(140): n is a, c, g, or t
  misc_feature (690)..(709): n is a, c, g, or t
gaaaccaagtctaaggccccatgtttcccctttcccttaatggggcccccggggcgccaaaaggaaagggtttatggaaagctttttgagagggccggaagccggccgaccagggattaaaaatctgccctattttcacnaatgggctcttgtttgggtttctcttccctggagcttcttttttggagactttgggtctattggcctttctgtataggtgatacccaatgaggcccaggagggctggcaccatggccatccctaccagaggcaaaatgcccttcaccagctttagccagtagttggctcggattagtgcaatcagctccacgtcatactgcaccactgcatccgctgggacagatggtggaaatccccgttttccataggccaagtgagaaggaatgattgcccttcgcttctctcccacacacatgtcgagaagactctgctccagacctggaatcacctgcttttggccaagttctataaccagagggtctctggtcagggaggtgtcaataatacgtccatctaccaagcttcccgtgtagtgtatgtgaagcgtgtctccaaaagcagcgggctcggcacatggttctgggggctccaccagggtctccacttggagggtccggacgggactttcggtttcgagcccagcctcagcccggcacaccgccgcactgnnnnnnnnnnnnnnnnnnnnatggagcgggaggagtgaggggcgcagggtcatgactgggcgcggggcagggagccggggcaccaggacaggctgttcgggtggcggcagccaggacagcgttcccgcggcgcccaggccagactggacgggacggggcgggtcgcgatgctagagctcctcctcctgcagcccttcctccaccttgtccccacctccgaaagggaggaggccgaggggcgccctctgtaccctccaagatccggagggcgcaggttctgacgcatccgttagacgttctgtcctataacgtgggtcgggccaaacaatagcacccatttacgattacctactgtgtgtcaggagctagtc

SEQ ID NO: 321620 - DNA, 1029 bp, Homo Sapiens
aagttttgtagttttagtaagcaagtcctcaaatgacggtacatccacgtagtttttatataattatgtctgaatgaacttaactataactagtgacataaagatcccaactagacaaagactggtcttaaatatgggaacctaggactttatcgcagctctcagatttacccaaaatccttcccgctgagcatcgtccatgggccactccaggtaggtcttggtgttcattatcttccgcagcttgcagaagcgctggggaatggcttttttctcaatgggctccagaagaatgagaatggcagcatcattgttctcatcaaaaagacggaaatgggagaagtccagttcatacttgcaccactcactcttcacaaagttttcagaaagcacaaagacagttttgtggctcttttcaatggagtcaatgatattgtcaatgatccacttgccaggaatgaagtcccgcttatgaagacacaacttgaaggggggattgaagttctccagctcctggaccataaggttctccacccagtaggcatcccgctcactgtaagaaacaaatgcatcatagcagatgttcctgctgggagctttcctgggcttccttttggcctggagccaggcccacatcattttcatataccacaggccatggaaacggtggcacaggacccccgtgagcaggatcagcaggaacagagcacagcacatgccagacaccagtgctgtcctgtgacattccgacaccgagaggcggacatcctgaacctgctggccacgcacatgggatggagagtcacacaggtaatttgctggccaatcaatcaagactttggccagtgcttgctgctcctgagtgaaggagaggaattcacaggagcaaatgaagttattgccaccagcttccaaagtcttcagtgtgtgaaatgagtcaagttgctccttagaaaacgtagttattgcattcctactgattttcaatactagtaacatgggtaagagggaggcatctggtagagtcat

SEQ ID NO: 321621 - DNA, 529 bp, Homo Sapiens
gagcatgtttcctttctcataaactctgatatatccagaggtttgtgaaaccccttttgtggcccaagacctcagctaaacagcgagtgaaaaccaagatggctcacagttgtctttctgggtactggttcacttcagcaggcaggacaactctcttggagagtcacacacacagttaaggagcaggacagggtgctagggcctgcaggagggctgccaacagactccacttccgaaccctctggaggacgagacccataaagtgacctaaggtggcaatgaggagggtgagggcaagttacacacaaccatgggctcagctctgcagccctacagttaccagctaaccttggaaggcatgtggggaaggagcgggtaggagggaaaggcggccatcactcaagtgatctttaaatgtaaagtacaactgattgtgccttaaagattcataggtcaagtaatggcccataagcaccaaggtgactaaagttcattttagagtatataaggcccacatagatgccaacct

SEQ ID NO: 321622 - DNA, 411 bp, Homo Sapiens
cctttaagctaaagttgtcagtgtttaggtgccgcgggccaaaatttaatttctggaatatacccatcggaacttttgcccaatccaggagcctgtcctatccatccatagtcagttgttttcaatgaaatgagcctgtggacactacattaaaaatacttctttaataaatatcggaagtagcgtattagagatagcacatactatttttctatcccaagaataaaaattgatgtttggtaagagtttcggagcccaaacaagtagggggctggccctcttctggctcatctgtgattgcacaaccgagggccacacggagattaaacaatgccatctttgaaaaatccctttctggtatttctcccaaagcctgtctcttcatgcttacttcacattctttatctaata

SEQ ID NO: 321623 - DNA, 1069 bp, Homo Sapiens
gacttgcttattttttttattaaatgatacattgaaagtataaaaagttgccgcagtacaaacaaattacagaataatgcatataaaagcgctatggactacacgtgacaattctgcttaacttccatcttgatgattttatatcagtatccaaaattatatactccagcattttttccgaatatagtcttacatgattgcaattcctgaggtaaactaagtgtccactgccaacatccttggacgaaaaccaagtcccccgggagaattcagatatttatattcacacatacaatacaacggaattcatcaatgtaatcagatattgcagatttaaaaatggaaaatggactcttgcaatacttctgcatccatatataattttaccagcagggcctcccaaaatgttgtgtaagtatagtttaaatggatttcattaataagtttctgcatttagataaaaattcttggctaatctgtaagaagtgaacactgactagcattgccaaacagaaaatcaaaagtttcaacaatttgcaaagcagcacagaattgacaccctaaagaggatgccaattttgctaactacagctcttaccactcttctccatggaaaacctttaagctaaatgttgtcagtgtttaggtgcgcaggcaaaatttaattctgaatataccatcgaacttttgccaatcaggagctgtctatcatcatagtcagttgttttcaatgaaatgagcctgtggacactacattaaaaatacttctttaataaatatcgaagtagcgtattagagatagcacatactatttttctatcccaagaataaaaattgatgtttggtaagagtttcggagcccaaacaagtagggggctggccctcttctggctcatctgtgattgcacaaccgagggccacacggagattaaacaatgccatctttgaaaaatccctttctggtatttctcccaaagcctgtctcttcatgcttacttcacattctttatctaataaaataaactctttgttttattaacagcaaaattattacagcagatttacttca

SEQ ID NO: 321624 - DNA, 586 bp, Homo Sapiens
gcacctgctgcttccctccgccagagacgctgttcccccaccatcacttcctgatgaaagctgccacactctgtgaagccaagtacccatgttactttctcaatatggctcctcccatgtccccttccccatccccaagcacaataaatcgctcccacggtgctctgtgcttccttggctgtagctggatcccatgacattctggtgggtcatccatggtcacatcctctcagatgtgagctcttcatcacctggatcagtgagaagtctgtgcccaatctctctttgtccttccagtgctcagcatagagcttgccacgctcacaatctgctcttgttgtgggaggatcttgattgggccttcttgttggcagtactcttttttctgaagaccctcctcagcaaagcccgaaagtgctctctctccccacgctggagaccagtgtgctctccagacagcaggctttccctcctcacacgatggcagagcctcctaatgacctggaaggccagatcagaatggctagactcctcggagtttcacattggcatgcggcagctactttccccgttcttcatgttttcc

SEQ ID NO: 321625 - DNA, 1108 bp, Homo Sapiens
ttacagaacaatgaatttattacctcaaatatcaagaggccctgaggtagggtggctccaggaatgcttaagtgagtgcttctttgacatcactaagcacttggcttccatccatcttccaacctcaccaaaaagggttgtcctcatgactacaagccggctgacatggtgccaggaatctcgtcatgaacatatggtgttctcagcgcaacaagaagacatctcttcttgaactgaagagtgagggtgaagaaaactttccctgaaggcacctccaccaaaagatttttcttcaagattcactgggacaaaaatacatcacatattcatgcataaaccaatcacttgcaaaggggaatcaaattaccatacctaacataaactaattaggatttattctctgagctagggagatcctttccctgaagaatggagttctcaagataagaggggctctgctaacaaatatggttggtaggcagtcaaccatgacttttacagctcctgtggagagctgcaggctttctctggataccagtggttctgaaattcttcaaattcacccttgaacatacgtggcaaattcttgagacttgtggttttatttatttctgacaatgttacttagctcttctttccatgtgttgggttaaggcagaacgaaatacttctactgcaaaatcaacttctggtttagtgatgcacattgagggcgcaatgcgaaatgtctgagaaaaaatgctgcctctgccaacgaggagtcccatgtgcttgcagtcctcatggatctgatttacttcttcacggggaagaggccgacagcttatcttatcctgcaccatttctatgcctatcatgaggcctttgcctcggacgtctccaacaatttcaaattcatcccgcagcttagcaaactttagtaacatgtaggtcccaacttcttgactgttttcctgtagattttcttctttaatcacctcaagcacagcagatccaatggcacaggccatggggttccctccaaaggtgttgaagtgctgcaggcatttcgccaaagatttggcaatctctggagtggttatgactgctgccatgggaaagccattcc

SEQ ID NO: 321626 - DNA, 141 bp, Homo Sapiens
gacttataagtaggaagatagaacaatgatgccagttgtcaggctcctcccaggttatgttttcatagtgtttctttcatcatcttcattgaactcttgggaatctccagataatcagattatttcatttggtaaatttta

SEQ ID NO: 321627 - DNA, 537 bp, Homo Sapiens
  misc_feature (76)..(85): n is a, c, g, or t
ttttttggtttaagagcactttattattgttcttaaggctacttttaagtacaaaaaaagatggcctgccaaaccnnnnnnnnnncttcttccaggaaaaacaggccacagagaatggtatattacagatttacacacatgaagagaaggtcagagcgcactgcaggcagcgcggctctgggaagaacttcacggagccccttcttagagcagggagggggctttctcagtgaaatgtttggttttctgctgcctcctctgccccaggcccccctccaagggtactgcctatcccagataggtcagtgcaccagggacccggccgccagcaccgccgacccctcccagagtgacgcccttgttcactgacaaagagacctgtcccaggagtgtcctccaccgagccggtcagctgtgggtggttttcctgttacgacgctcagtagcctgtagcaataacaaactcgtggctatgaatgcagatgcagtgttctcatagaataactgttcctgcacttttacagacaaatctacgac

SEQ ID NO: 321628 - DNA, 611 bp, Homo Sapiens
gaatctcatgttttgtacatgaaatcaaagcttaagtatttttgtctaacaaacctgagatgaaggatctcccttaagataaaaaaaagaacaaactctgttctaataagagatatcaatatagactcgtaactcataaatttctaattgttttcctttaattccaaaataaaaattttattttattttgtttgagtgaacttcatccagcctatttggaagcctgagtgcttaaatatacactgattagcaaagttaagtgtattaatcctgggatcaataacagtactaggcagtgatgtgtcaaatgaaattccaaagtagtatccattatttatgctttctagcaactttgcagatgtgaaggggctccagctgtgatgactgccatcccatcagttaccatgttgggttggctggataactgggtgtttcttcattattttgtcttgtttctctccccatactgtaatctcaaaggcaagattcttcccacagagggaggaccaccatccacttgagaactaaataagagcatcttaactccttctgtaagggatgcctgcactaaaaaaattatgtaagtcatccctgaggaatttggctaatgt

SEQ ID NO: 321629 - DNA, 701 bp, Homo Sapiens
  misc_feature (498)..(518): n is a, c, g, or t
cccaaaatataaatttattaaggtttattggaaagtgaagatgatggaaaaagaatgggcctggcttgattttggacccgagtggccccatcacggatacctggaacaagccagttgtgaggggtggccttggcacacccctgggatgtttacaggagcatctggtccagtcctgtcttatggctgtgcccagctccagctctcgaagagttctctctgaggagcagggcctggagctgggcctgcaaagcccagagctaccactagaagaagggctgggctggagcagggccaggaaaggagacctgtccaggggacaaggtgcacgcagccttcaggtgcagccagatcctgccggcagaccccaggcctccgacgaggcaggcctcaccaggaatgacgcctggtgtctgaggtgaccttttattcccctaggtgcatgccatctttttaagtgagaagttttctaaagcaaagaataagcatctacatcttacnnnnnnnnnnnnnnnnnnnnngaagggatcctataacaaaaagcacttccttcttctagaaggaattctgagtctcaaataaagagaagatcttcttttaatatcgtttttctttctatgtaagaggagcagacgttattattcatgactatcaatcaatctgcatatgtaattataattgcaatgcaatacatatgaatataa

SEQ ID NO: 321630 - DNA, 1732 bp, Homo Sapiens
tgaacagcaaaactgagtatgtttactttacacaaagtacaatccagtatatgcagaaaggtactcagcatcacactcgtgatcaatatcctcttatttccatttggtatgtcactgaaaacctggcacaccacttagctaaaaatcacataaaagaacccctagagaaatcaaactgatgttttttttcccccaaacaatagatttcctcttcattagtcaaatctgatagtgatattcattaataaggaaaactaaagttttcaagcatcaactctgaatggcagagaccctaatctgactgttattagccaccaagaactcagaagagcaaagaactcaagaagaggcaagcaagagcactatggaaattatattcttttctgtgaaattcagtcccacagctatttgagcaagggcccaagacgatggagaggcggcaaagctgctgggagggcctgttcgcaggcaggaatgcactggctgtgcctcgccccgccatgtccttccacaggtgggctcttcactggcttcacttcagcttgatcctctggtctccccacagcttcctgggagactttgggttgtaatctttacagttccaagaatcaattttggttgaacgcaagggtaacatccccatccaaaacagaaatgttctcatggtatgaaggccattctgtagagtgcacgtatatatgtttatatttatataggctcctatgcgagacagtttccttcctcttagcaagagaatactgcatccagcaacactgctttggctagctcttttttctgtatggcctcatgtgtgtggcaattgaagcagctatttctcccttcctcttgttctggccaaaataatctagaaactcaccatctggtccaatcaagtacattattattgtgtgatccactatgtagtcttcatcttcgtccttggggccagggctgtaatacactctgtatgctctggccacttgatcgacctcttctctcgtgccagtcaagccaaccagtttgggagaaaattctttcacataatttgcgatggcttcttttgtgtccctctctgggtcaatgctgatgaaaagtggagttagatctggcagagttgtaatgctatctatttcatccacgacttgaatcatcttttctagttcttctggacagacatcagggcaatgagtgaagccaaaataaatcaataaccactgacccaagtagtccttgtcagttttacgctccccagtatgagttgtgagggaaaacggtcccccaagtaaaggcttgccgatgtgtcgctgccgttccttctctaacttctctgccttttctttcttgacgtgcttcattccagccagtaaagctcctccaatagcaaatgtgattgctaaagacttccaggaaacaggcccgggcttcgaggggcgcgtggagtctccggggcccttctgcgaccacgggggtggcggcctcgcagtgctgaggggccgggttcccaggcaatagccagggcgccccgaggcacgccacgcctccgcttgccgcgcgcagaactgcctcagcaagactctcgcagtcccctcggctgggccccaaaactcgagtccgcgaggcaagaagcgccaaagttggccacccagaggccgcataactcgtccgggtactaggaccagcatcgccatgagcctcggagaccgggtctcctttgaccctccccgcgattttt

SEQ ID NO: 321631 - DNA, 454 bp, Homo Sapiens
  misc_feature (428)..(428): n is a, c, g, or t
ttgaacagcaaaactgagtatgtttactttacacaaagtacaatccagtatatgcagaaaggtactcagcatcacactcgtgatcaatatcctcttatttccatttggtatgtcactgaaaacctggcacaccacttagctaaaaatcacataaaagaacccctagagaaatcaaactgatgttttttttcccccaaacaatagatttcctcttcattaggtcaaatctgataggtgatattcattaataagggaaaactaaagttttcaaggcatcaactctggaatgggcagaggcccctaatctgactgtttattaggccccccagggacctcaggaggagggcaagggacctcaggaggagggggcaggcaggagcactttggggggaattatattccttttcctgggggaattccggtccccncggctttttggggcagggggccccag

SEQ ID NO: 321632 - DNA, 870 bp, Homo Sapiens
  misc_feature (737)..(737): n is a, c, g, or t
gctttttcacattttactacagaggtatttgatagacatatttattattagttaatatgtaaacttgtaaactgctaattcatatcctacttgtacaaaatcattttacaaaaactctttaaaaactaatagagaatgtattctctggtgggcatcactggaaggcatacctgggcaggtcctcccctgaaggctatcagcagctgcaaccagctcagctactgctgcctttgcagccgacactccaccctcctgctacctcttcattcccaagttcactgtgtcctgattcgtcgccttttctcccctcttttgtggacgccttctcacctgacaccaccacttcacagatgattgtacaggataaatgaataacagtattgtatcttcgtacctttctaccttggacgagaacaactctggttctctcagacattcagcagtcttatttcctgtggccttttatcccataatatattacttcaaatttaaataaatctccttcaaccagagtcctcaaatagcgttcattttatcctttgagtcatccttttatataaagtccttcaagtatccatattacaatatttaaccctcatgatcaaaatgactaagaaagctgtcttgttacaactgttttatactctacatcaccaggagctctgctaagaaaatacaaaaaggaaaaattcagctcaacaatgagctgtaacaggttcttaatgtgtgctactatntgaagtctctaggccaaaattattgcaaacaaagaatcagttcttccaaacatcaccaaaagatccagggtcatgcaccaaaccagaaatccactgtgatgttgatatataaaggattgtgttccctcgtgcc

SEQ ID NO: 321633 - DNA, 1253 bp, Homo Sapiens
  misc_feature (78)..(81): n is a, c, g, or t
  misc_feature (83)..(83): n is a, c, g, or t
tttacttaaggggggccgggcccccaaggaaatggtttaagaaaacttttgaaggggccgaaggcggcccaccatgtnnnntntttttgtgtggtgtttttgtggtacaaaaagattattttattaattcaatttttgcataaaagactgttaaaagaacttgctaacttgaaaacaattttgagtatttatgatcgttccaacttgaaaacacctgaaccttatagaacagattgtgtaaagcagccagggccacaggagtgaaagaagatggagacccgccgtctggtcatgatatgagaggcctggacagtgacctcacgaacaaaaagaaatgatcctcttcagtccaaagtgtgtttgtgagactaatgactccatgccctcacatggccactcctctcacagcagacagcttcactccgctccagccccggtactgcggtctgtggtaatttacatgggaatgggatgagatctagtagttttagatccaacgcaattctgggaagggttggtaataaaccaaaactcaatctatgcagtatttaaaaaataattgagagttgtgacaacttcgattcttttcaggaggtgctgtcttaagatagaagaaagggatcaagctcttatcttagaaagcacagacacgtttagctcagggtagtgcaattcaatgctaagtggctgctccatgaaatctaagggccgggtaaggggaagaggcccagggatttcttccttgtctgacactctcgggactagcattctggcaggtcttacaagttataatacaaaaccatcagataaattctaatcacgactgtgtagttcctccccaaaataattttcctcttagaagtaaaatcaggaaaggggctgagttctgaaaagaaacatcggggctgtgcccaggccctctgagtgtggacgctgtcccccgtgtctccatgtttactgccttattgtctcctttgtatgaaagtataatttacgtaattcgtccttggagaatcacagtggtgttcaagaaccttttgaggccatccaagtttttgtccttcagtaccttgaaatcagataatctcaacatccagaaatagcctttgatttgttctttctctgatgtcttgtgtccttgggatcaaagcctctttcactggcaccaaataatgcccagtgaggagttctggccatataatcctttgcgctgaacgtttttgatccaccactatcttcatattcctggatga

SEQ ID NO: 321634 - DNA, 752 bp, Homo Sapiens
ttatgggaggataaaacatttatttaaatggaaacactaatctttattttcatcatgctgaagtgtgtggttacaatttccaataaaacactatatataataagcaaaataagttagtacattgtaaacttatgcacagtttcatcaattaacagtttaagaacaaacaagccatttaagactttggagctacatttagtaaaaaattgcaaacactcaaatcttatcaaccccaagtaagacagtaaagagctattcaagacttcttcaaaccatttacacaattacatgtttatttttggttacagtcccctgctatgcacaagaccattggaatgctggaacaattacacattttaaaacggcaaaaagcaaagcaaggagataacatgccagccttagagaagctgtcttgaaagtgcaaactgcgttttctcttcctgaaccactaggataagaacgggtacctcagacgacacggcagggtcatgagcatgctttctataccccactggtgggacatttactggaaccaggtctccatgcctttgaagatacctccggttttaaacagtgaacaggcttcaactaaatatagtgcaaatcaaataccaaggagcaaaacgacagaatagagactgtcacagatgattgacttcctgtttctctacctggcacaacccacatgggacacattggcacacggtaacaacaacttctatttaggttttgatacggaaggcggagcggcg

SEQ ID NO: 321635 - DNA, 426 bp, Homo Sapiens
ccatctcctattaataaattatgttaaaatggactgtcttcagttttgaatgagccatcaatatgatagatattaatgataaaaataatatacacagattcactcaaataaagaattcatgaaggaaatgattaagaaccatctctacaactcttctaccttttggctagaacaaggtgcccaaagaagacagaatgtggagataggaaggaacttttccaaagaacttctttgcagagagctgctgttttgctgttgttgctgctttgagggagtattaggttatgttatttgtatcttgagaagattattattttttacttctttacccaacctcaagcctaatgtgggggcttctgtggaatcactgcggaagcttgaaatatccctcttgctattgggagactcaaaggacttgagaaagct

SEQ ID NO: 321636 - DNA, 669 bp, Homo Sapiens
caaaataatgtaacaaactaaaacctaattttagactgtctttaaggcacaccaccttcatattcctttgtatttaaatcccctgttctcttaacaggttctggataaaagcagtctccaagtcccaaatgagtggtgccaccagttttaaaagtaacttgcttggctcagtgcagaacagatcatttgatttaacacagagggggaataaaagggcgtattaaatttcaggcagattcgcttcatcaggtccagtggtcactacacccctgttgtactataggtctatgcttccctggtttccttcccattgatgtatccagaggttggcagggagcttgaggaagcaaaggatgggggcagggaggagggtcacctgcccactgcaactcttacccatgtgaggagtaggtttcactagtctattattagttttgttgaaggacttctgcaggggttgtgaggcaagagcttgtgaaagggccattgttgtgggaacagacaccacgggtacttgtggcagaacttagattgtcctgggagtaaattgtcatgacctttactcctcttggacactcttttcgagcatcttaaatcacagagctctgaaaaacatccttgggcttgatccccagcagtcctgaatcctgaaagtccacagctggacag

SEQ ID NO: 321637 - DNA, 1260 bp, Homo Sapiens
  misc_feature (1179)..(1215): n is a, c, g, or t
gagatgatggccattccgttcaaatcctagatcgttacagcttcagggaattcatattttgttatgtgtaggatactcttaaaatgtaattcattaaacttttacaatctgaaagacagggtttttaactaacatgagaccaaaactatgttctttgattagttttagatagtataatcgagtttattaattcttctgtgtttcttcactagccagtccaagctacctatgcatttgacccaaccttatttattattgtacagatgaagcgaattgactccctttagccaactgctaatggatcgaatgtgctttttattgtaattcaacagctatagagagaaagataacttattgtgtgtttgatttcagggagagagattttctttggtcatccataatagagattgataagatttagcaactggtgttggagaaaaaaagaaaagcaaatgagtgttttcaggtttttttgcattatatgcatttatgtaatgtttctgttatcagcaatgtgcaattattttattgagaggaataaaaaagctttctatgagtttggtatggtgcgaggaaaatcttacagtttgaattatgacctagaaatttttcattcccatgtctacctaagaaggaagcagtaaatccataatttaccttttgggcaatgctttgtgagcaaaacaaagtcacttctgccataacatcttgaatttaaccatatatgccagattactttatatgcatcaaacaagatcaccagtgaagtttaatctagctaaacactggtcctgctcctgagatgggatcctatgtgtttggaaaacgtgataggcacacgaggatgagtggctttgtatcgcccagagaggtgcttgtccagatttcacatgcacatgaattgcctggggatcttgtgaaactgcagactctgctccaagtaatctgggctgggcctgagattctgcatttctaaggagtctcagggatgcctatgctgctggcctaaaaccacactcagaaacgaggacctagaagatccctaaaacagaataagaacaaatgtgattgtatttctggattctccctctctttcgaattatctggacttttttgtttttgtggcacatagtgattcatattcaccgctggcattaacaacacagtggcatctttttnnnnnnnnnnnnnnnnnnnnnnnnnnnnnnnnnnnnncggtggcttcaagcttgttttgtccaattaccacagtttttattt

SEQ ID NO: 321638 - DNA, 672 bp, Homo Sapiens
  misc_feature (21)..(21): n is a, c, g, or t
  misc_feature (195)..(195): n is a, c, g, or t
  misc_feature (358)..(451): n is a, c, g, or t
  misc_feature (655)..(655): n is a, c, g, or t
aaatttatttgccttggaatntatttatttacaattgatgattgatatcaacaattgaggtaaaaatatacatgaggtataaatataatatttaaatgcaatatcatactttatttccattggcaagataacaatgaataaaatactcgtggtatttgacaaacaagcttgatgcatcgtttttcctcctttttncccctttcccttgttttaaaaagatgcactgtgttgttatgcagcggtgatatgattactatgtgcacaaaaacaaaaaagtcagataattcgaagagagggagaatcagaaatacaatcacatttgttcttattctgttttagggatcttctaggtcctcgnnnnnnnnnnnnnnnnnnnnnnnnnnnnnnnnnnnnnnnnnnnnnnnnnnnnnnnnnnnnnnnnnnnnnnnnnnnnnnnnnnnnnnnnnnnnnngtctgcagtttcacaagatccccagggcaattcatgtgcatgtggaaatctgggacaagcacctctctggggcgatacaaagccactcatcctcgtgtgcctatcacgttttccaaacacatagggatcccatctcagggagcagggaccagtgtttaggctaggatttaaactttcactgggtgatctttgttggatggcatnttaaaggtaatctgggc

SEQ ID NO: 321639 - DNA, 573 bp, Homo Sapiens
  misc_feature (89)..(121): n is a, c, g, or t
  misc_feature (252)..(252): n is a, c, g, or t
  misc_feature (255)..(255): n is a, c, g, or t
  misc_feature (273)..(338): n is a, c, g, or t
  misc_feature (361)..(361): n is a, c, g, or t
  misc_feature (378)..(378): n is a, c, g, or t
  misc_feature (468)..(468): n is a, c, g, or t
  misc_feature (534)..(534): n is a, c, g, or t
tttaaatgcaatatcatactttatttccattggcaagataacaatgaataaaatactgtggtatttgacaaacaagcttgatgcatcgnnnnnnnnnnnnnnnnnnnnnnnnnnnnnnnnnaaaaagatgcactgtgttgttatgcagcggtgatatgattactatgtgcacaaaaacaaaaaagtcagataattcgaagagagggagaatcagaaatacaatcacatttgttcttattctgttttaggganctnctaggacctcgttactgnnnnnnnnnnnnnnnnnnnnnnnnnnnnnnnnnnnnnnnnnnnnnnnnnnnnnnnnnnnnnnnnnnagccagattacttggagcagagnctgcagtttcacaaganccccagggcaattcatgtgcatgtgaaatctggacaagcacctctctgggcgatacaaagccactcatcctcgtgtgcctatcacgtttnccaaacacatagggacccatctcaggagcaggaccagtgtttagctaggattaaacttcactgggngatcttgttgatgcatataaggtaatctgggcatatatg

SEQ ID NO: 321640 - DNA, 488 bp, Homo Sapiens
  misc_feature (29)..(29): n is a, c, g, or t
  misc_feature (47)..(47): n is a, c, g, or t
  misc_feature (67)..(68): n is a, c, g, or t
aagtaaatcctggggccttggccctcccnaaaagcaactggggaatnacaggcgtgaagccaacagnnatctaatctggccctggaataacttttaaaaagcccaagcagaaagctgaacaagtttcaagatcatcccgaactccccccggccccttagtgcgccttgccccactcctcccactccagttctacacaacctccacgagcaggtcccctttcctaagccacaacaaaaccgttccggtccaccctgagcaccctgcacagtggcaagcaaaaaaacgccagtttcttcctaacaaggcactaggcttagtcactgtttgcagtgcactgtttgcttaacacagaagcaggcagggtgaagaaactggtttggctggtttgctgggtgagagggagcgcaggggatcttttgaaccaaacgtaaaacatgggagactttcaaacagacagcaccaagtcctcctggggctctaatatttc

SEQ ID NO: 321641 - DNA, 1123 bp, Homo Sapiens
aggcgaaaaaccttttatgaaagctttggaagtgggcggggccccactcgattgataggtatgggtccggggcctcttttttacgaggggtggtcgggatttacggtgggtggggaaaagaggctgcggttacgtgttggagggtgtgatcgggcgttgtttgggtccggagtgttcggtgtggttgttggggatttttaaaggtttcctaaaaagtacggaagttatttttaaaagcatagccatcaagtttgaatctcatgaaacaaagggcatctcttcattataatgttgattttggcaaaaagtaaaggccagcatacaatagatattcatgataatgtagtttaaagtaagagggtgtttgcttttggtaataaggtagtgtgaaacttactatgtaaatctatgttggttatttaggccatgtttcttgtctttttagaagtcttcaggcttaatattttaaaagttgccctttttatttgatacttctactttttgctggaatagaggcatagaaaagattctcactgcttagactaatacactcatacaatacatggctaaactgaaataaaaaggtaagatatcttaggaatagtagcatttacgattgtgagttgttttaaacgggcaaaactactaagatttgttttagcaaaaactcaagggaaaccaatcttgggaaatgatcgccaacctgttttataagagttatttaaaagtctaatctctttgctagagaatgccattttaagcttacttggcatcccactttcatgatatacatatgcatatttcactgaggcaaggaacttggatatatcattccatcatagctgtgtagttaaacaaggaacttgtccactgaatgaatctattgcttttgtgcgtgtaaaaggatatctattctgatcactgaaatgtgcaatgaaaggctacatttagaagctcagaaaatctgtggttcaatatgtagaagtttcatctacaaaagaatgggaatgttataattacgataagaaattacaacgtttaacatatcataaacattacctgcaagaactttttaatcgcagtaatatagcatcaaaaaggtacatattcttgttcatgaaaa

SEQ ID NO: 321642 - DNA, 612 bp, Homo Sapiens
gaaattttagatttctttatgttttaacaaattaacaacaatgataagaggacattagcagcttttcttgggtctctttgttaacaataactcgatcctgcagccataacaggggatgtggccaagttttagctggcagaccagtaagccaatattttacacaatggatgacatttctgaaagcagaggcagagacagacccaaagtcacacatgtagtccaacaaacaaagtttctgccatttttaattgtatttagagcaacaaaagattccaagattacaaaaagagaacagaacactagcgcttggagctggtcctgctgcccagtggaggccaagtgccaccgtgagaaataagccccatctaaagagatttcaagcaaaattgtttcttttaagaaaatctttgtgtgatgctttctttctctctctcttatttcttttttccttcaatattgaaaattaatttttatctctgtttacatagtctgctccctcctgctgccagatttattccaaggacagcacaagaatgtcatgtctgaggcactccctaatcaatgttccagtctagaggaaagcagaaaggtgtcactgggttgtgaggggac

SEQ ID NO: 321643 - DNA, 2621 bp, Homo Sapiens
  misc_feature (492)..(504): n is a, c, g, or t
gtccatcccagcttctagagatgaggtagctcatgctaagaaatgttgggtcatttttcctatgaaagttcaaaggccaaatggtctaattccaatcatcacatttgattagagtcagctccacaactcagtttctagatctttttcttcattataggcttcaggatgatgagattgtacatgtggaagagtctcaatttagagtccttggacatatgtttgtaaagttctatatgtcaattattttgcattcaatatcttcttaaataagaaagtgtaaatgtattaaatggtatatactagtgtgacttctatcaatattgatagattgatcaagaggagaaagatatctttaaatttgaatgagaaagatgtctaaacttatagtcttttacaaaaatttaagaagtcgaagtaaattcactttgttctcccaaaatgccactggaatatatactatttaaaaattctatttaaggcagtgagaaacgnnnnnnnnnnnnnaagattctccttaaagagtctctattatagttacacaatatcaagacatgcatgtaggtctcgatcacaagttaaacattttaaactcatttttaattgacaatcttggaatgagaggtcacaaaagggcactaatttctatttttcaactgcagccaagcaaaataaacatgtgttgtggctctatataccccactctttaagctacctgccaggaagaagaatttcctcataaatactaagcaactttttcattacactgaaataaattgaagaaaacggagatttatttattcaatcagtttactttctgcaaaggtggtcattgtcattggtcatcttaaacctaaactgttgtattgaaaaatatttaaaatcaattaaaacttgaggattgtaagtaaaataaatattctgaaggataaggaggccaggcacttaagaccatatatacaatgctgatgcaggatcagccattacttcaagagtctcaggatcaacttcaaacagtcaaagttcttgtgaatggcggtggtcattgatggtggtgctcattgtcgatgtgtcttggcttactttacacaaaacaaactggcccaatttcaacgccgaattcctggtctgtgccgccaacatccacaggagcaagatctatgatgggcaagcgtgccacattctgtgttctatattcaaagacagtcttgcccacatttccattccgcttagagcaagtgtcttgaagaacgatataccggaatctaatatttccctctgctttgatatctaagtcatttgcccctttgagaaccacagcttttttgaggttcttagcttgatcgtccatgtatcctacactgtttttacagatgtaagtgatgttctgggaggcttcttttgataaaaggcgcaaaaaagtcatctgagtaatggctgtattaggtgattggtggtctccataagcgaactgagaccctctgttcatatcaagaccataccaaacaggtttattgtcaggagatttactggcccaccaggttttacgtggtacactggatgggtttgctgaaatacatgtttctcctgtttccatgttgcagtaaactttgattgcatcttcaacagatccttggttaggatcaatccagtattcaccactctgctttgcggaatggcaaagctttaggtcatcacacgtgcgggctgggtgctttttcgagccatcggggctgcgcatggtttcaatctgactactgagtgacttcagggtagcatgaacccctgggtccgttttgtttttgtcatcaggagccgcctgatcttcagtaaactcaggaagtggatctggcatgctttcatcatagtgccccatgatatccccaagagcagctgtaaggtggccagggggacccggagggccaggtgggccaggctcaccaggagggccctcaggtcctgcttctcctacactgcctcgtacacctggaggtccaattggcccaagtggcccagggtttccttctttacctgaaggaccaactgggcctggaggacctcttgggccaaatggtccagggattccagcacttccttgttcaccatttggaccaggagggccaggaagaccctgaagaccagtaaagcctctgtggcccttctgacctctggtcgcctcggtctccatgatcacctttgtcaccacgaggtccttggggtccaggtaatccacgtttcccagctcgaccaggtggtcctataggaccccgagaacccggatctcctctttgtcctgcatctcctggagcacccacagggccaggagttccaggggcaccctgagagcctggcagacctgcaggcccagggtctccacgatcaccacgttctccaacagcaccatcccgtcctggggtaccatcattgccagctggaccttctggtccaggttcccctacaggaccattggagcctgggggccccacaggtccaggtggacctttatctcctgttgcaccagttggtcctacttttcctggtgttcccttcagatccttcttcagcctcgtgccgaattcgccacccagcctcgctacctaaaaccgctagtagtactgcaccgg

SEQ ID NO: 321644 - DNA, 891 bp, Homo Sapiens
  misc_feature (47)..(105): n is a, c, g, or t
  misc_feature (801)..(811): n is a, c, g, or t
tgtatttttagtagagagagggtttcactgtgttagccaggatggtnnnnnnnnnnnnnnnnnnnnnnnnnnnnnnnnnnnnnnnnnnnnnnnnnnnnnnnnnnngtgtgagccacagtgccaggcctagaaattctaatacaataagattagggtggagtccaatagtctgcaattttaatatgcaactcaggtgattccgatacaggtggtctaggagttcattcgttttcagagcactcacaaactccctgaaatacataaacaagcccatacaaaattttttatacaagacatcctaccccccaaatctaatgatttcatcagattttcaaagggagctaagacctaaaagagggtaaaggctacattgcctcagggaagccctaattcccaggtaaaattaaacctgactaggtaccagatcgttccctttatttgtaaagtttctttcagcaacactggttaggtcctttttctcctttttcagatgtacaggtagtaactctgcagtctttatacaattaccaaatgtgagtaaggaaactattaatatcataattttctttgtaagagatttgaggtttgcaatttttcttatttaccttatttgtagtttttttggtcctcctcatcttcctaaatttgtagttttattttactcttcatttaatgtagattatagaggaattataaagctgtgttttagagtaacgtactgaggctcgatatggtaaattttaaaaactgttgttatttttgaaagctggtctaaatatctttatgtaaccaaggccattnnnnnnnnnnnggttctttggcctcttgttttcagttccctatagcttactcatagctgtgagaaatttttttctgtaagtcataaatacc

SEQ ID NO: 321645 - DNA, 618 bp, Homo Sapiens
  misc_feature (200)..(200): n is a, c, g, or t
cttttctaccaggtatgaccttttaagtgaaaatctgaattgttctaaatggaaagaaaaaaagttgcaatctgtgcccttcattggggacattcctctaggactggtttggggacgggtgggaatgacccctaggcaaggggatgagaccgcaggaggaaatggcggggaggaggcattcttgaactgctgaggatggnggggtgtcccctcagcggaggccaagggaggggagcagcctagttggtcttggagagatggggaaggctttcagctgatttgcagaagttgcccatgtgggccccagccatcagggctggccgtggacgtggcccctgcccactcacctgcccgcctgcccgcccgcccgcatagctcttgcagacctgcctgaacgcacatgacatagcacttgccgatctgcgtgtgtccagaagtggcccttggccgagcgccgaactcgctcgccctctagatgtccaagtgccacgtgaactatgcaatttaaagggttgacccacactagacgaaactggacccgtacgactctttttatattttttatacttgaaatgaaatcctttgcttctttttaagcgaatgattgcttttaatgtt

SEQ ID NO: 321646 - DNA, 428 bp, Homo Sapiens
  misc_feature (19)..(19): n is a, c, g, or t
  misc_feature (39)..(39): n is a, c, g, or t
  misc_feature (42)..(42): n is a, c, g, or t
  misc_feature (51)..(51): n is a, c, g, or t
aaaagggggtacccaattncccaaaatggggggggtttnaangggggcccnaccccctttttacccccaaggttaaggttttccccccctaaaacctgtgggggtagttttaaaaatcccccatatccaggggcaacaaaaatttggttttccataccccaatactttaaaaaagatttttaaatacctgacctaaagagaaaggcattgtagaattagtagtacgttacatctgattcacattagtaaactgtcaagatttttttcaagttttcatctattcatggtaagaaagcacaaactttcagaactgaggaatgaattaaattttgtctcccgttttggaaccttttcacaatgcttctagactgatgtgtctaatacttcctgctgggcaaaatatccacaaagtacagaccactgataac

SEQ ID NO: 321647 - DNA, 1069 bp, Homo Sapiens
actgatatgaccataaatatttttattaaatgtgaaaatacacgggcataaaaatagtacccatatttgtagacatgtctgagacccatttcaaatattaggttccttttttattaaaacactacattgagatggattaagttacttagtcttttctcattcaaaacaaactaaaacctcacagcaagagtaatattttcacaaacatctccaatgtttacctcctccttgctcggctttccactgcaggtaagtgtttcagccacagacaagtgcaacaaaaccggttactatacacaaagccacgcagtgataattttactcttaaatcaatcattcagcaaatgagatcatctgtaaacaaacaaaaaaaacccccaaataatcccacctcttaacgtcatttgaaattacaggataaactgccactaacaaaaaaggaatgatctgatttagaaaaaggatattcgttgttggcaaaattaacatttggccttcttccttccctttataaatttggaaaagtcaactacattcaacaaagttgcgtgaacttctctaggtgataccattgctgtgtgctcagtgaaaactttgcaacgcccatcaccagggccgtgtctgtaacctcaccagggagccattttatgtagttttttcatggtaaatgtcaaagacaacttctgacccatttaaaggtgaaatttttcatcatccattgtgagtagaaaatggtatcaatttcaaattgtggttttattggctaccttttttaccaagttatgttttctcttaaactgtgggtagttttaaaattccattatcagggcaacaaaaatttgttttcataccaatactttaaaaaagatttttaatactgactaaagagaaaggcattgtagaattagtagtacgttacatctgattcacattagtaaactgtcaagatttttttcaagttttcatctattcatggtaagaaagcacaaactttcagaactgaggaatgaattaaattttgtctcccgttttggaaccttttcacaatgcttctagactgatgtgtcct

SEQ ID NO: 321648 - DNA, 489 bp, Homo Sapiens
caaaaataaaaatgactttatttttcttacggattgtaagaataagacttgctctattttaaaatgtcaatgatattgaagaacgtaagaaagaatatcacccataattccatctactcagagaaaatataaaggtccagatgaactgggttatgctatgataacaggacagcaaaaccctaacatcttggtggctcaaaactgccaaggtttgttatgttttttcatgcatgctatgtatccagtgtaggtgatttagggactcagtttcatattatcctcattaagggccctaggaggaccacagtctctatcatcataaaagttgctcattactgtggaaacatgagggaaacatggtgaagcaagcagtggttcttaaaatcttccatccacaagccactcacctcatttcatttcatttcattggccaaagcaagtcacatggctgtgcctaactgcaaggggatggggaagtgtaattcctga

SEQ ID NO: 321649 - DNA, 536 bp, Homo Sapiens
aaagtagcagatgcactttctaggtaatttttgccttccttgcttaattgtagactaatatatacataaagtctacttcattgtgttgcacagaaatctttggcatgacatttcctgtagtaaagcatgttttgtccctgccccaacaagcaatcttttgagtgacttactttgagtctttgtcacctttcctctgattttttcacatggtttaactcagtgtacccaagagtactaggtgcactcaattctgctattaactctataagcaagttcttaagaaagttaatgttaaaaaataatcttaaaattgtcttgataggaaaaatgtatttgaaattaaaaaaaattcttatgttgacttcttggttttgaaacaatgaatataaatgtataagctgaatcctaaacatcagaagacaaatccagctcttgattacatctagatttttttctcaagaacaatggcctttacctttcaccattagtattatcagtaatccatcccagtctttttagatgtacttaccattttt

SEQ ID NO: 321650 - DNA, 643 bp, Homo Sapiens
agcggatgactcagcactgcccctcaacagggatgactcagcagggatgactcagcactgtcccttagcagcgatgacacagcaaggatgactcagcactgcccctcaccaaggatgactcagcactgccgctcaacagacatgactcagggatggcttagtactgcccctcagcagggatgactcagcagggatgactcagcaccacccctcaacagggatgactcagcagggatgactcagcactgcccctcaacagggatgactgcagggatgactcagcactgcccctcagcagggactgactcagcactgcccctcagcagggatggctcagcagggatgactcagcattgcccctcaacagggatgactctgcagagatgactcagcactgcccctcagcagggatggctcagcagggatgactcagcattgcccctcaacagggatgactcagcagactcagcagggatgactcagcactgcccctcaacagacatgactcagcagggatgactcagcaccacccctcagcaaggatgactcagcagggatgattcagcagagataactcggggatgactctgattgtccttcagcagggatgagtctgttttgctccgatggaagcatctgtagt

SEQ ID NO: 321651 - DNA, 605 bp, Homo Sapiens
ttgaggatttttgcatcaaatgttcatcagggttattggtcttatggaatgagttaggaagtgttccctgttcttcaattttttggggagaatttgagtattgcattcttgtttaaatatttggtaaaactcatcagggaagccatctggtctaggacttttgttgggagatttttgattactgatccagtccccatactagttatggtctattgaaactttatatttctgcatgattcagtcagtagattgtgtttctagaaattttgctatttcgtctaggttacccagttgtttggtgtacagttgctcataatactcttacaatcccatttctctaaaatcagtagtgtcacttctttcatttcagattttagttgtcttttttcttagtcattctaagaaccaaatcctagtttcattgattttgtctttttcctgccctaattatcatttcctttgattttggggtgatgtatatgagatgtcctttgtctcttgtaacagtttttacttaattgccatcttgtttgatattagtatatctgttttaacaaaagaactgagcacatttataggatgacggggtcccattaacatgtcat

SEQ ID NO: 321652 - DNA, 589 bp, Homo Sapiens
ctttttataccactttattccaacctgagcacctcaatataaaactaaacactggtgaaccgttttcctaattctgcattatcataaatgtacaagttctcctagcagtccaacacttaaatagattaaatcatctctgacacatggtagctttcatataatgaaaatacctaaaataattagtgcaatatactgaactgatcaaaataaaatgaactttggaaaggaaggctgcaagattgttactaacatattgcaatactttatgttacaaattacgggtacattgtttattatggttctagccatggaggaacaactgaagccccttcctgtcaaagggggagagagaaataattagctgttttagtaacagtacattttgtatgcttttaagcaactcttaaatattacagaaaagtaatacagatatggagactacaatgcagtaccctatttacagtacagctgaagatcgaatttaaaataatcaagtttgaatatacataattgttagtgcattgactatattatgtcaaaagggaacaaaagccccctccccaccccaaacaacaaaacctgtgtaatg

SEQ ID NO: 321653 - DNA, 607 bp, Homo Sapiens
tttgagagatattttgggagataaaatccatgtattatttactaatggattaagtatgggggcttaggaagagggaggaatatctttggcaatagtgttgtgtaatactgtccactgtagcaagtgaacctatagtgttagcaaatcagatagatgattgctgcagcagcaagttacagaatataatttggaaaggaaaaaagccttcaatcattaaataggaaaacagaaggcaggtaaacaatgctatggtttaattatgttcaacttacaggcttataactactagacaaccaatggggaattcatagtttgccatagagaatgcctttgggacacataacctgtttggaatgaaaaagccctggagagtattgtaaaataacaaatgtcaggtttgatggaatgactatgcatgcaattaagtgattttctttagtgctagagttcttttttcttaggtaaatcattttaaaaaatggaccagactttgtgaaagtagatatgttacataaaataatgttagctaaagatgaatggaataggttaagagtgtcttcttgaaaatttgaactatatctctttcaaaaagaattttattacctct

SEQ ID NO: 321654 - DNA, 320 bp, Homo Sapiens
gtatataaaggattaaaaaattccaatttaatacattttggaaaagcaaatgtaaaatgacttgggcttataaaaccagcatttacaattatctgtgaatagtcaaagacaaatcatagaaccaatctgattacaaatccaaagtaattctaatgttggttacagaatcactttcccactcccccagtaaaagtccaggtgttaagttgtacacacccccatgctacacacactccttcatctccttctcagtgttttcataccccagccgcattacacacaccaggcacatcttctctttcacagagcttatcagaatg

SEQ ID NO: 321655 - DNA, 400 bp, Homo Sapiens
ccagcatcgagagagcccgtggcttcctggagagaaaacttcccgacattcagacaacctatgctgtagccatagcctcctatgcactggcccttgcccattgctcccaagccaacgactgcctggacagctttgccagccctagtgggtgtgggatgcttcttaatcaacctcagtcatggagtggggagggggtgatctcaaatccagcaatgtgttattcatcacttagtgtttcctgagcatccactgtgtatcacctcctgagctcagaccctgtgagaccaagacaaaacccactggccagtggatgagcacaatctgggatccctgtacaccattgaggccacaccctatgggctcatgcaaaagctggagctgggccaaagagctgggccaa

SEQ ID NO: 321656 - DNA, 584 bp, Homo Sapiens
gtagaaatgtaatccaagtggctattctctatgcatgtagctcctaggttcaagagcagtgtggtctgcggattttctacacaacctgccataaatgaaatttaagcctttggaaatttatagcattttcagctaatttgcattatttatctctgcaagatattgactagaaatcacgtttcagaacttctcagatgaaaacatcatacaacccttaaaactaagctcataatttaaaaatgtatgcagattaataggcttaaattgccaggactttagatagacattaccacttccaggttaatacttttagcggtttttatgccttcaatggtttgaagccctcaaccttagttgaaaacttaaaaatggcattgaatggctgctgcaataaggacacatgaattttgggcttaagtggactaggaggacttaaatcttgcttagggcttttaaaaaatgcccacccactgggtctagggattgaggttattttcctgaattatggctaattatggattacaattcaaggttaaagatacacatatagtattctcaggttattcatatgatagcatttttta

SEQ ID NO: 321657 - DNA, 602 bp, Homo Sapiens
cccaaccctgcttttctcaaaagtgaaaatgtataggctctcagaggagacagatttaactctgcttctctaatgttattgaattaaaagctgttcacattagtggttattaaatattgaaataacactgggaagaaaaagcatatataaatacagctaaaaacaagaatagatattcattctcacaaagggagacagcaaagaaaatggaaagtgcactggtgctagcgttagacagcttgtgttaatgtctcaattctgctactaactggttgcagcttgtgtgaccttgggcacattgtatgatctcgcagaatatcatcccaaatctgcaaaatggaattggcatcatctcttttgcaagattgttatgagaattaaaaggttcttcattcaatataataataaatattttgtatataaatgaatatcaattaaaagttatgactaattccacaagtcaaacatataaattttatttcttgattcatgatatgtgatagtattcataaaaatgtacatgcatgataatttcaaggaataagtatatatgtgagaatcatggaaatgaaattaataatattaactagtaattaaattgt

SEQ ID NO: 321658 - DNA, 527 bp, Homo Sapiens
tcatatttatcctctgttacaggtgtcaaatctcattttcctccagacccatttcctcagctacattgctggcattatgcaaaagctcctttccaatgttgtgcactctcaaaaaattcatccagaaatactaaggtttgggaaggtctgtgcccaaagcactataagcaaaaagttcaaagaagaaaaatacaaaactcctcatacaataagtctaatatcacaaattcatgaaacggcaactataaagagcaaagtattcagaaaattaagtacatatttcagcattgtcttaaagctaaaagaaattaaaatagctggttttaaatatctatggagttcaaactagattagtgttgaactcttcaccttatcagtatatatataataaaactttggttatgaatttatctgaatttcaatgaatgaatataagtctgctcactcttatctatttccaccaaagaaagcagaaagcatttctttacccagatagtattcttaatagcagaattttactttcatct

SEQ ID NO: 321659 - DNA, 1175 bp, Homo Sapiens
  misc_feature (51)..(91): n is a, c, g, or t
gtcccctcttcttcctttctctcccattttcctggctttttagcactcagnnnnnnnnnnnnnnnnnnnnnnnnnnnnnnnnnnnnnnnnnggtcctttgggactttgtgatgattaagaatttattccattctggattttaaaatgatgtgtttaatattttgttctcttaaactcttttgaagctatgctgctaaccaggtataggccagaaaggaggtggcccagtcagtaccttgctcacgtcagctaagggggacagtgatgtcatgtgggtgactcttcttcatttgaccaaggccagcctcctgttcttacctctgcccattcatttctggctatgggaaaactaccacctgttgagtgagccaatgaggccaggaagatcagaggggctgggttccggcccatggccacttatttgaatttctctgtagtaagctctttgtagggctggctccaactgcagtagccaaagaaaacctgtctgactcgacattttaatgcctgagagttggtgaaagttcagctgaagctaatgtctagacatcagcagtaactaggcatccagaaagtagcttcaaccaaagctaatagagcccaagtttccgcaggaagtttggtgctgagctgtccagagcagttttttatctgagtgttgctagcccttagccatgctttcttagctttattctcgcctgttcctaggcatagcctggaaccagagctatggctcactgctcgctttattctactccctagtcatgcggaacaacatagtctaaaaaggaagatgtggactggggagttaggagacctgatttctattccctatgcttctactaactagcctcgagatcttaaccgctctgtgcctcagtgttcccatctgcaaaatggggatagtgttaattgccctacctacctcacagggttgttgtgaggataaactgagacaatgaattcaaagcaagttgacaagtaagtgctatgcaaattgtaagaaatggaaacaatcatgttaaaagcaatggaatggacattggcagaagggttaatggattgtccagccctttctctgtgtggcttaaacccaggtcgccattgctttatacattttcacttagcacagatttgtaattatgcatgtaataaagcacagccttatccgaaaa

SEQ ID NO: 321660 - DNA, 486 bp, Homo Sapiens
  misc_feature (392)..(392): n is a, c, g, or t
  misc_feature (431)..(431): n is a, c, g, or t
  misc_feature (441)..(441): n is a, c, g, or t
  misc_feature (455)..(455): n is a, c, g, or t
gtgctttattacatgcataattacaaatctgtgctaagtgaaaatgtataaagcaatggcgacctgggtttaagccacacagagaaagggctggacaatccattaacccttctgccaatgtccattccattgcttttaacatgattgtttccatttcttacaatttgcatagcacttacttgtcaacttgctttgaattcattgtctcagtttatcctcacaacaaccctgtgaggtaggtaggggcaattaacactatccccattttgcaggatggggaacactgagggcacagagcgggttaaggatctcgagggctaggttaggtaggaaggcatagggggaataggaaatcagggtctccctaaccttccccagttccacatcttccntttttaggactatggttgtttcccgcatgactagggggngtagggaatnaaggcgaggcagtnaggccataggctctgggttcagggctatgcc

SEQ ID NO: 321661 - DNA, 609 bp, Homo Sapiens
accactttggattgtctcctgacctcccaatatgtaaaggtgaatgcttatcttacaattgctgaaataagaattagaactttgaataccaacttttttcttattaattttgtttgggctcccattgcctgtaatctaatgaattaagtcaaatatttgcctgtgaaggacatgtattgagtactgaatacctgagattcagtcacttaagttaatctccactgtttcttgaacgatgtgctggaagtattcccagacacacaggtgttgtcggtcttagtctactttaggtttatgtttctataaaggaataactgagtctggatgatttgtaaaaatgttttatttggctcactatactcatgactataaaattcaagatcgggcatctgcattcagtgagagccacagaatgctggtagaaagggaagaggagccactgtgtccagagaacacatgatgagagaggaagcaagagagagagcagggcagtgacaggctctttttaagaaccagctcttccaggagctaatagagtgagaactcaccctgagagggggcattcatctgttcatgagagatccatacccatgatccaaacatctccca

SEQ ID NO: 321662 - DNA, 881 bp, Homo Sapiens
ggggttgcggagcccatttttttccccagggccttgcgagcctcccgcacaaagcgttctttaagccagcccaccccccaaatagtttccagcagttaatcccgggcttccgcccatgttgggagactccctgaaaggtgggcccctgccgtttttgaggaggtgtttccctccatcattacccccaaaccccacaatgtgtgaggagagcaggcctctgggtgaactcacacattcatacccaaggaagaggcaaacacactcaagtccagagttcccagtggtgccgcccagacctactgtcccgggggtgttatggctgtccctcggcttccccagagcagccaggacagcctgcaccgcctcccagactcttgcaggaaggggagctctgccctggggaggaaactgacaggctgggagacaagactcccatcgcagggacatgcacagcagcagccacagccccgcggacggggcatggggatgggacaggcagggagccacactgccccctcagtgtgtgcctgtggttctgtcctggtcctgcccacttggagcccaggcagacaggtggcattgagcagggcccaggtccagacagccctctggccagatgtgactggaagaggctgatgccagggcagcaccaggccttctgcaagtcccagagccagtgtgcagaaagtgccagcacggcctgtgctgtggctcctcaggatgaagtcacgtccaggacaggagggtttatgcagacacacagacactgctgacggggacagggatggctcggccactatgaggctggactcttctgtctgttcagggagtcgatgtaatgaaaaatggcccccagcctcgtccgaatcgccacccaggcc

SEQ ID NO: 321663 - DNA, 1307 bp, Homo Sapiens
caagattctgaaaactttttaattcacatatagcaatttgtacattatagcaaaatttgcattattcaagaataagttacttgtacagtacataaaacaatacataaaaatttgccaaataccttctgcctataatgatacaagatgaatccactttatgttatcacaatgtgctgtatattctaaccaaacacaggatgtcagatgtgtccttgttaatatactcgcaagttccctctagcttgtgggagatgttagagctaacacatttgcagtaagggacttagtcctgaatagaaagcatgaaggaatctcaggcaaccctcagggaagagtccaaggccttgactttaggttaagaaactgttatgtaaaaatagtgttctctgggcccaagattttaatggattgctattcctttttcctacggtccagaaatgatcaaaggcagaagatttataccagataaagccatatggattgctggtctaaaattcaaggcaggttagttgacttaattctttggtgctggtgactgttagtttgtaaaagttcaataagtcagatgaaggaagggatggtgccgggagctgtcaagctgtactggtggggtctgtaattagagctaactggagggatcatgatgtctactgtccagtttggtgttgagccatggctctcggtagaagttgccggctggggcctggtcaggactggaaggagagtggtgggatgtgctgtgcctatggtgggctagctgcagccagtggggtgcctgccccacactgctgcccaccccttcatcagctgattctgctcccacataaagaaaggtgttggcttagtgtcacttcttcctagagccatgggagttttctgtcagcatgtttttgagctgtcctggtaacttggacgggaagcagtctggaggtgggtgccttccaaatctctgccacagaatctgaacttgcactttgcagcctgttagtcagagctgctaagtttgctctacctggtgtgcctcttggcaccacctgagagatgtatgtagagaggctgctaagaaatgagtgcccctggcatgaagacgtcatatcccagatgtttaacttctggctggagggagggaacttaatttggttcattatctactgggtacctttcctgtgcggaggggaggaccagtgactttccataataagctttctcctttaaaaaaacttcagactcttacttactcttttgcctcgtgccgaattcgccacccagcgctcggtggtatggtggtttgtcggcgccttcgtaaa

SEQ ID NO: 321664 - DNA, 432 bp, Homo Sapiens
  misc_feature (414)..(414): n is a, c, g, or t
ctgaaaactttttaattcacatatagcaatttgtacattatagcaaaatttgcattattcaagaataagttacttgtacagtacataaaacaatacataaaaatttgccaaataccttctgcctataatgatacaagatgaatccactttatgttatcacaatgtgctgtatattctaaccaaacacaggatgtcagatgtgtccttgttaatatactcgaagttcctctagcttgtgggagatgttagagctaacacatttgcagtaagggacttagtcctgaatagaaagcatgaaggaatctcaggcaaccctcagggaagagtccaaggccttggactttaggttaagaaactggttatgtaaaaatagtggttctctggcccaagattttaatggattggctattcccnttttcctacgggtccaga

SEQ ID NO: 321665 - DNA, 483 bp, Homo Sapiens
ggccgccgctccaccatttttatattaagaaatgataggaacattgacactaatgtggaggaatttgccaaatattttatttcaaaatttagcctctgatatcataaccacaagatattttaaatcaacagtttctaagcatactaccacagtttttatgacctctccatcatcttgtggtttctagagattgacagatactatgtttgttttatagatatggtaattaatgaaacaactttaaattgtcttccattctttcttcctcagttcatttctttttgtcttcccactgatagtctttgggcagctcttggaataaattctacctgttggcatcaaggggaagaaaattagcctggaaatttttatctttacataaagccaattatatagcagtttgattatgaattctaggtggaagaattagaatagtctttggaatgggttttgggtaacagccaaaatagggaaaagggtatt

SEQ ID NO: 321666 - DNA, 532 bp, Homo Sapiens
gcaccatggggactccaaatgatcaggcagtgctgcaggccatcttcaaccctgacaccccatttggagacattgttggattggacctcggagaggaagcagaaaaggaagaacgagaagaagatgaagttttccctcaagcacagctggaacagtccaaggccctggagctgcagggggtgatggcagcagaggctggggacctcagcacagccctggagaggtttggccaagccatctgcctgctgcctgagagggcttcagcctacaacaaccgtgcccaggcccggcgactccagggagacgtggcaggcgccctggaggatctggaacgcgcggtggagctgagcggcggccggggccgcgccgcccgccagagctttgtgcagcgcggactcctggcgcggctgcagggccgagacgacgacgcccgcagggacttcgagagggcggcacggctgggcagccccttcgcgcggcgccagctggtgctgctcaacccctacgccgcgctgtgcaaccgcatgctggc

SEQ ID NO: 321667 - DNA, 656 bp, Homo Sapiens
  misc_feature (83)..(83): n is a, c, g, or t
tccaagtagtgccttttcaacaatttttaacctaactgtgaggatctgtggatgtcagcagttctcaaacaatctgggctacnttctgtttcctggaacagagagtacctgctgtgatgcttctccaggtaatttcagcctagaggagcttgcaatagacacagtgcctgggttggtgagtccaggagaggggagaaggcctctaaaagttccaactccaaggacttgagatttcagagcaatcctaacataatacttcctggtcctgtcctggggtagaagaggatcagtgtcctgctataggaaggtggtcccttctgtatctatgggtccgaaagtgctaaagattttaatgaaggcgctactcatagaggcgtggttagggttaactggaatgactagaaatgttgaggtatctgagcctagcaatagcgggaagacactgctattcctgggcatgtggaatgaggagggaaatattgttataggactttagcaagagctagaattataaagaagggtgttacccagtggtgtgctggtaaatatttcacaactagcactctgaaaaaaatacataaagcattgacatatagtgtttactgatttctaaggtgtatacagtctcaccatatgattttctagctaccagtatg

SEQ ID NO: 321668 - DNA, 1370 bp, Homo Sapiens
  misc_feature (839)..(839): n is a, c, g, or t
  misc_feature (1198)..(1198): n is a, c, g, or t
tcggacgagggaagtgcgtttatgacaagtacgtcaaaccaactgagcccgtgacggactataggacagcggtcagtgggattcggcctgagaacctcaagcagggagaagagcttgaagttgttcagaaggaagtggcagagatgctgaagggcagaattctagtggggcacgctctgcataatgacctaaaggtactatttcttgatcatccaaaaaagaagattcgggacacacagaaatataaacctttcaagagtcaagtaaagagtggaaggccgtctctgagactactttcagagaagatccttgggctccaggtccagcaggcggagcactgtttcaattcaggatgcccaggcagcaatgaggctgtacgtcatggtgaagaaggagtgggagagcatggcccgagacaggcgccccctgctgactgctccagaccactgcagtgacgacgcctagcagtcctgccctgctgctgctgccgccccgctacagaggcaatgtgaccagtcacagggacagatcacatctccccagagtggcaactctggtgaaaccttttcagaatcatggcacgaggggcgtggcgtggtgctactgagaaggtcctccttcctcttgactttggtggtctgaaacctggtcttactgtccatgtgtgtttgggcccggatggtcagggtggggagcagggacggccatgggcacgcctggcccccgctttaccgactgttgaccccctgggccaggtgaggttggggcctgtgggccgccagtccatacggtgctgtcactgcccatcttcggtgacacctggggggtgaagtgctcancaccttcctctcgaggagccacattttccctcctttgtgttaggggacataacaagctctgctgggcttgagggacccagaccaggtgtctgcagtcagctcctgagacacagctggccgggacaacaggtgttacattccggggtttcctgtggcccgtttggactttgaagcttttatttaaattaaattggcccagggttggctggtgggtcaccccagcagaggcttctcccccatagcacgaggatgtgttgcctgggcacggtgactgcggttattccctggaggtcggcagacatgccaaccttgggctatttgagctggagaagctatgtgatgcctagccggtggctttnctgggctaggccccagtttgaggctcccctgggaactagagccaggaacagccagtggcactgacaaggggacggagtccaaggcgttattgggccacctgacagctggacagaaaaggggcagacacaccgaggatgcgatttaaaataaatgcagatgtttacttgaaaa

SEQ ID NO: 321669 - DNA, 593 bp, Homo Sapiens
gaggcttcagttctgtaccatttaatgcgtgcaaaggacattccatggtgtctgctgggttcagggcaactggctttcccaaggcatacaagaaaagttggcagaaagtcctcccctttaaaattcaagcctgaaggttttgtgtgggggcctactgccccctaatgtcttctggtgatactgcagcacagtccatcaaaatagtttgtggttttgccatctgttactccttatgcccacctggagaggggctagcatctttaggtgggaccacccctggcacaacatggtctctgaggtccagatactctgagggtaggggctggctctctctgcctccctatcccctacaagagggacagggagaggtagaacattgggatctttactcagaggctcagatggacccttgattctcccaggagtcatacattgaaggtaccagagcttccattttataaaagaaagcaagcctgccgtggacctgtcagccccacgatatctgtcggcatgggccacagccaggacagacttaagggctctccaggtgccagtcaagatgcctggctcaggccatcaggagctggttagcc

SEQ ID NO: 321670 - DNA, 1006 bp, Homo Sapiens
  misc_feature (56)..(65): n is a, c, g, or t
  misc_feature (138)..(165): n is a, c, g, or t
  misc_feature (176)..(225): n is a, c, g, or t
  misc_feature (254)..(262): n is a, c, g, or t
ggccccttaataagagaaaacagaagttctccgcgctcttttaaaaagaaaatctnnnnnnnnnnttgttgttagaaagagggtcggaaggttgttttaaaagtgggcgcgcggagatattccggggatggagggggnnnnnnnnnnnnnnnnnnnnnnnnnnnnactttggggtnnnnnnnnnnnnnnnnnnnnnnnnnnnnnnnnnnnnnnnnnnnnnnnnnnccaaccttttttataaaggccccttccannnnnnnnncggaattaaatttgggccctttaaaggaatgggaagggcttagccaagggggacaggccccattgttggggccttttttgaaaaatagttttcaaccagggggacccaacatgagacctaatagatccatctccacaatcatcattttgctgttaccctttcaatacccaatcaaatgtgggagtcattccagagaaaagtggttaaaagtagtctagggcatagaaaaagaggactctcacagataccaaggagttttactaccaaggccagcatggtattgcaggacagtgctggggagttgtcacaagagtatgggtggacataacacatttgtccatacagaatgatgcatgccccgcatccagcttcccaccaagaagaaaaaagagaggaggatgaggaaagccatggagtgagtatgtatgtttctttttaaaatgaaaactctcttagctttgaacacatcctgagaatcctttcttctttctagtttaccaaagtgcttgttacagtgaaaaacacagcccacaggcactgaggtgggactacagaaccttgctggaccacatcttttcagcacatttctgtgaccctctgtttttgatggagaaaacaacgctactgttatgaaacacagaatggagtcttcattaatcttccagcagggtaagtgctctggcaggtttccaaagcatgagaaggtgggggctctagtattccatcccaggacctctggccctt

SEQ ID NO: 321671 - DNA, 970 bp, Homo Sapiens
ttttcttgagaactttattcagcacaaaaatcctccaaatgattcaaacaggactgtatactcttcctctctctccacgggtgtatatgtgtgtatacatatagatattttactagcaatttagaaaatttcctgagcctcctgtctcctttctacttatattttaactaaaggttacagagaaatagctggagcagtttcaaaagcctgtctccaataacatatcagcaatagaggctgggaggcagtattctcttcccacttcctgaggcttttaaatataattatgctaatttttgcctttgcctcctgattcaactggagtctttgagttcaccactcaaaagctttccttaaccagagtcacctgataaggtgagtcagaagtctgcagaatcacttccaatgacgaaagcctgactgtttcccagcctcaaaaaggatacagcctagtagtaatgtgaatcatgactggtagaggggactgagcctgacgttgaacggcctggaagtaacacagcagtattcaaacactggagggttggggagggatccggaggtggaatgggggagacacacttgtagcgtggtagtccaatttttttgtagtctgatgggaggagaatattaatttggtccacagcaagccagactatatgtgtaataaaggaaggactgcatggatcctttatcatacactcctctcctccatgcaccaattcctatgccaaatcacagcaaagcagatggctgagcaaactgaagcccagacttcagagtaagtagtcatcttcaaggttatcatcaccagacatggaagcagcttctgataagctgaggcaggacagggtatgtgttatctctccagagctctttttggtctcagtgagcaacgtgctgagagaggcatctgtttctgtggccatgtccttcaacatgtctgggacagctctgttttcttctatgtctt

SEQ ID NO: 321672 - DNA, 1461 bp, Homo Sapiens
  misc_feature (498)..(534): n is a, c, g, or t
  misc_feature (697)..(715): n is a, c, g, or t
  misc_feature (757)..(817): n is a, c, g, or t
tttgttgtattagaaaccaaccagatgtgccacgcggagggggtaggtttattccgcgcccggttttttgtgtgattataagtagcggtggggcggcagaagtgatgggggagcaaaatattttttgtgtgccgcccccgcggttgtgtcgttcccacgggggtgggagaaaatagttatattttgcgcaacaggagcgagccagaaaggtgtgtgtgatgttgcaccattggggaggaggtttcgagggttgttatacaaatccccgcgttttgtgtgagagggatatgcgcccaattgcgggcggaagaaaaagtcttaataggggggtgtaatagaacacgatgttttaaaaaaagaggggggcacgacggcggggggggctataatttgggaagtatagaggagtccccactgggggggccgcgcccttgtgtgtggagagacccccggtgaatggcctccgcaagaactccccatttgggaaaatgtgtttannnnnnnnnnnnnnnnnnnnnnnnnnnnnnnnnnnnnaatttgttaaaatatccccaaccccttggtttatgtgcccagggttttttctttgggaaaccagtattgagcccaaggttccaatacactgtggggcgccccgccccccaaaaggaaggttttaggaaaattttttggggggggcgggggggccccacaaggnnnnnnnnnnnnnnnnnnnaaaattggaaggattgtgtggttttatgtgtgttaggtgtgnnnnnnnnnnnnnnnnnnnnnnnnnnnnnnnnnnnnnnnnnnnnnnnnnnnnnnnnnnnnnaagtatcagtttttattaaaaagtgcattttgattaatttatgatctaggtaagctgtaagatacccagtatactctctggaataataactttacaaagatttaaaacaaacaaaattttaaaagcctttttatttccttcaccattattgttttacaatacaaatatcaccttgtgaatacacaaaaaaatcctacggaagataattctgctgcacgtaaaatacagaatggatatatatacttcttcattcttaaaaaactattttgttctccacattggcaagtatagaatagaatacttccccaaacatatgtatgttaggagtaaaacttagagttacatgcagtttctgcacaaatatcttttaaagaaatagatctcttttttgttgttcaccaacaaaattgtcatgagagtatggataactaattcatagctttcaagttttaggtaagtgatcattttcaaaactctctttaagaaaagatattcatggctgttttcattgagtagttaaaatcgaactaccaaatcgacgataaaataatttaagtggtacatgtcattgctacctgatcacaatatgtgaacaggctctgactctaattaacaacctcattatttaagtcattgcaatttta

SEQ ID NO: 321673 - DNA, 1111 bp, Homo Sapiens
  misc_feature (888)..(897): n is a, c, g, or t
cgggaaactgaggatgaatgagggtaagcggttgcccagagcccgttaacccctccgtggctggggccctgcctagaacccgaatttcctgactaccctgtccaaggtattcatgtcacatcacactgaaacgctaaacctagagataggagaggccctctgggataaatccctgttccaccaaagaccagccagtcatcaaagatgaggagaagggcatccctgttactgttaacaaaaagctggctttaggcgtggcttgtagaatcaatctaactactagacaagttacatctcatatatgtgtggcttctttttcttcttttcgggggctacaaggaaggtttggagaaattatttccatcatacctttttgttagcctttttccatttctggccagtaagtaatcccgttcctgacaacagtccctttgttttctcaagtggtctgatgaaggactgcaaaccacagctcttgtgttttttgcaccatgggttttaaaatccgtcctctgcctcccacaaggagctactacccaagggaagggagaagattaattggtgacctttcgccgtgttaaaataggatgagtatgttgctggtcaaggcagaaacgctaacttccaactgtggtctgttaagagatctgctgggaaccttcagaagcactgccttccaaggcggggccacagcttggggtgttcagcacttgaggacgggtggagcttgttcaacccaaagatgtgtgcgatgaacggatctacacactggaaatacgtatcaaaactgcaacagcaaaatcatattttgtaaattaaaattgtgtttacttactgtgactactgttcagtctttattcagaaacctttttataggctttcttagcnnnnnnnnnntccatatctatggataatgtctcaatcttctgtatatatgttttattaatatgtaaatatttggattttttaaaattactatgttctttaaaaaagaattcaatgcaagcctggttgtgaaaatggtgtataacattgtgttgtggtatcaattcccaagatgttcatttatgtttgatctggaagaatacaataaattaccttaattgaaaaa

SEQ ID NO: 321674 - DNA, 601 bp, Homo Sapiens
ttgataatgtaggtggagagttttcaaacactgttatcggccagatgaagaaatttggaaggattgccatatgtggagccatctctacatataacagaaccggcccacttcccccaggcccacccccagagattgttatctatcaggagcttcgcatggaagcttttgtcgtctaccgctggcaaggagatgcccgccaaaaatctttttttgacttgctgaaatgggtcttaggagcttccctactttgtaattgactgactttcaagcaaatactcttgtctataaattccatgaaggagtgctaaggccatcactggaatacattagcgaaaaacttgtatcagggtaaaatccagtacaaggaatatatcattgaaggatttgaaaacatgccagctgcatttatgggaatgctgaaaggagataatttggggaagacaatagtgaaagcatgaaaaagaggacacatggaatctggaggccatttagatgattagttaatttgtttttcaccatttagcaaaaatgtatactaccttaaatgtcttaagaaatagtactcataatgagtttgagctacttaataaaatacatttaa

SEQ ID NO: 321675 - DNA, 513 bp, Homo Sapiens
ttttgataatgtaggtggagagttttcaaacactgttatcggccagatgaagaaatttggaaggattgccatatgtggagccatctctacatataacagaaccggcccacttcccccaggcccacccccagagattgttatctatcaggagcttcgcatggaagcttttgtcgtctaccgctggcaaggagatgcccgccaaaaagctctgaaggacttgctgaaatgggtcttagagggtaaaatccagtacaaggaatatatcattgaaggatttgaaaacatgccagctgcatttatgggaatgctgaaaggagataatttggggaagacaatagtgaaagcatgaaaaagaggacacatggaatctggaggccatttagatgattagttaatttgtttttcaccatttagcaaaaatgtatactaccttaaatgtcttaagaaatagtactcataatgagtttgagctacttaataaaatacatttaagtggtatacaaacaccacaag

SEQ ID NO: 321676 - DNA, 1312 bp, Homo Sapiens
  misc_feature (38)..(38): n is a, c, g, or t
  misc_feature (347)..(384): n is a, c, g, or t
  misc_feature (709)..(736): n is a, c, g, or t
  misc_feature (957)..(965): n is a, c, g, or t
cgactggccagccgaggacatgtttgaccatccccacnccatgcgagctcatcaagggaaagactaagtcagaggagtccctctctgaccttacaggttccctcctctccctgcagcttgatcttgggccctcacttttggatgaggtgctgaatgtaatggataaaaataagtaacaagatgccaacttttttcctttggggtaaaaggtacaaaaacaaactaaccacagttgaagagaagggcttccggagctgtatttgcagttttgtgttgggttttctaaaataatattcttacaaagtatttttttacctgttatgccctgtttgcaaaaacaatttagnnnnnnnnnnnnnnnnnnnnnnnnnnnnnnnnnnnnnnggaagtgagtcagagcccattttcaggaggcattggtgatgttcggctcacatattgtttgcagacacacaagaaatctggcttggccaggattggcactagctatgaagggctgagcgagtcacattaaggaacttcacggaactttatagcactccgacattttctgagcaagaggaagtcaaaatttatttaacacctaagcctttttgtagactcttttctatatattgcttaggctcaccatagtgaattctccagtgttaaaacttttctgttttcacatttgaactttatgggttttggggattttcttgtagttctnnnnnnnnnnnnnnnnnnnnnnnnnnnntgcaaaattttgactgtcagctacatgttggtaagacacaggcaaagtattactgtaactaagttatttttaaagttaaaatatatttttacgtgcctttggctttttattgcagagtctacattttatagattctacatcagatgttgtcacttatttccattgggattccattgtaagctgtgtatgtgcgtgtttggaaaagtgtattcatacttagnnnnnnnnncttcatctgttatcatacttttaacagcaaccaataacggattgtaaagtgtaaaggcacaggttactcatgatgcttctgcagagactgtgggctacaccacatatgttatttggaaatataggtattttagtacagtacatacttgcattacataggtacttcaagcaacacaataaaaagtaaatgataaagtgaacttgcttgtttatagtaataaacaaggaccataaggggattaagtatagctaggggaaattgctttctctgaaatgtacatgagccctttaggtaaggagatgaatttccatctactctcatttttgattactttccttatggggttg

SEQ ID NO: 321677 - DNA, 600 bp, Homo Sapiens
tgattcattaattctcctttttgttccattaaccatttcttggttgtgctcccaagctttcctggagcctccacaaaggagagtagccaggagtaatgagaggacggtcaggtgggcacttccaaaagctggagagacccttctgaggaccctccaccatcagcggggcctcaggggaccctgtcctaacactggtgtggctgctgggccagacgctcacctgcacagaactcctccctgctcccactctgaagggcgtttcagaattgactcatttccactgcagtctgccagaacccctgtaataaggagctgtgttatattacatctggggctgtgtgcatctttacaaatggagacacactattcaaagggaagatctctaaagtagggagcgtggtacttattctttgtttgaaacattccgatttgttgtcaggccttatttgttttttgtaagtgattgtatcggaggcttaagttgtgtggaatcagtcccacagtgttgaaagacaagtacctcttttctgacacttcttactacttttacaggtagtaacagctacaaatactctcccagaagtggagggacaccatttg

SEQ ID NO: 321678 - DNA, 438 bp, Homo Sapiens
gcaaactgcagttggacaagcatcttaactgcttttatctgagagaggtgtgaccactgttgtctcagtcacagaaattctgctgagtgtctttccactggaaataccataagataagctctcataagacaatttcactattccaaggtcagaatgtggcaaaagtggggctgctgctagcttaattattttagcagcttccctggtcaaaaactgtgaagacaaaattgaaatgctgatatgaacgtgttcattgggatgagtttgtcatcctctagagaaggcaactttcttgggatgagtatttattctctttggctctcaaagtattctaggtcaaggccattgctgattgggattggatcatagaacatgggctgagacccaacagccacagtagtgaaacgcatacaaaggcaagcacttatactgatccct

SEQ ID NO: 321679 - DNA, 549 bp, Homo Sapiens
tttactctaaccctgaattttgttagcacccaataaatgaattaattgaaatctggatttctctatacggagatgaagaaagtcttttagtgtagttattttaaaacaagttgctcctatttccttatcagaaacaagaccatatcaacaacccaacatttaaataatgaactgaaaatacttttaaaaaccataaaactcatctctatcccattcttaagtaaaaatcagtcttcactttcctacttagttataagcaatccccacagacatttgaaaatcagtgggcaaactaaaattgttgaataaagccaaactttttcaaaccaagtatttgttaaatgtcatatgtattgtctactataaagtgattcaatattttactatagaggatagcatctatttttcaaaaatgtgagaaattaaaaaaataacaaggcaacaactttggggtctgatacatgaaatgaatatgctgcaagatagagtctatcaaccagaaatcacctgttctacttgttaaatttctctaacacattctaaattgtg

SEQ ID NO: 321680 - DNA, 725 bp, Homo Sapiens
accttgaaagaaccgagaggggatttcttttattcattttttctaaaacgggggccaggctttttcttgataacacattctccgttcccctggtaggtgtccatttttcatttgactctgaagccattcaacaagtgtttctgctgttgaatctgggatctggcatctcaagccttctttctcatctgtttccatcatctctaacaatccacgcaggtcttccacaaggtgcagagctcgcaaacttcccatgaatggagaggtgggagattggcaatcaaaaatcccattggaatattccagagccttagaacctgctatgataccatccatctgctccaacgctgcagccaacatgtcacttgcatcactcatcattttattatttgtcaggggcaaattccaacccagatatttttaaaaagcaggtttaaagctgatttatttcagttcttcaaatcttggatgtactcagcaaagtgatccacacgttcttttatactggggggtggagagccgccggcactagttccaaaagttctggtccacctcctctcggagttcaaagccccagcactccggcccggccgccagctcgcagcacacgagtccttccccgtcctttccccaccctgcctgcactacaccatgtcaggaatccgggcaggcaccgagctgggagctgacatcactcccagttccaggtacctccccctcccactccc

SEQ ID NO: 321681 - DNA, 742 bp, Homo Sapiens
tacccatttttaattttttataaaacaagctacaaatagtttccctctctccttcacaaaggaaaaccacacaacaccacctacacacacgatcctgtgggagacaagatgcctggggagatctcgaagatccaaacatctacaggcaggcgccgtctccatgtgtgcatgcttcctccaggcctgaaagtggggccagtgtctcgtgcaaggcccactcagctccggcacgttgagttctctcattggggctaatgggagaaggcttccttcccacctttccacgttggggcagggccaccagtcattcctgaagataacctctaggactttctccaggacagcagggacctcctttagcccaagaccccatcagatcctgtcccgaagaaggttgtgctcctcccacagggacagtgcttgtggtgccaacgccttccagacccggaacgggtggaggtacttttagggatgtcgggttggaatacaagatgaggccagatttgcaagggtgatctgaggaggggaccagtccagggctacccaacctccctcactgccaccacagctgcttatgggaaggggcgctaagggccacttgctgctctgcctgaaggccacttgaataggcacagcacctgggcagagggagctgcgcctcagaccagaaggctgggcagcccaccctagaatccgcggaagatgcctgtgatgcctgtggaaagttgggccgggatttccc

SEQ ID NO: 321682 - DNA, 416 bp, Homo Sapiens
tttttgcttttccatgaaaagtttattagaagggcacttacaagaggaagagagggaatgagaggacacaaatctttaacaataggggtacaatgcttaaacaggtgctctgcttttaagatataaaagttagaaaaatctaaaacactataaatacatacatgctttttacaaagttattaaaaggtcaggctggccgaatagtgaaggtaatcaacacagtcaatgttctattccccatccctccacacacatcagagtccaggaacagccgagttgcaacagcaggcagtgaagggtgaggtgaaggcttcttgggataggatgggctccatctctctggtaatgctttcacccctaggcaggggagtggggggcttgggttccggagggacccttgtgggaagggggcccag

SEQ ID NO: 321683 - DNA, 2014 bp, Homo Sapiens
  misc_feature (691)..(699): n is a, c, g, or t
  misc_feature (1491)..(1500): n is a, c, g, or t
ttcagactgagctcctggcacaggagcttttccatgaaaagtttattagaagggcacttacaagaggaagagagggaatgagaggacacaaatctttaacaataggggtacaatgcttaaacaggtgctctgcttttaagatataaaagttagaaaaatctaaaacactataaatacatacatgctttttacaaagttattaaaaggtcaggctggccgaatagtgaaggtaatcaacacagtcaatgttctattccccatccctccacacacatcagagtccagaacagccgagttgcaacagcagcagtgaaggtgagtgaaggcttcttggatagatggctccatctctctgtaatgctttcacccctagcaagggagtggggcttggttcagaggacccttgtggaagggcccagatttgactcagagctgtctgtttttacacgcggccacttgtttagccagcctggtttggtgtttctggatgctgagccaaaaagccactacaccctccaccaacattcagaacttgctgtgccccaactcttccagccactgtccttgggaggagagacctttccaactttcttaaaaaaaattaaatagttatctgtctgaatggttttaagaaattattacataaatatacaaacacccgaatactagagtatacattacttctgcattnnnnnnnnntccattgcagaatcactgagaatttctcaatccagtttacatgaggcaagtttcttttctatgatagctgtgtttttgaaaagttgcctgtttagcccatcatctccccaccatcacctccccatgggagatgcttcatcatcattttggatccatgtcctcttgcgtacgtttttctgctttccctacccacttgagaagcggctgatgctccttaaactgtgatgaaaatacattgtgaagacggttacctgaaaggggcctacaagggaacatctttgccacacaaagacagtacagcttcgctgtgttgaggtttggttctggtaaaatggggacacgtttattttgggggaactcccaactctagccaagtcacacagtaagaaacagggtccagggctaaacgggtgcactctcttgctgctggtatcccccttggtgaacagtcccacaagcagcctgcagattcttctccctacatctcctgtaaggacgaaggagtggtgtaacctgagctccggccctgtggagaccctcatgaggcctgaggctaagaatgaaacagatctttgcttcttccccagattacttacatacgtgcatgccatgcacacactacttcaaacctttctgtagtcttgagtaaaagcatttagcctggaatatgtccaaactctaggaagccaaggggagatggagaaaaataaacaaactaagcacatgatatgtgctatagctcacttcagtatattaccgatggtttaaaaaaaataatcaccatgttcaatnnnnnnnnnnaattacaacacagacaacataaggacaatggagacgtctgccagcagctttgccctcatgtgtgctcttcctaagagtcaaagtccctgctcctgactctaggcttgtctcaaaatgtcaggtctacagcctgccaggaaggtggaccaactgagatgatgttcccagcacaggcctgtaatccaaaccggctggggtagctacctacgtatgtgctggaagcatctaagttactaaattgggaagaagcgaggtggggaggggagagaggaaagggaataaaagttggctccttggaaggtgctgaagacaaggatctgtgtcccagtgctagctgcacttgggtcagtctcagcacaagctgcaaggtgaagatgtcatggcggggagcccaggcaggggcaacacacgcggtcgtgttgactaggtgaacgccacttaaaactgctatccagtcaccagcactcctctagaactgccctggtttcctcttgcccttttcaactgtccttta

SEQ ID NO: 321684 - DNA, 541 bp, Homo Sapiens
gaaacattcgtttccctttattagctcagtgaggctgatgtgtactgcacatttaaaaaaaatcacaggaattttcatacaatgaataaaaccacaacaatacatgtagaattggcaggtggaaaaaaggcccggcaagggctcaactaatcgctcactttccctcttcagcatagttcaaccaacagtattacactttcacctacaaatcttaaagtagctccatcaaatcagcagttcacattattgaaaatgtctgtcacataggtacaaatttagaatcatcacattatagtacatggctattctaggtcatctatagatcaggtcttagactacagtgattgaagttctcattacagccatcaagaaaggacacataatcattacctactggaagctcacatctaaaggcatgaaaaggtttccttttatcaactgacccaaacatcataccccaatagtgcaaagttccctctctgctgctttgaatgttgacagcccaactgttgttctcggagtcgtttagcaaaaaattgat

SEQ ID NO: 321685 - DNA, 1255 bp, Homo Sapiens
  misc_feature (42)..(42): n is a, c, g, or t
  misc_feature (44)..(44): n is a, c, g, or t
  misc_feature (46)..(46): n is a, c, g, or t
  misc_feature (48)..(48): n is a, c, g, or t
  misc_feature (50)..(50): n is a, c, g, or t
  misc_feature (54)..(54): n is a, c, g, or t
  misc_feature (57)..(57): n is a, c, g, or t
  misc_feature (60)..(62): n is a, c, g, or t
  misc_feature (167)..(169): n is a, c, g, or t
  misc_feature (1221)..(1221): n is a, c, g, or t
  misc_feature (1229)..(1229): n is a, c, g, or t
aattttacatagagaaatatttatataaattatatatatatncntntntntatntgnggnnnccacataatccacagaaagatggggctgtcccagccgtaagtcaggctcgagggagactgatcccctgaccaattcacctgataaactctagggacactggcagnnnactgtggacctgagtgatgcacagccgtagagctgtggctaagggcaagccccttcctgccccaccccattccttatattcagcaagcaacaaggcaatagaaaagccagggttgtctttatattctttatccccaaataatagggggtcgggggaggggcggtgggaggggcaggagagaaaaccacttagactgcacttttctgttccgtttactctgtttacacattttgcacttgggaggagggaggctaaggctgggtcctcccctctgaggtttctcaggtggcaatgtaactcatttttttgtcccaccatttatcttctctgcccaagccctgtcttaaggcccagggggaggttaggagactgatagcatgtgatggctcaggctgaagaaccggggtgctgtttaagtccctgcttttatcctggtgcctgattggggtggggactgtcctactgtaacccctgtgaaaaaccttgaaatataacactccatgcaggcccagctgttgagggttttcttgatgaatgaatggggtaccatacatggttaagataaagccttgggctccggactttatctgaggtgtctggagaagttctcctgcccctccacttttttgcatctactctcactaaatgagtataatgtcaagccccaactttctaaaattataggaataaatggtagcagatacatccttctaacttgttatggaggactataaatgaagttactaaaaacaatagactgaaatttttagtttaaaatatgcaagcctgaacaaggggaccaacattcccaagaaactggaacccagtcagacatatgatcaactgcttaatgtgtatgccatgtatgtcatgtgtcattcctttcccccaccccctccctagtggaagtgcttgcctactcccctaggacaggtaagtcctgggaaagtctaatcctcaatcttttgggcacaagttttataagggccaaccaagccctcgtgccgaattcgccacacaggcggggcccgccggccgcgggccagcggcgnccccgcgngcgtgtttgttttgacattatgttgt

SEQ ID NO: 321686 - DNA, 691 bp, Homo Sapiens
  misc_feature (373)..(373): n is a, c, g, or t
ttgattgacaactttcacactttattaaaatctacttttttctgagattcaaagagctacatttttggttagtgtatgtctactataccttttttcatcctttcaacatcttttgtcacattttaggtgatgctcttgtaaacagtgtattgctagacctaaaaatccaagcttacaacttgtcctttacctgatacatttattccatttactttcattttggatttttaaaaatgttaacttaatacgtctctttcagatgtccctgctttttagttaattgtgttttctactctcctaaagacttgatttttattttttagttaactgaccgtttttaaagaggttttaggctcataggcaaaattggggngtggaattttcccctactgccccagccaggcattgcttctgactgcagcattaggcttccagtgggattgagtgctgcacataagggtctccacccccagcagatatggaaaggcaatcccctagttttacagtaaggcctgggacagaatccaaatttgatcccaacacccaagtgaatcctcctcctcttaaaaagaaataattgactgcataaccgaactgcagggtcaactcagatcctaccattcacctggaggtcctgacattgcacctcccagtctaggtcccaagaaaagaactctgtagcttctattct

SEQ ID NO: 321687 - DNA, 1104 bp, Homo Sapiens
ggtttttatgaagtgatgtttaaattttatttaataaaaatacagttttctttttaaatcaacaaataacattgtttttcagaaatctactcaaatgctgctccttagttatggcttaagagctacccaaagacttcagtgggtaggctgaggggaatagaaatgcagaatccttctttcagtagcctatatacagttatctcctacactcactacacacgtttgggcatgtagaacttgccccagtatttccccttgtgggtcaagtcatatgggctcagtactttccgtatgcccagcatgttggcagtggctattcgctcaaatgtccaggggttctggttgttacgttctctttcctcttgatcttttcgcatcttctctagagtcccgcggctcacagcctttgctgcgaagggcaacttgtgggcaacctggtcaaggaaaccttgcacttcttcaaattcacaacgcccacccatctctacaacaaggcggccagcttcacaggtgtcacgtagtggtcaatagcacctttgcctccccccatgcgatgcccaacacttttgcgagtgatgggcttgaaaggggctggtactcgccatatggcaaacatgttcttggggtccatagagcggttgattgtcaggcgcatcatttcaaagtggccccaatgcaggtagccaccacccaatgccaagattgcaaaattgccttctgtaaactccgtagcttcagtggaaggtccccgtatgtcacttaaatttttaggttctcttcttacttttggcacaagtggtgccctttcaataaatctaagcttgggtttttcaggaatggaaacatcttcaaaacttggtactgggagcagtgtctttacgccagcactggcggggaggagtgcccaggaatctgacaagggcaaccgcaggagcgggcactagcgcgagccagcagcctccacatggtcacgggcgtccggcggcgcggagctcccccagcgactccggctgtctcctgcacccaggtaagcagcggcgctccactacctagctgtaatcggctcaggacaccgctcagtggggccggaagttgtgttcaccc

SEQ ID NO: 321688 - DNA, 1217 bp, Homo Sapiens
tttgcagaaagacattattctttataaataaaaggttcatctgtgcaatattcacattagaaaaatatacattgcttgccatagaccttctctggataaaatcagacgaatctaggatctgactccacttcactgtgagggctctcgcggtgacgaccgactccacagcttctagaggaactccttctagcgggcccatccgcaggcacgcccctctgcatcagtcactgtgacaatgtcctcctcctgagacactattgtacctggaggggacaagataagcccatcggaagtctgaataaaaatctgcttctgtccctgagacagtaactcatgggctcccattggaaatttcaaaagccatggcttcgcggacagcaaccacgctctccagttctctctggccagagtgcacctccatcccacagggtaaccggttcaagtcccccgaaaggcttctgagacacccttcagtcaatagtgatccatgtgggccaggctgaggccctggcttgggcacagtcctgtaggcacagtccactgccacgctatccacagacaaaattttctcaagcggaggggctgccacctctgtaggcaggacgctggtggggctgggctgctggtggttcaggtggaagtcacaaaccttgccgaggtgtcctgcctctgcatgtccaggccccccaggcggcagggactctgctccaccaccagatgacaaagggctgcagaaacccgggctcctcaggctgtcccaggtgtcctggtctgaagagtgttccaaagcattctctccaggaaacgctgccacctgtgcctgggtcagcctcctaggctctcctgactgagcataaacaggcagcccactgacatcccgggatgagagagcagcacctatagaccccctcctggcttctaagttagccagtgcctgaagctgcgggcccgcctggaacacgctcccattgccaccagaaaccgtcgttgtatggctttcttcagaacggggagagacagtcacatttactgaaggggaaaaacctaaacattttgggaaacaggtgaacatggcgtgtactgtgtcatggcccactcactgcactcaccacccaaaaccagctaggccaagtcacctgccctgcagaaaagtcaaagcatcgatgctccttgctccttgggattggtagcaattttaaaaaatacgtccctattct

SEQ ID NO: 321689 - DNA, 790 bp, Homo Sapiens
  misc_feature (578)..(637): n is a, c, g, or t
ctggcatctagaatgcagtgtaggcagcagtgtgcctgggagacaagcagagatctcacggattcctttatttttcctgccatagcagcaaattttccttggagcactatttgaaaattaacattactgaaaaaattaagcccacttaaagggactctagtttttatctaaattataaaaggtgagaagacagttctgaaaaaaatgtatcaccttgaaactagaatgctttagttaatggggtaagctagaacgtaagctgcctttgataactcatgtaagagcagcatatgaatggatgataactgtctttcttccatttaattcagctacttcctattcaatctcaaatctcagttggaaagcaatttccctcacttgacccatttttcttctgcattatatctttcttctggttcttcaacacaaaaagtttgaaaagacttgtaagcagattcagacacctggtttgggctaagcgtatttcattatttggctttccagttggaaggataacagttttacttctttacattttgttttgtttcttggttctttttgagacaggttctcactcnnnnnnnnnnnnnnnnnnnnnnnnnnnnnnnnnnnnnnnnnnnnnnnnnnnnnnnnnnnngctcaagcagtcctcccacttcagcttccaaagtagctgggaccacaggcatgcactatcatgcctggctaatttttaaaattgtttttgtaaagacagggtcttcctatgttgctgggattgcaagtgtgagcaacctcacctggctgctgc

SEQ ID NO: 321690 - DNA, 498 bp, Homo Sapiens
tcatatttcatttggttctttttattagaaactgagaatacagcaagtagggaaatcccacatcaatggaaccatcacacagatgcctttctggaaccccaaccttctatgatccccaaaaatgtgctttgtggctttagcataatttataaaggggaagagggaaaatactgaaaaaggccactatttaatggtgaaagaatgaagctgtagaggtcccaaccagcctagggcaaaaaagaaaattaaaaatctgcacagagcaagcaagcctctgactgctgagagtaaggcattcaggcgccaacctggtgagagttctcagcgagcactgtcaggtcaagtgcacatgaggctgttggtagtgagctgcacgtagacacacacatagaaatgggcacatgcccacattacacacccgaaaaagggagattttactggattacacatcagtgatgttaatttcatttttcctaagggtttgtgctatgttgaacc

SEQ ID NO: 321691 - DNA, 911 bp, Homo Sapiens
  misc_feature (40)..(40): n is a, c, g, or t
  misc_feature (47)..(47): n is a, c, g, or t
  misc_feature (50)..(50): n is a, c, g, or t
actggaggaggcctgtcccaattctgcccgctccatgganaagcggnttnactgcattgccgctgtataaagcatgtggtcttatagtgtttggacagctgataaatttaatccttctttgtaatactttctatgtgacatttctcttccccttagaaacactgcaaattttaactgtaggtatgatctcttctggtgttgactggactgcttggggtgggggacgatcaggaggaagtgagcagtcgcctgcctgcagcaggcagcttctactcctgcctcatgcatacgtcccacaaatgcaggtgtcctgagcaccacacccagtgggaagagtgtgggggaggcgcacagtgtgagcccgcccccacgtcgtggggtaacatctgttatcaaactgctgtcgttgttgtggaagcatgtagactgtgccagaggccagacccacgggctcatgcacccctgagccagcagggcatcttggaaaaggaactcttggttcgatacctggagcagaggaggggaaagtccagggctatagggtgtgatgaagtcacccctttctgtcccactacatctgggactgactttccgagcctccagtccaaagccggcttgatttccgtgaactctggtgctcctgcatctcatgagtgtgccccatgggtcccctcccctctcagcatttccttgtcccgtctggacctggggagtggttaggcagcaagctttggtttatggttttcattcattggtgaagtaaattaggcagtgctaaagcctgtgggtttggtccttgaacaagatgtgggccttgcaagatgggagagtaaaccttgaagggctttattaaagaaataaaaaagaacttttgtatcttttatcctgggagcactgcgttttcctagctg

SEQ ID NO: 321692 - DNA, 713 bp, Homo Sapiens
gagtgccacgttttctggtgcgagcctaatgctggtaacgtgtctgaggcggtgcaggccgcttgcatggttacgatatcagaagtgcttggtagccaggccgccttctcagaaagttcgaccacctccaccgccagcagattcagtaaccagaagagtcacaaccaatgtaaaacgaggggtcttatccctcattgacactttgaaacagaaacgccctgtcaccgaaatgccatagctgcacatgcaaaaggactcggctatttacctgaagattgactagctacactaaagaaaatgaactccgccatccgaccttccatccagttgctgatgctttgtcttcagagaatttacccttaaccaagcagtgttagacaagcatgttctctcgtcttgccaccatcatgtgatatgaaaagaagcatgaataattttttttgctgtaagttacatcatgcgcagtggaaggtctttttcttattgtaaatattgtgaacattacttaacttcacacacacacagagaagagtgtggccccacccctcctagtgaactaacgctgcgtccttggaatgaatgatgcgtgagttagtttcactgtcttcttggctggacctgtcacaagcaacctttaagtcctacagcactttgccctgttttcaacattggagtaggcactgcatagcagataccattgaattgctgtaaaa

SEQ ID NO: 321693 - DNA, 437 bp, Homo Sapiens
  misc_feature (411)..(411): n is a, c, g, or t
ctaatttttccagtatggcctgaatcttacaaacagcctcttttctggcctgccgtacagagtcctggcccccagtttcaactgaatccagttccaaaagttccttggttagcatttcttccagaagccagtatgctttgtctgtcttttttcctacaaattcttctacttcttgttcaagatactggaccttctccagcacatgtatgatttttttaatactcggaggagtactttcatctgaaggtacacattcttcaggaagactgctactttgatcttgattgttgggatggtcactggtgggcattaccatacagctgaggctcagcactatactgggacttggggaatccaaaagatctggaatcatcattgttcactgtccccgagggattcgtactgatgggncactggcaagggaaagttgttgccgg

SEQ ID NO: 321694 - DNA, 432 bp, Homo Sapiens
  misc_feature (104)..(104): n is a, c, g, or t
atactttccatctgaaaggtaacacaatccttccaggaaaaactgcctactttgaatcttgattgttgggatggttcactggtggcattacccataacaagctngaggctcaagcactatactggacttgggaatccaaaagatctgaatcatcattgttcactgtccccgaggattcgtactgatggacactgcaaggaaagttgtgccggttcatgctttgatctgattggctataggggtatgaagaatccttgggctgctggactgggggtgaagggggtgactggggagagccactgctaggccatggtgaagtactttcagtcatgtagagattgccgggtggtgctgagggcgctgatgaaggccagggataacggccacccattccataagcaccaggagaagcccacgcatcttcttgtggtc

SEQ ID NO: 321695 - DNA, 1172 bp, Homo Sapiens
  misc_feature (53)..(62): n is a, c, g, or t
  misc_feature (93)..(101): n is a, c, g, or t
  misc_feature (182)..(191): n is a, c, g, or t
  misc_feature (221)..(261): n is a, c, g, or t
  misc_feature (298)..(308): n is a, c, g, or t
  misc_feature (417)..(430): n is a, c, g, or t
  misc_feature (443)..(576): n is a, c, g, or t
  misc_feature (781)..(781): n is a, c, g, or t
  misc_feature (996)..(996): n is a, c, g, or t
  misc_feature (1005)..(1005): n is a, c, g, or t
  misc_feature (1031)..(1031): n is a, c, g, or t
  misc_feature (1093)..(1093): n is a, c, g, or t
  misc_feature (1153)..(1153): n is a, c, g, or t
gccccccttttttcccctggggggaaaagttatttattcggagaggcgccaannnnnnnnnncggccccgcggcggatttcgggtatttcttnnnnnnnnntttgggaaggggttctccacttttgcgcccggaaactttttagtaaaatttcacccccccttttctcataaaagggccccnnnnnnnnnnttcaattatatttggaggcccgtggggggnnnnnnnnnnnnnnnnnnnnnnnnnnnnnnnnnnnnnnnnnttgggttttttccaagcctctgggttccccggggggnnnnnnnnnnnggggaattccacaccttttttttcccccggtttctcttgaaaaaaatttggcccctttcccttcccttttgggccccgccccccaaaaaaaggttttaaaaaatttttnnnnnnnnnnnnnncgccccaaaatcnnnnnnnnnnnnnnnnnnnnnnnnnnnnnnnnnnnnnnnnnnnnnnnnnnnnnnnnnnnnnnnnnnnnnnnnnnnnnnnnnnnnnnnnnnnnnnnnnnnnnnnnnnnnnnnnnnnnnnnnnnnnnnnnnnnnnngaagtttttgctataaaacatttaatgttaacctacaatacaatgtaaacttttatgaaaaaaatttaaagtacactagatttcttcagtaaattatcacatgactattcaggcgcagtacaagttggggcactgcatcctttgtggatggatttccgttgctgtgttcctcacaagtcctaaaaaaaccagttgtagagcggcncctttgttcaagcaccggataatgatgcccctgattttgcattctgggggttatcgctccttctcagtcattttctgaaactctttgcttggccttgggaccattaggcaattttcacaactgctcaattgaagggttctagggttctttttaggcttaggtttttaaggaggacaagttgttatcctctgggcccatctcttattccaaatatnatggtgganggcaagccagggaggaaaggaagganttgccaagaaggaaaattctggcaagaagtgggaagaaaaggcccggaagggctccactgangggtaccaatattcaactggactccaatccgagtggtctttgcctggggcactttcccangggtattccagccccaatc

SEQ ID NO: 321696 - DNA, 742 bp, Homo Sapiens
gaagtttttgctataaaacatttaatgttaacctacaatacaatgtaaacttttatgaaaaaaatttaaagtacactagatttcttcagtaaattatcacatgactattcaggcgcagtacaagttggggcactgcatcctttgtggatggatttccgttgctgtgttcctcacaagtcctaaaaaaaccagttgtagagcggagctccttgttcaagcaccggataatgatgcccctgattttgcattctgggggttatcgctccttctcagtcattttctgaaactctttgcttggccttggcaccattagcaattttcacaactgctcaattgaaggttctaggttctttttagcttagtttttaagagacaagtgttatcctctggccatctcttattcaaatatcatggtggaggcaagcaaggagaaagaagtatttgctagaggaaattctgcagaagtggaagaaaagaccagaagggctccactgagggtacaaatattcaactgactccaatcgagtgtctttgcttggtcacttcccatggttattcagctcaatctacaacttcagtcgtgggagtgcagaacaaaacttgaaacaagtgcttttagttgatgatttgccatttggaaacaacagctgaaatatcccagaggtgatgtggaaacaagagcaaatgcttgcagatcactggcttctcagtgtcttctccctcgcaggtctcatcaaaatcc

SEQ ID NO: 321697 - DNA, 578 bp, Homo Sapiens
tcatctcataaatttacaatgctattattagtttccaagactaatataaattcactccatttttctacaacgaaaatgattaatttagaagcacacgacgtcatgatgaaaaacacaagcattttagtagcaaggacttgatcagttaagaattagttttcttgtaaaacattctaaagccaagtaaaatatccattcttataacatacctataatatgagactaaggaataggttacatataggtctacaacacattggtttgtctttaaaaaaacaaaagtagacatttataaataaaaaagagggacaattcacataggaaaaagaggtacacgagaaaatactgttgcacgcaataattttcacacagattaacatggattaacactttttattacagaaaccgtacggtgaaggaacacaacagaccagggctttcatagggttattgagattgagctgagatgacctgggagagaaagatctaggtgagatgaccctggggagggagccacgttccttggacctggtgacttagtgtcgccgggtctcctcttccctgttctcattttgggg

SEQ ID NO: 321698 - DNA, 444 bp, Homo Sapiens
  misc_feature (24)..(24): n is a, c, g, or t
  misc_feature (362)..(370): n is a, c, g, or t
gtctactttggtttttttaaaggncaaacccaatgtgttgtagacctatatgtacccctattccttagtccccatattataggtatgttataagaatggatattttacttggctttagaatgttttacaagaaaactaattccttaactgatcaagtccttgcctactaaaatgcttgtgtttttcatcatgacgtcgtgtgcttctaaattaatcattttcgttgtagaaaaatggagtgaatttatattagtcttggaaactaataatagcattgtaaatttatgagatgattttaacagaaaaaatatagaagaatatagttattttaattgtaatattaactgtagggtgagaaaaannnnnnnnntcccattgtggtgaactatgttatagcttgttactcatagtttctttttgatcattttttcggtctccgaggtg

SEQ ID NO: 321699 - DNA, 333 bp, Homo Sapiens
  misc_feature (48)..(48): n is a, c, g, or t
  misc_feature (230)..(230): n is a, c, g, or t
  misc_feature (237)..(237): n is a, c, g, or t
  misc_feature (315)..(315): n is a, c, g, or t
ttaaaaaccccattgagttgtatattttaagcgggtgaactatatggnatgtgaattatatcctcaataaagttgttagtaaataaatggggctgaagatgttatccttcattgtggtgtaaatgaactttcacaatattttcacctgtgaacccaaataaacatgattaaagttctgatggaaaaatcttgaatggagtataagttttccgttgttaaaaagcaaacanaaaaccnacaaaaaatccaagtgtgccttgaattgtacagagcacaattattatgtttgaaatgtgtactacttaattttatatnatttggtttgtgaaatta

SEQ ID NO: 321700 - DNA, 372 bp, Homo Sapiens
  misc_feature (24)..(24): n is a, c, g, or t
  misc_feature (106)..(133): n is a, c, g, or t
catttttattgatgtctttaattnacaaaccaaattatataaaattaagtagtacacatttcaaacataataattgtgctctgtacaattcaaggcacacttggannnnnnnnnnnnnnnnnnnnnnnnnnnnaacaacggaaaacttatactccattcaagatttttccatcagaactttaatcattttatttgggttcacaggtgaaaatattgtgaaagttcatttacaccacaatgaaggataacatcttcagccccatttatttactaacaactttattgagatataattcacataccatataattcacccacttaaaatatacaactcaatgggtttttaatatattgttatgtgaccattaccac

SEQ ID NO: 321701 - DNA, 733 bp, Homo Sapiens
  misc_feature (122)..(149): n is a, c, g, or t
  misc_feature (506)..(506): n is a, c, g, or t
  misc_feature (520)..(520): n is a, c, g, or t
  misc_feature (551)..(551): n is a, c, g, or t
  misc_feature (624)..(624): n is a, c, g, or t
  misc_feature (663)..(663): n is a, c, g, or t
  misc_feature (691)..(691): n is a, c, g, or t
  misc_feature (697)..(697): n is a, c, g, or t
  misc_feature (705)..(705): n is a, c, g, or t
  misc_feature (711)..(711): n is a, c, g, or t
actactttcaggaatcatttttattgatgtctttaatttcacaaaccaaattatataaaattaagtagtacacatttcaaacataataattgtgctctgtacaattcaaggcacacttggannnnnnnnnnnnnnnnnnnnnnnnnnnnaacaacggaaaacttatactccattcaagatttttccatcagaactttaatcattttatttgggttcacaggtgaaaatattgtgaaagttcatttacaccacaatgaagggataacatcttcagccccatttatttactaacaactttattgaggatataattcacataccatataattcacccacttaaaatatacaactcaatggtttttaatatattgttatgtgaccattaccacaataagtttagaccattttcatgaaccataaagaaatcctgtacccattagatgaatcctgtactccccattcatcacccccaattctagccttaggaaccactaatgtacgggaangtattttttgtagngacagggttttgctatgttgcccagggtggnctcaaatttctggcctcaaaccaatcctcctgcctcagcctccccaaagtgctggggtttacagggtgtgagncactgtgcctggggccttttatttctttttatgggctgnataatataggcccattgtatggggtatncccggntttggggntatccnattcaataggttcataggccat

SEQ ID NO: 321702 - DNA, 1426 bp, Homo Sapiens
  misc_feature (987)..(987): n is a, c, g, or t
  misc_feature (1215)..(1215): n is a, c, g, or t
  misc_feature (1374)..(1374): n is a, c, g, or t
  misc_feature (1376)..(1381): n is a, c, g, or t
tgagagtgtttgatctgaagtttttatttctgtctataattacatagtaggaacagttgtcttttgaggctttacaattacaaatgacaatgatgtcaacccatttatcactataaaaatctaagatcttagtgttaataggaatgagagcaggtttaaaaaaaagaataccacaaatttgctatttatttcttctacaacaacaaaatataattacatacatttagtcagtgaaactctttctgttaaacatgagtttatcataatttcctgcctctttccattttctaaaatgcaaaaaggagttcccagatgaactggatacaaggtagtgaaggtgctcagaataaaaagcgtctggaaacagcagcttttaattcacattcctgacattctgcaggccaagtcttggcatcctaatcttctttacctgaccctcttcttagggatgagctgcaggtttcctgaagctcttctccattactcaggtctgaaaagtcactactgctgaaacgtctcttcctgctgggtattctccaagtagatgtacttctagaagtcataggagccttctcaccatgcttgcttctcagtgccccgctcgaggcttctgcgggcgcctcctcctcactggattctgaaaagtcgtggtcttgtcctatcactcttttcttaaaactttctctgaatgtagataattttctgaaatccatgggctctggtacaatctgggtcgtgagcaagtggcttcttggccctccttttcatcatttgattctaaagggttgtcattattgatcacaggctcacttctcggtgctgagatgaagacttctaagggctcatcaacgtcagtggatccttcagagtcctcactgctgatgactattatgtcagatgcctggttatgatgagttcttgcttgggcttggcactcaacttttgaattagaaaatggcttttccttttttatatccaccagtcgcnacagaacaggaattaatttggattccatggttgtgtagctctgcctctgggctttcttcatcacagggcaacgggcagggcatctcccttccagcatccccgattattcacttggacagcaatttgttcgcaggactctgttggctcagccttttgagcacattgttcatttgtttgttggcttcctagcgaatcatctttgtcactggttgtatcttttctctttgnatttatctgttctgtttcacaggggtgctctgagagtccattttcaggtggggttgtaccagcatgagatggggaacccgaaggtggccaagtcaggcttcgaaaagagttttcaccagttccttgttcaagacttagttggaggccagacctctcctncnnnnnntcttcttcactttcttggagaggcaatttgtcatggattacattt

SEQ ID NO: 321703 - DNA, 805 bp, Homo Sapiens
  misc_feature (22)..(22): n is a, c, g, or t
  misc_feature (79)..(80): n is a, c, g, or t
  misc_feature (225)..(225): n is a, c, g, or t
  misc_feature (285)..(285): n is a, c, g, or t
aggttagtccctttaataaatnggaattataaacttgtcccataaatacctccacctcaaaataattgctgcacaagcnngtcgttacctcagtggttagtaaagtcctgtggtcctaataaaactatccttggggaacctcggagtaaactgatttgcagataagatacaatgctaatggttgcaatctgattgccttaggagaaaactgaagtcattctccangcaaacatctcccaaggccagctgaaccctcttgatctttagggaattcagatctttggnggggtggggggcagtagcatcaggctgtgggcctctgcttggccaacttccgaccacacaaaaagtttttctatggaccttgtaaatcatcaacccctccttggtcttttccagttctcagactcactagaatcagaaacacctctatccaaaaatctacaaccctggacacaaagaagccgagctggaggggttgggggacgacgagagaaccctgtgttaggtaaaagctggaactcatctcttttccgagccacctggtcctcagtttcccgtattatgaatgttacaaagatgagctggctcttagtcctggccgaggacaccacctgtcctggcaactacgggtgccatttccttgccgcttccgaaagcccaagttatctttaagggatgtcagctttgcaaaacccgcttcagtagaaacaagagttagcacaaccattaactgcttgaacaccctcgttggacttgttcctaaaatcataaccgaaggcagacggcttccttcgtggactgc

SEQ ID NO: 321704 - DNA, 572 bp, Homo Sapiens
ttttttaaaccatatcatatatatttattttagaataatcactgaggtagcagggtagaagatgcattggaaagggtggcaagaaagagggtactgaaaacaaagaagaagataatacaataattcagataggagatgactgggcctgaatttggctaatagcagttatgatggagagcagaggagggatgcacaagatacttggagatagaattagcatgacttggtgtaacccttgtaacaatcaggttcatcctcgccaaagacttactaggtaaggggacattctgtcctgtagtttatctctcaccaatttcaagaaaagtgaagatttacagataagtagaagagaggcaagtaggacaggtgccccccaggcttttaaataatgtgacatggaggcaggcttggaggaatcagggacaattcgagtttttaaaggtttcaatgttctgtcccactgggtcaggatggcatttctggctccatcccattttccagggcccatgaggcggtactgataaggagtacatggtccaaagaaaacttcccaagctagtctgggatccttg

SEQ ID NO: 321705 - DNA, 770 bp, Homo Sapiens
attggggagaatttgttgcgggaaccgcattcgggtttccccgcaccggggcgtattttttatatgggggaggaaatcccaaggcggttaattccaagaccaggggttttctccttaggaaaaccgggttatggacccatgttcggctttccctaattgggccccgcggggcccaaacagaatggttttagaaaagtttttcagaggccggaggcggcccaacagggtataaggtaggggaaaatgggtgggagtgagcttttgaaatcatgggttttagtttattatttttaatatatttctgaaaatgtataatatcaagactgtctgataatgcttttttaatactttccagttctgccaacattcctgtcatgcatccttaataacaatgctctcccagaaccgggatagggggcggtgaggtggggttggtgggggagtacgtttctgagctagttaaagtcactgaggagggcccatacctcaatgtgtgttgagttacaattagaaattagtcatggaaggacatgtctaccacagatatctttcctcacatttaaattattccatttcttcctacagtcctccttctatctttagttccattttaaataacccttcatcctacatacccatttatcttgcttcctttttctcccttttgtcccactagtataagagattgtgcttcagtaaactatcctgatgtggagagaaaaaaatcaaaatgtgatcaataataatagtttaacaaagttaagattgca

SEQ ID NO: 321706 - DNA, 763 bp, Homo Sapiens
  misc_feature (83)..(84): n is a, c, g, or t
  misc_feature (88)..(88): n is a, c, g, or t
ctttcagaaagccttttgggtaagtgggaaaacccttttgaaagccgttatgtccttttatttggtgtgatagatgactgggnnctcnctaactctatttgctgacttcagcaaagaatcaatgatgagcttagtttgcaagaccggttccatcacatggaacgggaacgtatgttaagctctagccagcccaccttctgtcaaaactgtttgtaaagcaataaccataatcaggttatgaggtcccttggttgggggaaaaagtattatcaagacttggcacagcacatgaaaagcaacatgttaagtttctaggttttaatgcaaacatctgactatgctattttcaactacatcataactcattatcatagttttggggtttgggtttgtcaggaaaaccagcattccaccaatttggcctgtgcaagtctttgaggggagtgtattgttagtgttaatatcccgtataagcagaggcagaattatatgtaactttggtttgactgaaaataaataccatggactacaattgctataatctttgctttcagtgtaaaaactcagctagatcactttaaaatcaatatgaaattaatttttggctttactagaccttttatgtttggttcctactttttgttttttcattataacttaagactataaaaaaatagtacacaacaaagattaagaccatacaagacatcttctaacaacatgtattcaccactgaaaataactgactgaatgagggaaaaaa

SEQ ID NO: 321707 - DNA, 978 bp, Homo Sapiens
  misc_feature (771)..(877): n is a, c, g, or t
atggcactgcgtcctttcaaactatgtgagggcctaccttgagtcacccccaagtataaactcagatatagtccaaaggggcttcttatgaataacaaagacacttccattaatcaggaaattccaagcctctctaagctctgtaccaggaacaggagacaaagactagatttattcttcattatatgacagatacatttttatattttgcctctggttttagtaaagtttttgttgtgaagaacacaaatgccagatcaaatgagggggctgtaattatgcaaggctgcaagggattgtgagcagtaagggagatagggattttactggaaatccaccaaaggaactggtatgtagctatgcctctcagtaaggggaactagaaagctattaggaaatcaaggcatctggagaaactatgtgtgtgtgcccaccaacatgttcatgtttgctctgcatttttgctttgtcatcctcttgcctcaggttgttttgctctcttgtttgactttctatgcccttctctaccctagggcttctacttagagtttctgcttccacaggactccttacagcttaagttctagtttatatgtggctatgcatattgaaaacttgggttctttttttggagacagggttgtacaggctgttgcacaggctgtattgcggtggtgtgatcatagctcactgcaaccttgaactcctgggttcaagtgatcctcctgcctcagcctcctaccaccccctgctaatttttgttattgttgnnnnnnnnnnnnnnnnnnnnnnnnnnnnnnnnnnnnnnnnnnnnnnnnnnnnnnnnnnnnnnnnnnnnnnnnnnnnnnnnnnnnnnnnnnnnnnnnnnnnnnnnnnnatgagcttgagttcttattaactgtcagcctgactggctctttcctagctaggctagtcagctcggctgaggagtcaagggaggacaggcttattactatg

SEQ ID NO: 321708 - DNA, 311 bp, Homo Sapiens
tacccaccccctgcctaatttttgttattgttgttgttgttagagaatggggtctggctatgttgcccaggttggtcttgacctaagggcctcaagtgatcctcccacctcagcctcctaaagcactgtgaatttcaggcatgagcttgagttcttattaactgtcagcctgactggctctttcctagctaggctagtcagctcggctgaggagtcaagggaggacaggcttattactatggaatgcacttccaaaacattaaaatgtttctctttaaagagtgtttatcaatgctcaaacctgaaccaga

SEQ ID NO: 321709 - DNA, 899 bp, Homo Sapiens
ttttgtgtttgtgttgtgttaatgtaaaaccatttgtttaattctaaatcaaatcactttcacaacagtgaaaattagtgactggttaaggtgtgccactgtacatatcatcattttctgactggggtcaggacctggtcctagtccacaagggtggcaggaggagggtggaggctaagaacacagaaaacacacaaaagaaaggaaagctgccttggcagaaggatgaggtggtgagcttgccgagggatggtgggaagggggctccctgttggggccgagccaggagtcccaagtcagctctcctgccttacttagctcctggcagagggtgagtggggacctacgaggttcaaaatcaaatggcatttggccagcctggctttactaacaggttcccagagtgcctctgttggctgagctctcctgggctcactccatttcattgaagagtccaaatgattcattttcctacccacaacttttcattattcttctggaaacccatttctgttgagtccatctgacttaagtcctctctccctccactagttggggccactgcactgaggggggtcccaccaattctctctagagaagagacactccagaggcccctgcaactttgcggatttccagaaggtgataaaaagagcactcttgagtgggtgcccaggaatgtttaaaatctatcaggcacactataaagctggtggtttcttcctaccaagtggattcggcatatgaaccacctactcaatactttatattttgtctgtttaaacactgaactctggtgttgacaggtacaaaggagaagagatggggactatgaagaggggagggcttccctcatcttcctcaagatctttgtttccacaaactatgcagtcataatt

SEQ ID NO: 321710 - DNA, 259 bp, Homo Sapiens
tcatagtaatgtaaaaccatttgtttaattctaaatcaaatcactttcacaacagtgaaaattagtgactggttaaggtgtgccactgtacatatcatcattttctgactggggtcaggacctggtcctaagtccacaagggtggcaggaggagggtggaggctaagaacacagagagacaacataaaaaattccaatttatccacagcagagtctatacagcttcagaagtcacagtaaaatctgtgtgtagattcag

SEQ ID NO: 321711 - DNA, 762 bp, Homo Sapiens
tttatttgcttgtggatcactttatggaactttaccatcaatctgtggtttaccggaagcaagctgccatgatccttaatgaactggttacaggggctgctgggctggaggttgaggatcttcacgaaaaacatattaaaacaaacccagaagaactgagagagattgtgacatctatacttgaagaatacacaagtcaagaaaattggtatttggttacctgtcttgaaactgaggaaatgggagaggagctgatgatggagcacccaggcctccaagccatcacgtctggtgaacacacctgccaagttacatcttttctagccttctcaaagccaagtcccactatttgctccatgaacagtaacatctggcaaatatgcattcagttggaaggaattggccagtttgcatatgcactaggaaaagacttctgtttgctcttgatgtcagccctttatccagtactggagaaggctggagaccaaaccctactcattagtcaggtggctaccagcaccatgatggacgtttgccgtgcttgtggctacgactccctgcagcacctgatcaatcaaaattcagactatttagtgaatgggatctctttaaatctgcgtcatctggctctgcatcctcataccccaaaggtcctggaagtcatgctgcggaactcagatgctaacctgcttcctttggtggcagatgtggttcaagatgtcttggccaccctggaccaattttacgatacgagagctgctt

SEQ ID NO: 321712 - DNA, 1085 bp, Homo Sapiens
ccccaggcccctttaaagaccagccccagtggcaaatttggaaggcccagccgtgtgggagtaaaatgggttccagcccttgccaattgatggggggcttgggttgactagggaagccaggccagctttgggcagggacatctttgcagaaaccggttgggaaggaaagtcacccacacttgctttcccagggtacgtaaacccttgaaggctttaagcactgccagggggggcgttcccgtgtgagtcggtgaacgagcgagggccaggcctgatgagccaagggaagcagctggtttttgtgggactgaagaacaaccacacacagatccagcacatccaagaccttcaggcggatttgcagatttttatctgacaacaagtggatgcagcgttccatcacgtccatggctatttggatctgcaatggcagtggtggctccacatctggacgggtgtcattctcatccactttgggagggactgactgttcctcttcttcattatcaaaatccgagacatttccatctgccacatccttctctttgaggtagttcagcaaaaactgttcgatgtcttcagctgtggtggtgctcttctcaagagctgctggtctttggttcaaatgacttccctcttctcctaaactttgctcttggaggtgcccaagattacctgtgtctgggaaccactgggctaatgctgccatcagagcatgcagaacgctgacaaaggaagcagctctcttatcgtaaaattggtccagggtggccaagacatcttgaaccacatctgccaccaaaggaagcaggttagcatctgagttccgcagcatgacttccaggacctttggggtatgaggatgcagagccagatgacgcagatttaaagagatcccattcactaaatagtctgaattttgattgatcaggtgctgcagggagtcgtagccacaagcacggcaaacgtccatcatggtgctggtagccacctgactaatgagtagggtttggtctccagcctcgtgccgaattcgccacccaggcctcgggacctcgacctgtttcggatcgggtatatccggg

SEQ ID NO: 321713 - DNA, 1223 bp, Homo Sapiens
caacatactctataatgtgttatatagaaaaaaaatacatctatcacacgccacaatatcttctgtattgcctaatgttcccacgatttgctacgattactcatagtgtatggtactatctccctgggaggacgccactgggacatctccagcctcttgtgaggtatacagactttccctgccccgtgggaaatattccctttcaagtccatccatacgtacccaaagtcatggaatactctattccaacgaaggtagagaccactaagtaagcctaggtttctaaaggatagtccttcaacaccgattctctcgaacgttaggaatgactaaggataaatcatgaggcaatgacacaccttttcgtgttctcaaataacaagatgtcatcgaactaactttgtgtaccaaagttcagttgttttccatagttttatgattttactataactcattttagaattttaggcaaatattgagagaaaaaaaagccagggtaaagggttggaataaaaagttcccatattactatggcaatatttcaactaccttctttgcactaccacccatcccccaacccgtttaccactaaggggaaagtaatctaagtgagttaaatggaagcatttaagttacaggggtatgtgagggtggtgtttataccttgtatattccacacacgggagccagtcctttcagagccataaaaagcacacataaaggttgaggcccatggcaaaatgagggtcaggtgaaatatatggtaaagagcagccatcatgtgaatagaacccacctgttttatatcaggaacaccagattaattattccagtgagttgaaaacagaatttgggattgatagccatccttgcagcccagttaaagacaggatttaaactctagtccatacacactaaagcatatccccagcacatgcatgtacacaggaaatgcagacaatcacagataatacagttgtaaatgcttcacagcttgaattggtaatgtgcagtggctgaagtctttgagggacagtggtgctatctctccagacattttcttgaggtattgttatttcttgttccaagtcttgtagctctaaggcagaaatcataagcagtccaaaagggctgacactgctactttttccttgcatattttcctttacacttaatcctgaggactaccaccactttgcatttgttctttatgaacacgaata

SEQ ID NO: 321714 - DNA, 436 bp, Homo Sapiens
  misc_feature (16)..(16): n is a, c, g, or t
  misc_feature (410)..(410): n is a, c, g, or t
  misc_feature (420)..(420): n is a, c, g, or t
aaggcttttttagttntgggcagaattccagttgaactaaagcacctcatttcccagatacgtgaaataaaatatttggcttcttttccaatttcacactgatgttattttgtgaaaatcagtgctttaagataaatcgttatacgttaagataaacatgagaaacttgatctaatatttaatatttattcagttctacactttattaacttctacaccagcagatttagacattatgtaaccatctcaagaagtttcacttggatgtaatgcttcacgcttgtaatcccaggcactttagggagggctgagggtggggagggactgcttaagggcaagggagtctgaggaccaggtctgggggcaatacaggcaaggatccccatctctattttaaaggaaaaggtttncactttgggnagggccaaggccgggt

SEQ ID NO: 321715 - DNA, 941 bp, Homo Sapiens
taagggaatggcctcttcagagagtcaaatccggccggttctggttgaagatgcaggaagtccaagcggtggatccggacccttcgtcaggaaagggcggaagttaggacacgtcacctgtccttcagccaccgggttacccgggatgttggttagcagcccagtggaggtactcagcatctggctccagcaggtgcccatccaaagctagtgagtagcaacgtccacaaggagccctcttctgcctcataggtcacctctggcgcttgggcagcctcggttggagtcacctcattgccacagtacacaggcatcaggtcatcctcacccacagcgtaggccacgtgcagggggactcggggcacaaaggtggcaccgtggaacaggtctcggtagaggccgtaatactcagccagacgctgcttgtggtaggggccacaggtcctctcccactcggcccgcacggcatccagcgggacactggctgtgcggaggcgggcagcccgctcctcttccacattggcccgaagctcctggatggcctgtttccgttccagtagctgttgggtccgggagactttgggtggaggcagcccaatatcaatcttctctttgggatctgtcttctccccgaaatactctcggtaggtccgccaccagtgcggggcctgcgcctcctgctctgctcggcgccggtagcggtcgaagctccggtacttctccagccgctccaggttgctcaagtcgatgtcactgttgggcatcggccccagcgggggtgtccggcggcccaggacggccgaggtgctgaagccccgccatctccgacactcgcacagcgcggctcgccaccagggcgccgccatcttccctccggcctgcgacactgcggccgccactaggacccgggcacagcctcgtgccgaattcgccacccaggc

SEQ ID NO: 321716 - DNA, 274 bp, Homo Sapiens
gttttgagtccctgccaggccaactttcctgctgggttggggaagatgaaagccagtgacggagaaggtgggctggaagcagttatgggtgtaaattatgacaagcaacagccagagttgtcctaggtggacagtcgtggtggcagggaactggctatagctgacagatctgagagtacagggagggaagactcgtggtgagcaggggaggggggtctgttcctctgtcgcatgcgcaaagcttcttggctacagtttccctctggcttgtttc

SEQ ID NO: 321717 - DNA, 473 bp, Homo Sapiens
acaaaaataaatatttatcaacagtatatttgacaaaaaccacccccaatcgatggcagaaagcagtattttctagctggcactgaaacttaacctatttttttgagggagaaaaagactaaaatgtaagcactaacttcctccttctgcatcttccacagaagacccacttgtgggcattctctttctgtccgttatcagtgggtttacatccgaaggccggcggcgagacacttgaaccacaaacaccagacatgcaggtgtctcaatggcatgcagattatttaaagtgcatcacttgtgagaagcttctcaaatttctgactgtcataaccaggtgtcacctaaaatctgtcctgtaggccaagatgctacacgcagcgcccaggcagtcagaggtaagtgagcgcctcccgcctcagaaagcttttacagggccacgctcgccatgctttcctcgcccacgctgaacc

SEQ ID NO: 321718 - DNA, 509 bp, Homo Sapiens
gaacttgaaccaaattgatttggataagatttattgatcagattgttttagaaaaccaacagcaaaacactgacaaggtacataaatacagattggacattttagggtaaattcactgtatttcctacttgcttgtaggaaaccgagtaaagtggaaaagctgtcctgatcatatggcatgcacaccagactgcaaaaggacgtccacactatttaacaggactgtggcaaaatagctttaaagtaaggcgagcattgtgtatggcccaagcataccctgtaggaagagcaaagctaggctcacctctcagagactgtgtctcagaaagaggcttcctttcttgcctaggttcttccatgaaattcgtcattggcaggtgcttttccagggagatgcctgtgctctccctgtgcagactctgtgcacaaggaagtggctttagagagtgtgttttctgatgcctcctttatattctaaatgtataactagtaaaacaacaattactacc

SEQ ID NO: 321719 - DNA, 927 bp, Homo Sapiens
  misc_feature (150)..(150): n is a, c, g, or t
aaaaaatagctttttcgcccaggtaaggcctcccttttttccaaggcttagagggccggggaaaaatgttgattaatgagattcggtaacgtgtcttctctttcactgtaccacccctccaggctgaacgcgggagttctgaacacatgncctcgggaagggaccctgaagaccacagtgacctgcaccataaaaccaccccgagggtcagccatgctgccagcactcaagaggcagcagggccacctgctggaagacctgggcacggctctgggtgcctggccctgcctgcctcctccacgtccttggagccaggtctacggcaggaccatgatcttcttctccagcttctgtggagggaacaggaagtttttcatgatgtcatccagctcttctagggccaactgggcatggagcttggccacgtcatcgggctccagacacactacgtgcttcagcaggtggtagagatccttgaggacggcgctcagcacctcagtagctttctggctgagtccccgaagcagcagcacaaccacatgtatggcagctctgcgtacttgaacttcaccatctgttttggccacagcaatcaggcaagctgttacctcatggaccacggagcccagcagaaagtccagcctctggcacagctccccaaggttggccaagctgctggccctgtgagcaccatcaggatctctcactcccctcaggaaggtatggatcaaaggttctcggtactttgagaccatgtctcctaatgccctgacgattcgcataaggacttccccgactttcattctggtctctggtgtgtgcttgtctttgctgctgtcatattgagccaacaagtccggcaagatttctcaggatggacgtctgacagcagggcctcgtgccgaattcgccacccaggcctcgctc

SEQ ID NO: 321720 - DNA, 788 bp, Homo Sapiens
gttgctgagcaagaatttatccatcccttttctttcagcctcctgtctgggcagctttcctagagaaagggaattgggaaaagacttcggttcttttcaaggccagggccagcgcttgttttttctttcgaatttccaacttcatccccccacagcatctttgccagagtgttcaatcaatgtgttgactgagaaaaaagaaggggggtatctattttttcttatatacacacactatcaaaaaactgattttaccagtttcaatacctactgtgggagcagcggagacaggaagacaatctgctttttgtattactatgaagttccactataaaaaaccccaaatgagtattaatctggattttagctataatctataatattttgacactgacatttcactagatgtggatctcagtatattttaaaagatttagactcaaaaatggatgcaaattctttaagcatctattttgtttttttctaattttagctactacctgatcagatctaaaattattctggctagaatacagtatatacaaacatgtatttaagtgagccctaaaagaaatactcataggtggtttagaatcgcttgttagaggcacaggttcgtttacagttgctggttactagactgtacgcagctggacacttctatgttaaagggaagagaatgaatactatgtgccaggcagtcaacacatgaagacagagttgtattagcctcagtgtcttatgcttcacaattactcgtttactttcaggtaggataaaatgttccc

SEQ ID NO: 321721 - DNA, 1725 bp, Homo Sapiens
  misc_feature (836)..(949): n is a, c, g, or t
  misc_feature (1085)..(1085): n is a, c, g, or t
  misc_feature (1087)..(1087): n is a, c, g, or t
catcttgcctttatttctctatttcaaggtttcacagagtgcttgtgtctcaacccacatctagtgatacttaacttaacttgctcttccccagacagaaacatgaaatgacttaaaaaaatagaaaatattcttctcgccaggcacacaagactgtacacccaaaaccagaaacgctgtggctttgcaaagtgtgctcccacacccgcgcacacaggcgcacttaaataaataacgcgcacgcacggctttccccatttcgaaacaggcagacggtctagtgagtttcagcacttgctgggaacaggcgtgtggccagggaggtgccccgcgggtggcaatgactactgacggacccctggtgaatcagaacagagctggcacctgaagccgctgagcgggcggctacttctggctctgttgagttttggaagacctttgagaaatcaacagcatcaccgggcaggtcctgagtccatggcctgatatgttaggatcacctgtgggctgctaaaagcccacagtcctagccccatctgcagagttagttggcttctgaaggctgggagaagccctagaacctgcatttctaaagctgctcaaatccaggcctttggaggcttaagactaagcctgcaccatttcaaactaagtatagtcagagagaaagatcccagcacgccccctcgttctcacacttctggtacctcagcactctcacagcaggttcccaaaggtgatggttctggaagagttctggcctcatccttttgttaaaacctgctttcagaggtggcttagacaatggcagagtgggccgggcgcggtggctcatnnnnnnnnnnnnnnnnnnnnnnnnnnnnnnnnnnnnnnnnnnnnnnnnnnnnnnnnnnnnnnnnnnnnnnnnnnnnnnnnnnnnnnnnnnnnnnnnnnnnnnnnnnnnnnnnnnaattagctgggtacggtgggcacaccgtaatcccactatcaggagcgaggcagaagaatcactgacctgggagcggaggttacagacccaagtggcaccatcactcagcctgggcacagaggaagaccccatctcnanaagattttgagataatgcagagtatagcttctgacctgcttttgccttcatgcgtgaccggggtgagctacatgaggcccagatctctttaacacgtcctgaggaccagcgtagattctcctttatggggctgggcctgatctccccagccgtagaggtgtggtgagtcatctattattttcttacctgcaaacaaaatcactttacagtagagaaagatgagggaattctcgtacccaagacccacttgaaaagtggagagcaagcatccttgaatctagagggtaccccggctgcctcggggagctgccagaactcagtctagggaggatacacagggtgggtcgcacgaggatcgaggcatcctgtcggacagtaggcaccaggtgaccgccaggcgccaggacccaggcagtctggcgggaggcctgggaagaaggttccctcgggaggagaacagtctttgctgggcccagatccaccagctggaagacttggggtgacaatcctcagccgagagccaggtgcagcctcggggggcccagcaccgccgctgcatgaaggaggcgtttccgtttatggctgtttagctccttaaactatttcaagtcataaataaataaccagtataaacaaaa

SEQ ID NO: 321722 - DNA, 415 bp, Homo Sapiens
tttcttgtgcctttacttctcatttcaaggtttcacagagtcttggtctcaacccacatcagtgatacttaactaacttgccttccccagacagaaacatgaaatgacttaaaaaaatagaaaatattcttctcgccaggcacacaagactgtacacccaaaaccagaaacgctgtggctttgcaaagtgtgctcccacacccgcgcacacaggcgactttaaataaataacgcgcacgcacggctttccccatttcggaaacagggcagacgggtctaggtgaggtttcaggcacttgctggggggaacagggcgtgtgggccagggggagggttgccccgcggggtgggccaattgacttacttgacggggaccctggggggggaaattcaggaacagaggcttggggcacct

SEQ ID NO: 321723 - DNA, 730 bp, Homo Sapiens
  misc_feature (20)..(20): n is a, c, g, or t
  misc_feature (31)..(31): n is a, c, g, or t
  misc_feature (49)..(49): n is a, c, g, or t
  misc_feature (55)..(55): n is a, c, g, or t
  misc_feature (63)..(63): n is a, c, g, or t
  misc_feature (79)..(79): n is a, c, g, or t
  misc_feature (166)..(223): n is a, c, g, or t
ctccaaccctgtttttgaanggttaggggantttccccatccttgtacntaaagnaaagaaancctggggtatcccttncaggttagaaaggcattctgtaagaatagtgttcccagagttacaaatccatactggtaagagaaaagcaattccttcctcttgggnnnnnnnnnnnnnnnnnnnnnnnnnnnnnnnnnnnnnnnnnnnnnnnnnnnnnnnnnncctatcaatgcttaatctgttctttcattcccactgtaaatcacatcaatacatttggtgaaactgcaacggaccaccatttacaaggtagttgaatgcagaaaccgaaacgattatgccccctccccactctaaaggaaaagacacagagtacatttcacatattcagagagtggctcagtgggctctttcaagcctcatcaatcctgtccccctgctcagaacaacacttccttttctgtagcagttccacaggccctcttggcccttctgctccagccctttctggaaccaggaatcattgccaatattcaacgttcctgcactaggagaacctcaggccctcttcctgggaagaccaaacccccttgagtgctcctcctgcttcagacggaggtgacagtcctcactttggcagagagggcttgcttaaacctcctcttcaggtcctgcatgttgggtgacttgggcctgggaatgagggaggttcttcgcttctcgggtgta

SEQ ID NO: 321724 - DNA, 604 bp, Homo Sapiens
  misc_feature (186)..(186): n is a, c, g, or t
  misc_feature (190)..(190): n is a, c, g, or t
  misc_feature (439)..(439): n is a, c, g, or t
  misc_feature (460)..(460): n is a, c, g, or t
  misc_feature (495)..(495): n is a, c, g, or t
  misc_feature (508)..(508): n is a, c, g, or t
  misc_feature (518)..(518): n is a, c, g, or t
  misc_feature (541)..(541): n is a, c, g, or t
  misc_feature (553)..(553): n is a, c, g, or t
  misc_feature (559)..(559): n is a, c, g, or t
  misc_feature (593)..(593): n is a, c, g, or t
aatgcaggaagcatttattgagagacaaagagttacttgttacgggaaatatgaaaagcatggccaggatgcatagaggagattctagcaggggacaggattggctcagatgacccctgagggctcttccagtcttgaaatgcattccatgatattaggaagtcgggggtgggtggtggtggtggnctanttgggcttgaatttaggggccgatgagcttgggtacgtgagcagggtgttaagttagggtctgcctgtatttctggtccccttggaaatgtccccttcttcagtgtcagacctcagtcccagtgtccatatcgtgccccagaaaagtagacattatcctgcccccatccctttcccagtgcactctgacctagctagtgcctgggtgcccagtgacctggggggagcctgggttgcaagcccttcactngtttcctaaaccttggtggcngtgatttaaagttcccagggggatttcaaaggganggaatattggttnaattctgtanttttccaaagtttggcttggtanagccttttagangtttanaatatttagctttcaagatcaaacttgggggtantgggatttggc

SEQ ID NO: 321725 - DNA, 851 bp, Homo Sapiens
  misc_feature (824)..(824): n is a, c, g, or t
agcaaacaaaagttctgcgtaatgagactcaccttttctcgctgaaagcactaagaggtgggaggaggcctgcacaggctggaggagggtttgggcagagcgaagacccggccaggaccttggtgagatggggtgccgcccacctcctgcggatactcttggagagttgttcccccagggcgcttctgccccacttggagaaggaagctgcctggtgtggagtgactcaaatcagtatacctatctgctgcaccttcactttccagggtacatgctttaaaaccgacccgcaacaagtattggaaaaatgtatccagtctgaagatgtttgtgtatctgtttacatccagagttctgtgacacatgccccccagattgctgcaaagatcccaaggcattgattgcaccttgattaagcttttgtctgtaggtgaaagaacaagtttaggtcgaggactggcccctaggctgctgctgtgacccttgtcccatgtggcttgtttgcctgtccgggactcttcgatgtgcccaggggagcgtgttcctgtctcttccatgccgtcctgcagtccttatctgctcgcctgagggaagagtagctgtagctacaagggaagcctgcctggaagagccgagcacctgtgcccatggcttctggtcatgaaacgagttaatgatggcagaggagcttcctccccacttcgcagcgccacattatccatcctctgagataagtaggctggtttaaccattggaatggacctttcagtggaaaccctgagagtctgagaaccccagaccaaccttcctccctttcccaactnttacagtgtttggacagagggtatggt

SEQ ID NO: 321726 - DNA, 586 bp, Homo Sapiens
  misc_feature (111)..(162): n is a, c, g, or t
  misc_feature (436)..(485): n is a, c, g, or t
tgtagatacgatgttgttccatacggttggcacagcttgattaggtcctggtcaatggtgcctggtgggaggcctcgaatgtacaggttggttttactcaactgttccccnnnnnnnnnnnnnnnnnnnnnnnnnnnnnnnnnnnnnnnnnnnnnnnnnnnnaggagccatggggtcggggagctggtgcataggactgcttggtttggagataatgaggatagtagtaagtgtactgggggtacatttgtggctgatccaggcgtttgcccatgtagctggaatctttatctccgaggcagggaactggatgaacagggtatagtgccccaggccgagcttcctcttaaaccactattcctgacagtcccggtgactgatgaggcttcagagactccaccaactcgctagttccaacacagcaagaatttttttnnnnnnnnnnnnnnnnnnnnnnnnnnnnnnnnnnnnnnnnnnnnnnnnnnggcgaggagtgagatctgtagaaaaaacacccacacacagccttcccagatcttgcctggcttcccccagctgccggggtccacttgggatgaggcagttt

SEQ ID NO: 321727 - DNA, 403 bp, Homo Sapiens
  misc_feature (243)..(291): n is a, c, g, or t
aaggtggggaaagagacaaccaagagacaggaagctgatctgcaaggattcggagttgtgctaaaaggactttgattttttttccccctttacgaacgctggcaattgacatcactacagacagcctgggttagagaacaaactgcctcatcccaagtggaccccggcagctgggggaagccaggcaagatctgggaaggctgtgtgtgggtgttttttctacagatctcactcctccgcccnnnnnnnnnnnnnnnnnnnnnnnnnnnnnnnnnnnnnnnnnnnnnnnnnaaaaaaattcttgctgtgttggaactagcgagtggtggagtctctgaagcctcatcagtcaccgggactgtcaggaatagtggtttaagaggaagctcggctgggggactaa

SEQ ID NO: 321728 - DNA, 1546 bp, Homo Sapiens
  misc_feature (583)..(628): n is a, c, g, or t
ttattgttattgggggggaattcctccccctccttttttgcccctgtttgggagaggaaaggagtgcaagcccactttgcccctcaatacctttaaacctcctcaggcaggtttggggggcctccccattagaagggtttcaggtttcccccccattttccaaacgcggggcctgcgcgggaacctcgcttgatgactgtttaaaaaagaaaaccacgtgagggtgaaaggtttttcagcacgcatgcgtgcaacccgccggttacgccagcggttaaatcaggagtcagctctgggcaggcgcagaacacactgcggcccctgattgccagcacacatgctacaaccttgaggctgtaactccacaaacaagggcagaactagggtaatggccagttggggagtgagggtagtgtgcacacacacaaaaccctagggaggtctctcctgctttaggctgcttgtcttgtgcaggttgtcaaagtctgggacagacgtgcatgtgctatgtggtggtacacaatagttcgagtctgttttcgtttacaaatcctcatcaaagagttcatgagagagggttacnnnnnnnnnnnnnnnnnnnnnnnnnnnnnnnnnnnnnnnnnnnnnngcatctcctatgtaaaaatgctggatttcagccactgtgtgcagtcaggtgctgtgtcctgggttccacaggtggacactgaaggccaccttctcattaatgttagcagcagccagcattgagggcgggtcatttctggcagggtaaagatgaaaaaagtacaagaagggcaaaggaatatccttgtgggtcttacttttaggccttttatgtagtttttttctttaaaataccctcaggccagtcccaagcatagcctggccctgaagtgccaattccagcacccccgtgggccaccctagacaccttggccagatctggacactcagggctgagattcaactaggaggcagaccacggaagcaagtttggaggggacagtccctgacagaggctagagcatcatccaagtggaggagatgagacagagggaagggagagggaggcctaaggatttccccagagggggaggtgcatgactgggcagggaaagcagcctgctcgcctggcggctgccaccatctctctcatcggtgggccctcagaccttgccccattgcttagggagacaatgactggccacagacacacccccacacacatttccagggtagacagaaggtaaaaaacaaaggtggttgctcccagcactgcctggtctgggagctccaactatcagagtccagtgaacaagccattatgggcagcttggtccgtagaggtggctggtggtgtggagtacttgggtgggtaacgaatgaagagccggtcctcctctttcttcacccagcgcaggagtttggtcactaccaagattgcacctgccttggtcaccagagggctgaggcaggtatagagctcgaatttggaggtcacccaggccagtagtgtctccttctcagccacgtgtaaatgagg

SEQ ID NO: 321729 - DNA, 882 bp, Homo Sapiens
  misc_feature (612)..(657): n is a, c, g, or t
ttttaaggcttaacattttatttaaaaaaattagaatatcattatttcattattgtaatgggacgaatcctccctcctttctgccctggttggagagaaaggagtgcagcccacttgccctcactaccttcagcctcctcagcagcttctggcgcctccacattcagaggtttcagcttccccgccattttccaacgcggggcctgcgcgcgagcctcgcttgatgactggttaaaaaagaaaccacgtgagggtgaaaggcttttcagcacgcatgcgtgcaacccgcggttacgccagcggttaaatcaggagtcagctctgggcaggcgcagaacacactgcggccctgattgccagcacacatgctacaaccttgaggctgtaactccacaaacaagggcagaactagggtaatggccagttggggagtgagggtaagtgtgcacacacacaaaaccctagggaggtctctcctgctttaggctgcttgtcttgtgcaggttgtcaaagtctgggacagacgtgcatgtgctatgtggtggtacacaatagttcgagtctgttttcgtttacaaatcctcatcaaagagttcatgagagagggttacnnnnnnnnnnnnnnnnnnnnnnnnnnnnnnnnnnnnnnnnnnnnnngcatctcctatgtaaaaatgctggatttcagccactgtgtgcagtcagttgctgtgtcctgggttccacaggtggacactgaaggccaccttctcattaatgttagcagcagccagcattgaggacgggtcatatctggcagggtgaagactgaagaaagtacaagaagggcaaaggatatccttatggcgaacgcgtgggttcgacatatccctaattccggcc

SEQ ID NO: 321730 - DNA, 858 bp, Homo Sapiens
  misc_feature (143)..(143): n is a, c, g, or t
  misc_feature (196)..(209): n is a, c, g, or t
gtgccaagcaggccttgccaagggggacttgtctctttaaagatggagagcgtgaagaactggccctgtaactgcaaacctaaacttccctgggctctggggaatgtaaaaggtgtgggaagggtgcacctgtggccagtgancctgggaggagtccatacacaacacacacactcatagctcctttccttccacnnnnnnnnnnnnnnaattaatgactaacaacctaagaagggaaaaatgaatggggaatgggccacagggggctctggcctcagtccatgaggtgtgtccgtccgctatgccgaggatccagtgcacagagggtcagaacatgagttaggagggccggtccactccgaatcggagggtgaactcttcggcattctttctgaacagctccggattctgtgtcagcaggtcagcgaggtccatccgcaggggctccctgatattcggtctattcaccagcacattgagggcctccaggacttggcaagtcttggtgcaaggcttccagttctcactgctgatgatgggcaggcaaatctgtccgttctcgtccacgttggggtggtagatcttggttgtgaatttgatcatgggaggcttgaacggatactccggcgggaagctgatgcgcaggttgaaggctttcaggtggtagggaggttggtcgggtaggaggagagcgtgccacaccaggacattggcatcatcgctggacaggttccgcaggtatgggggaggcttcttctgaagatcctccagctccttcaccactcgcatgctcgccatcatgtcgggaccgagtgtgtggcacccgtggcctccagcaggaccgagctccgacccccc

SEQ ID NO: 321731 - DNA, 607 bp, Homo Sapiens
gctgttgccaactgtttattcagggccctgaacgggtggtgcgtggacatgcaacacactcgggcccacagcagcgtgaccggccgctcccaagccccgggcgcacaaccacagccaggagcagcccctgccaccactgggccaccgtccagggccccacaggaccagccgaaggtgccccgggccgaggcagctgggtcaggtgtacccctagcctggggttgagtgaggagcggcacccccagtatcctgtgtaccccaagttgcccaggaggccgagggggcgttgggtccatctgcactggccaccccgtgccaagcatcacagctgcgtgacaggtttgtgtgtgagcgtgtggcggggcctggttgtccccttcctaaggcgtaactgctataagcatctccacctctcccgctcgggaaaaagccacagagcctggcgatgtcctcaaggggtcccggtggctccagtgcacccagcacacctcagcgcctctggctggcaagccaggagaagaaggtgcgaggccgtgggcgaggtgcctggaggacgcgcatggtgcgtggggagcgccaggctttgatggtggcgcggcgccgctcc

SEQ ID NO: 321732 - DNA, 895 bp, Homo Sapiens
tttccaaaacctcatctcatggaaagatcacaggatgaaggaaagctagactcaactctgtgactagaagttgctctcctgtaagtaaagcaacaattcagaatactgaatgagtttaaattgttttatatagcacccttttgggctagggttaattactagatctgacttggataatttgacactttgggaaatgaactctgttcttgagacttgttcagtgtattttaaacatctgaggaagaaaacttaaatatgcacctatttatacctattctttctttaggtcaacatttaacacccactgcatacattaatttgtccttgtctgctcactccagcaatttagaccttaacagtcacaagagacgttcttctgttacaaagccttagtaaattaaggcagttttgattatattctaggtccacctatgtctgaagctaaattcagtatctaactgctaatgaacaagtttccaaaatactgtaaaaatacaattagtcaatttgagtaaatgcaaatatgatgagaaatcaatttgctattttggcctggcaaatgggaacagtaaaattctgctttactcttctctagtctccttgccccagctgcaccccactacccccaaagttggcagttttgaggtatgattttcaaggaatttttttagtattaacatctccctctgagaactatgtacctaaggtcacgcatacaactagtcaattctgtttttattactctaactatgtagaaacagtaagtcacttaaaacaatcacttggctgggttttttcccctttgtgccacattgattcaccctgacccaagaactccagggaaaattctttcatgtcaactgggcaactcattaacctctctttaacatcaagg

SEQ ID NO: 321733 - DNA, 456 bp, Homo Sapiens
  misc_feature (238)..(238): n is a, c, g, or t
  misc_feature (294)..(294): n is a, c, g, or t
  misc_feature (340)..(340): n is a, c, g, or t
  misc_feature (359)..(359): n is a, c, g, or t
  misc_feature (379)..(379): n is a, c, g, or t
  misc_feature (391)..(391): n is a, c, g, or t
  misc_feature (422)..(422): n is a, c, g, or t
gttttgatacatatataatgatcagatcagaacaattagcatatccatcacattgaacatttatcatttatttgtgttgagccatgattgtgccacttcaccctgggcaacagagaaagaccctgtctcaataaaaaagaagagaaaaactggagtgagaactctcctcctcttcataatcatagtatccacgttagggaaaatgcttctgaggagtaactttaaagtactgtgtgtngcatcttccttcaaaaccttgcttttttctccgtttttgtaaggtgagaaaggganaaaccttcaccgtagaaatactgtcttgagattaagatacaaatanaacatgttaaacctccatnctaaagacattggcaacttnttaaaacaggantaaatgtacctttgttatgtctttccaatgntccacacccacaccctgtttcaggttttgttaat

SEQ ID NO: 321734 - DNA, 906 bp, Homo Sapiens
tttttgccacggagcgaatttattgtgaaagctcgtggggtgaggaggggatggggcaggctctaggaggctgagtcggaggcctctgagctgtccttgacatctgtgctctctgtggtctcgctgacctcgctgaggtccttgctgtccccaccactatcctcggcagccaggcccttctcctcgcgacaggcctctcctgagctcggaggtgaattgcctttgctctccaccttgttctcgatggcacccagcaccacgtgcctgcccttctctttcagctccaggtgccgcctcagctcgtcggccatctgagtgaggtcccgcttcatggcataggcgtcctccccatctgcatagtatttgggctccacttcactgatctgaaagttgagggtgttggaatagaggtgcagggcggcccggttactcttcctgacatgcagggagacatatttggcattgaagttctctatcatggctcgagaggcctggtccatcagtttctgagccagaccgaggcgccggtgggaacgcttcacagccaatgaggtgatatgtccatggggcacatcatctgggtcctcttccattttggccaggacataccccacaatcttcccattctcgtcctcagcaatgtaagagagctggggccaggaaaggccatggtagaagtagtatttcatctggtagttctcgggcaggcagaggaggttgcagtgctgcatgttcattaggtcctctggcctcgcattgcggatgttcataacggcggcggggctcgcgggtcccagcggatcgtgaaggcgcagtcagctgccgccgcgctccgaagcgacgccgggacggccggggctgggaccggagctgggctcgctgggcgacggcggaaggggcggtccc

SEQ ID NO: 321735 - DNA, 1043 bp, Homo Sapiens
  misc_feature (109)..(109): n is a, c, g, or t
ggtaaagcttctccctttcccggtttttacaggccttcatggttatttcagagccccccataatccaagccagttccatgccaaaaggataaaaagtgaaaaaagttgnccccgagattctgtgaagactttcgcccatttttgcgataggtatccatgattcgatttatcacttcggcagggaattccgacaatagaagtgcagctgttagtacggtgttctttatcttcttttcactctgggggaaaatatttgtataatcccatgtacgcaagttgtaaagtaagaaatggagcaaatatggacaagtatttgcaaacaaaagctctgaaactccaagagcaagaagagcacatcccaccaatctaaatattcgaaaagagtcaaattcttctgttgtatttccatcctcttgactgggtttttcactaatcagctgtttccttagcttcattgcttcttcgaatctggaaaggtactgctctaggccatggcgggaacccctctggaccgagtccgctgtcaggtcccctctgttccgctgccggagctcaaggttgacatcactactgcactcaggtggtttaatgaacgagtccaatttgtctcccagttgggtcccctttacctcggccacaccaccctgctggtcagttgttcctgtactgactgaatcacccagcactactcgctttgaaacggaaggaacgctgagggagttcagtttatcactgtcctgctgctttgattttgtttgactttcttcttccgcgccgctcccgggcctgtgaaagcccatgatccggttgatgcgctgttccgagttcatgagcagctttctccgacgcagctccgcccgacgctgggaagccgacagacctgagcccgctgggacccccggcctctccccgccgtcggtagcgacggccatcgactccatcctcccgtccacagtctgggaggggtggcagtggcggtgatgttggccgccgctggcgcggacgcgtgggtcgacgatatcccgggaattccgggccggtac

SEQ ID NO: 321736 - DNA, 707 bp, Homo Sapiens
  misc_feature (581)..(581): n is a, c, g, or t
  misc_feature (606)..(606): n is a, c, g, or t
  misc_feature (644)..(644): n is a, c, g, or t
  misc_feature (676)..(676): n is a, c, g, or t
actctcttcactttgtccattatagtacaatagattgtccttgtcccatctccaaattggaagctccctaggtggtggtcaggctgttgatgagatttgtattctatcaaagctccattttagataatctatcatcattttttatacgcagtaagtcgctgattttgtttctttttttcaaacagttttgatttgaagttcctttaaaggctgttggagcttttgcaaatacccagctaatgaaaggcacttaagattgggcccatctgcatcatcacattgaagttttctgtctaaaggaaggttccagctacctgttacccttttgctaaacacagttgcagtgttgcagtgtatttcatgacaaaagtgcactctagttttctgtgaaatgattattttctctgaaatgattcttggtcatgttgagcttctaaatgttaaagagaacatagtgcttttgacctgtgggaaatctcatcttgggtaccatggttgctggcacagaccatcagggaaggaactggaaaagtttcaggggcaacttggaggaaaattaaagttcaccacccggcaaggangctgttctaaaaataaccgggaggnttattaacccaggcacgtgggagggagtgtgctagtgngtaggatgttttggaaggctactaggggtccncccttaggtgcctgtgctagtcctaaggggg

SEQ ID NO: 321737 - DNA, 510 bp, Homo Sapiens
  misc_feature (295)..(309): n is a, c, g, or t
  misc_feature (330)..(330): n is a, c, g, or t
  misc_feature (337)..(337): n is a, c, g, or t
  misc_feature (356)..(356): n is a, c, g, or t
  misc_feature (422)..(422): n is a, c, g, or t
  misc_feature (447)..(447): n is a, c, g, or t
  misc_feature (479)..(479): n is a, c, g, or t
  misc_feature (487)..(487): n is a, c, g, or t
atgccaacaactttattgagcaccaattagggcaagggactaccacccttcacagttctcttgggcttattaacgtcgtggcccactcatttatttcacaaatgaggaaaccgaggaccctgctgggagagtttggggcccaaccaggggtcccactgagtctggggcaccctcagctcctgcaccacaaagcttcggttgacttgtttcaatgtaaagaacgttacttaaacaggtctgagtgctaggcaaactcacaagacctagctcaaagtttgagcacattgggtatgtnnnnnnnnnnnnnnngggagaatcaggcaccttgtnaatattntaaggcagggggccatttnggcattagccaacccaagtcccaggaaaggtcgggcaaaattcttaggcctgagggaatccccagnaacacctttaggtcttaggctcctncagctttaggggtttaaactcgtggcaccttncaattttncacccacatcctgttttgaggct

SEQ ID NO: 321738 - DNA, 1492 bp, Homo Sapiens
gttttaatttccgaatttattaaaatgattaacctcaatactgcaagtgcatgtacaaaatatttgtaaaaaatgtttttaatgaaacgttaaagaacttacctcaaatgctgaaaaagtcctttttcattctttcagtacaaggaatacattgtatctcaaaagtattacaactcagcaaaaacaatttataacagtaatttgaaaatgattgaaaattgaatactttacatatatttctatgatcatctcctaattcttacaatgccaaaatcttaaccaatcattgcataagctcaagctaagagttttattgaatgcaacctcttctaaactggtcaacggtgtgtggctgtcaccattccacacggtgaagttctacagcagatccggaacagttccgaggcccctacctttaccaacggaaattagggtttccctagaaggcatcaacagtggctgctgagtgcttgtgcataccgactcctgagaggcagtgatttactaccaaatgtcactgcttttgagacccatgggaaggttggcctccaaagaggaggccatgataaaattaaaacatcaaaaataagttactaaaattcagctgaaaaatgaaaatgggaaatgtgttttgtcactttttaagatcgaaattcccaaaatagctatcgttggtattcaaataaggtttaagatttagtctctgaacctcttcaaaacacccccaaactaaggtgggaatacaagaggtgacccgctgccctccagcacctccagacacagggtctaccttcatcttcctcagtggcaggggttcacatttctatgcagggaccccatgagggctggacgtgctctgcaaagtgctccgggtgcctcggacaggtgctcctgagaggctgtgtgggctgccctacttcactgttgaagacctccagacgcagtgaacgggggtatgggtgggtgtggaagaaggtctaccacatgctttccaaacgcctgaggagttcgactgcaccacaacaaacaaggatgagactatgtaagactgcagaagtagttccttagagaaccaggagaaaacaatctactttctaaaaatgttcatgagtcttaatttctatttggaacctatgggcaatcaacagtcttaaggagcgtcattgaaacaatatccccccaaacctggaaactagtaggaatcaattagtagtaacagtaagcattgagattttctccactggacttttcatgaccttcagattccttttcatatttcaagacatgggctactttcctatagacactatacaaatcccctgaattgatttttacttaggaacactgtatatcagaaagtacaggtacacatttcccagaaataaagagacctactggtgtcaaacacctgttacagatttatattcccaaattctctgtccaatgatttgcaaaataatccagagaaatgaaaagaacctggtattgaaca

SEQ ID NO: 321739 - DNA, 427 bp, Homo Sapiens
  misc_feature (12)..(12): n is a, c, g, or t
  misc_feature (55)..(55): n is a, c, g, or t
  misc_feature (74)..(74): n is a, c, g, or t
aagttattaaanacggggggttgtttccgttttcaataaacaagatctcttaccnatcactggaaattgttccnatcccctcccccctacaatttgaaaatggaaaaacaggggtaattcccgagtggacagatttcccatgtgtggtgggaaaagtccccagtgaattttgctctggtgagagggcagggctaagggtggggcgggggatcagggatttgcctttgagagtcttcttaaaggacctcttagaacttgataaagctcttagtttaggtctagttagtatctcagtggtgaggctaccaaatgccttcgcagtgcagagacgatggtttgagaccagggagaaggcaccgagccgttagttttctcaagcctctgtcccagcggagctagcggccttatgaccttcggttgcaatgtc

SEQ ID NO: 321740 - DNA, 1256 bp, Homo Sapiens
gccgctccaccatttttatatatagacacacacaggacacatatattaaacagattgtttcatcattgcatctattttccatatagtcatcaagagaccattttataaaacatggtaagaccctttttaaaacaaactccaggcccttggttgcgggtcgtgggttattggggcagcgcgttggtcgtcactcagtcgctctgcatgctctctgtcatacagacaggtaacctagttctgtgttcacgtggcccccgacgactcagccacatcaagtctcctagaccactgtggactctaaactgcacttgtctctctcatttccttcaaataatgatcaatgctatttcagtgagcaaactgtgaaaggggctttggaaagagtaggaggggtgggctggatcggaagcaacacccatttggggttaccatgtccatcccccaagggggcccctgccttcggagtcgatggtgtcccgcatctactcatgtgaactggccttggcgagggctggtctgtgcatagaagggatagtggccacactgcagctgaggccccaggtggcagccatggatcatgtagacttccagatggtctcccgaaccgcctgggtctgccggcgcccttccttcacgttcaggagcaagcagccgtgggacccttaagccgagctggtggaaggcccctccctgtcgccagccgggccctcatgctgaccttgcaaattcagccgctgctttgagcccaaaatgggaatattggttttgtgtccgaggcttgttccaagtttgtcaatgaggtttatggagcctccagaacagatgccatcttcctgaatgttgacatgccagtgggtgtgactcctttcatttttccttctcccttccctttgggacagtgttacagtgaaacacttaggcatcctgtttttggttggtagttaagcaaactgacattacggaaagtgccttagacactacagtactaagacaatgttgaatatatcattcgcctctataacaatttaatgtattcagttttgactgtgcttcatatcatgttacctctctagtcaagtggtattacagacattcagtgacaatgaatcaggtttaattctaaatccttgatcctctgcaatgtgcttgaagacacaaacctttgcggttaaaagctttaacatctattaggacagaatttgtcctgtgggttggaatctggatttcccccttatgaactgtactggctgtgcccc

SEQ ID NO: 321741 - DNA, 530 bp, Homo Sapiens
  misc_feature (485)..(485): n is a, c, g, or t
  misc_feature (507)..(507): n is a, c, g, or t
tcacgttcacatgattattcttgtttattgaggtctctttattctccacgggtgcttttttcttcaagtaaacagagcaggcgcaaatatctataatgaataaatttattgtcttacaaaaatcattgtctagaaatatgggaatacaagaaaagatatttgcggtcaggtgtctggtggtcaacagccagtacagttcataaagggggaaaatccaagattccaaacccacaggacaaattcttcctaatagatgttaaagcttttaacccaaaaggtttgtgttttcaagcacattgcagaggatcaaggatttaggaattaacactgattcattgtcactgaatgtctgtaatacccactttgactagagagggttccatggatatggaggccaccaggtccaaaacttggaataccatttaaattggttataggaggggccggaatggatatatttccaccattggtccttgggtcctgtngggtgtcctagggggccctttncccggtaattgtccgggttttgc

SEQ ID NO: 321742 - DNA, 2409 bp, Homo Sapiens
gggttcttcccttgttcttcttgcttttgtcctctctggtcttgcgtgcctccttctctgcttttctcttttttggtttgtccgcttgggtccttctgcttgttttcttctgcctgctctcctggccctgcttctgcccgttttcggctatcgttctcctggctctgtttcctttcgcgatccccgtgctgtcctctgtcgtgatcgtcccatcgtgctgttgttcttgccggggctgtctcgtctctctgtccgtgtcccccccttctttggccctttctcctctcgtgttcctttccttctgtctgtttgtcctctctgtcctcccatgtcttggttcctgtgtttgcttgttcggttgtcgcctgtgttcttgatctcttcattgtctttcgcttccttgtatcctcgatgttcgtattgtattctgtgtgtgtcgtgtggtgttggttcatgtatgggtctcctgtttgatgttgtcctcgatgagtgtcagtgttggtatgtgattatgggtgcagagtcatgaggtttgcacttcccacctttcatttgtgggtatggccatgtgtctggcttgtatcattggtgtgctgtatccaaagggttggtctggctcccgttcgggtgttgggggtctcagccttctggggcttgagggccactgtgatcctggggagctgctgctgtgggctcgggtgctctcgggcttctctgtgtcacaggcccccatttctgatggtatctctgggggcggtggatggccaggtgtcctagtgtcgccagcagcggaagtcaggtgggctgaggcgagaggcttttggccttgaggctccatgggcatggggtcctggatgacggtctgcttgaagagttcatctcgtaggtgagggagaaaacagtcaatgcgttcccaggtgatctcccagagggccgaggggccgcctccccgtgcatctgcactgtggaaaatctccgctgtgtccatcaccagaagcatgttcttcagagactcagggatcgcctctgacagtaagtcgctggagcctgcgtgcatgtacttgtccatgaagtctaagatggtgagccagagggccgcaaaggtagagagtgacagcagtggagacagttgctgcaggaagacctttgagagcaatgtggaagccctcatccgggtctcctccatcccacccacatctgcagggctgatgttctccaagagcttggtaagtagaggaaacagcaccttggttaaaacaggacgtcccattccagggcatctagcttttgcagatcatgtacaagtagtgctcgctgcagataggtcagtgcctgcatccgtacctggcgccgggcatcgcagcacagcaggcaataccctgcagtaaaagggcaccagcagtgggcccagagggtgcgagaatcagcttcaatcttctggccacctgtctccaggtggcgttgctcctccgccccatgagctgtagatagaggctgcccgcgtgtgcagggtgtgcatcaggtctagcaagtcctgactgacctgtaaagacaccgtatggtagctggcaggcacgccttcgtcctcatcatcatcactctgcccgccccgagaggcatgttggctggaggttcgaggccggcgaagcattgatccctctttggatttcttcttgaagcggttccctttgctgtcatatttgtgactcttgccacgtttctcctgggacttgcatccgccattcagactggcctccacaaagatccggagagtcttgacgcagagctcaaagttgtcaggtgtgatgtgggcagcatcacgcacgatgaaggacagcgattccacacacttaagcagagacttagtgtcgtgtggccccaaatccagtcccactgttaggctgtattgattgatcaggggtgaagggcctgggcggctgggccctggcttggagttatcaacgtcatccttcccaaccactaaccaaccactgttgaccacatcggcatctgtggctgatcggtgtatcttgcccggcctgccatggtcagtgtagacctctgagtcggaagtgtaccctcgatccaggctcacgtcattctgatggtaggatgggagctcactatctgactgggccccggcatcaggtgcatctgccctggctgtggcctgcagagcagctggaggcttcacacctgagccgatgcactccagcagtgtgaagagtgtggcccagtcatcacctgagtggatgttggctgcattggtcttcaggagttcatggagcccatacgcaacctggtggctgactcgggatagcacactgggcttcatcagtagcaaaatgcgcagggagagcagcacctgagcactgatctcttcctcgtgccgaattcgccacccaggcc

SEQ ID NO: 321743 - DNA, 566 bp, Homo Sapiens
acaaagttatgtataagtcatagggaccaccaaatactgaaatatgaagactctatgaccaaagttcaaaactgattttaaggaactgtgtgaagcaagacaggaaaatttgtatttaacactctatagaacttcacagtaaagctggaatttagagactaatggcttaacaggagtactgccaacaaggcctttcctttctcagaatcatctcctaatattcgtataccattgacaagttgtaacagcagacttagactttgtgttttcttaagatggggcttaataaggtgcacaaatatgctgatatcctgtattatgagcatgtaaattattctcagggtttaaagaaatacagaaaaagaatgttaagtattctcagtccaacgtgctttgcatcatcaacaaaatgacaagtcaaagtattttgcagggatcagatatcaatcaacctccataacaagttaggtatatcaaatactgctgtaaaacccatccagcaaaaactgattattgtggatttcagtacaaatttccaagttgtcacacattactgatgatgatca

SEQ ID NO: 321744 - DNA, 684 bp, Homo Sapiens
tacatcaagtgtgctttatttcctccacaggtattctgttaaataaagcaccatttatatactgccaggccacagctaaagaggattctttacagaatcaaatttcttgtggttgttccgtatacaagtaaacttaattttgataataagaaccacagcgatcggaggcaatctgcctctataaggtacaaaactggcacagaggacaccatatcatacacagtaaaaatgctgtaagtttaaattacattgtacagggctaggcaaccctgttcttcccagacagccatattaaatgaaagccactaaagtgaactcttaattacataaaacatatccattatctgattggccctttagggagtattactgaaggtggcaagtttttttcctctgggagttctgcctgaccaagaattaagcctataaatctatcttgccattcaagcagagagcactggacaaactgaagcacaaaaacaaataagcaaaacttatacaaacagcatgggggttgggggtgagggacttaaaagtagacatgctacacctaatgtcaagaagcagcttggtttcctttgccagatatccttgtgacgacatggattgtagattcaatggtcctacacagggtatctaaaatgtcatgttgctgcatatgactaaagagtcctctggaatggc

SEQ ID NO: 321745 - DNA, 1163 bp, Homo Sapiens
  misc_feature (56)..(56): n is a, c, g, or t
gggccaggccagaaccccccagatgaaaaaaaacctggccaccctccagtataccncccccaaagggcaatccagataagggatatgttttaatggtaattaaagagttccactttagtggctttccttttaaatatggctgtcctgggaagaacagggttgccttagccctgtacaatgtaatttaaacttacagcatttttactgtgtatgatatggtgtcctctgtgccagttttgtaccttatagaggcagattgcctccgatcgctgtggttcttattatcaaaattaagtttacttgtatacggaacaaccacaagaaatttgattctgtaaagaatcctctttagctgtggcctggcagtatataaatggtgctttatttaacagaatacctgtggaggaaataaagcacacttgatgtaaaaataattgttctatttttattgacatgactgattgattgctattctgtgcacttaattaaactgattgtgatgacttttcaaaaagcaaactattacaccaaaaagcgcataaaacaatcacaaccccaaacaacaagcgattccatgcttccccctcggcactacgtactcgtcctgacacccccccatctacgacacttcttccttaccatacattttcttgtcacaaaccctaaaatgtgtccactataccactatgcccgcccgcgcctacgctgggggccagatgatccccctatcacataatttccttgtcggcgttaacccccagcaatcctgaatcagcacacacctcaattacccctatattattgtcctaatgcaaaccagcaccacccccacacccatctttatctagcaggacccttcccgctgccttcgtacttctcgccactcttgccccttcatggtccccatgttagctccccctatcaatatgcttatctacccgcgcatactctactcggccgatacttacccaccctattaagcgcccccgtcctaaacccctctcaagttaccctatctattgcccccccatactaatctgttccgcctactactacttgtcaggttgccttttttcagcatactccggctccctccgttatatggcccccgcccctactttctacttcgcgcctacttccaaagcgcgcgccagataacctgt

SEQ ID NO: 321746 - DNA, 613 bp, Homo Sapiens
ctcttccttacccatgctttggggtgttaacagctgaggctattcgtcggtgacctgtgggactcgagctattcctgcagctcagcagacctcctggccgtggcagacttctgcgttatgacccggctgctgggctacgtggaccccctggatcccagctttgtggctgccgtcatcaccatcaccttcaatccgctctactggaatgtggttgcacgatgggaacacaagacccgcaagctgagcagggccttcggatccccctacctggcctgctactctctaagcgtcaccatcctgctcctgaacttcctgcgctcgcactgcttcacgcaggccatgctgagccagcccaggatggagagcctggacacccccgcggcctacagcctgggcctcgcgctcctgggactgggcgtcgtgctcgtgctctccagcttctttgcactggggttcgctggaactttcctaggtgattacttcgggatcctcaaggaggcgagagtgaccgtgttccccttcaacatcctggacaaccccatgtactggggaagcacagccaactacctgggctgggccatcatgcacgccagccccacgggcctgctcctga

SEQ ID NO: 321747 - DNA, 996 bp, Homo Sapiens
ggggtcagggtgcctttattggtgaatgggaatgtgtgggttggagctcaatggccatatgtcggcacgtccagggtccccaaggcagcaggttccaaggcactggggcagcccacgccgggggaagccctgagcagcaggcaccattctcgccctgcgcagggcctgccacttggggcaggccaggagggctggccaggccttcagcaaagctgttgcagctcaatcagctcctcttgtgggacccggaggctttctgccggtagatctcagcggtgaagggctcttcgtataggagagccactatgtaggtgagggccaccagcaccgtcaggagcaggcccgtggggctggcgtgcatgatggcccagcccaggtagttggctgtgcttccccagtacatggggttgtccaggatgttgaaggggaacacggtcactctcgcctccttgaggatcccgaagtaatcacctaggaaagttccagcgaaccccagtgcaaagaagctggagagcacgagcacgacgcccagtcccaggagcgcgaggcccaggctgtaggccgcgggggtgtccaggctctccatcctgggctggctcagcatggcctgcgtgaagcagtgcgagcgcaggaagttcaggagcaggatggtgacgcttagagagtagcaggccaggtagggggatccgaaggccctgctcagcttgcgggtcttgtgttcccatcgtgcaaccacattccagtagagcggattgaaggtgatggtgatgacggcagccacaaagctgggatccagggggtccacgtagcccagcagccgggtcataacgcagaagtctgcctgtctaaaatcaatattgccgaggcctccgcagcagtcaggccctgccaccgagctgttcgttacctcggctcccgggttcccagatctcttcatccgggggccgcctcaggaggcaccacgcgggccccgctgcagccacgcgcccccggaac

SEQ ID NO: 321748 - DNA, 545 bp, Homo Sapiens
  misc_feature (56)..(56): n is a, c, g, or t
gttgaaaggaaacaggtcactctcgcttccttgaggatccccaaataaatcacctnaggaaaattcccaacgaaacccccattgcaaaagaagctggaaaagcacgaacaacgaacgccccaattccccaagaaccgcgaaggccccagctgtaggcccgcggggttgtcccaagctctccatcctgggctggctcagcatggcctgcgtgaagcagtgcgagcgcaggaagttcaggagcaggatggtgacgcttagagagtagcaggcccaggtagggggatccgaaggccctgctcagcttgcgggtcttgtgttcccatcgtgcaaccacattccagtagagcggattgaaggtgatggtgatgacggcagccacaaagctgggatccagggggtccacgtagcccagcagccgggtcataacgcagaagtctgccacggccaggaggtctgctgagctgcaggaatagctcgagtcccacaggtcaccgacgaatagcctcagctgttaacaccccaaagcatgggtaaggaagaggctt

SEQ ID NO: 321749 - DNA, 425 bp, Homo Sapiens
  misc_feature (23)..(23): n is a, c, g, or t
  misc_feature (46)..(46): n is a, c, g, or t
cctgggctggcctcaaccatggncctaccttgaaagcaattccgancgccaggaaatttcaggaaccaggatggtgacgctttagaagattagcaggcccaggtagggggatccgaaggccctgctcagcttgcgggtcttgtgttcccatcgtgcaaccacattccagtagagcggattgaaggtgatggtgatgacggcagccacaaagctgggatccagggggtccacgtagcccagcagccgggtcataacgcagaagttctgccacggccaggaggtctgctgagctgcaggaatagctcgagtcccacaggtcaccgacgaatagcctcagctgttaacaccccaaagcatgggtaaggaagaggctttatggtaatttactccattgaggggtgcagggttcttgggagcacggctct

SEQ ID NO: 321750 - DNA, 397 bp, Homo Sapiens
  misc_feature (310)..(340): n is a, c, g, or t
gttcgctgacatgaaaacctttctttttaatttggttgatacacatttgacaaaatattttagaataaaataatccatgaacaggtacaaggtatttacagtaacataattgaaaaacataaaatcgatatatttctttaacagaaatgtctataaaattttctactgtgaatctggaagactttcagttcctacttatcaacctggtcttaagccccaacaggcgacatgtaaggcccaggagtaggatatacaaactctaacacatttggcaattaagaatcatctattagtgtgagctggcaggcgnnnnnnnnnnnnnnnnnnnnnnnnnnnnnnnaagaaccagatcttagggtaagatacagaatggaagactccactgaaaacaactatg

SEQ ID NO: 321751 - DNA, 820 bp, Homo Sapiens
ttttgctgacatgaaaacctttctttttaatttggttgatacacatttgacaaaatattttagaataaaataatccatgaacaggtacaaggtatttacagtaacataattgaaaaacataaaatcgatatatttctttaacagaaatgtctataaaattttctactgtgaatctggaagactttcagttcctacttatcaacctggtcttaagccccaacaggcgacatgtaaggcccaggagtaggatatacaaactctaacacatttggcaattaagaatcatctattagtgtgagctggcaggcggtgggtggggggtggggatggggagggaagaaccagatcttagggtaagatacagaatggaagactccactgaaaacaactatgggacaagaaagatctaaaatcacacttatctttcacttgtctcctgtgggagaaggctgcaaactattttaaagacttagtcaatttttcccattagcagaaaatcagcaaccctgagactccaacatttcatgacataaaagctaataaacatctagaagctgattaagatttataaactaattttacatcagatagaaaataactcttatgatttaaaaatacatgtaaggaaacaaaatttctcaaatttatttttcatgcctaattcttaaacatttcaactaatattttctattgtctgaaattagttccacacacagatacactttaactgaatgctttgagtacaacttgctcttgattattaaatggaatgcctacttccttgtattattattcatacatatttaaaagaaatgagaag

SEQ ID NO: 321752 - DNA, 654 bp, Homo Sapiens
gaaaaccacaccaatttattatcttacagttctagaggtcaggagtccaaaatggttttcaccaggctgaagtcttgtcagtgcggctttgtttctccacggaggctctggggcagaatccaatgccttttccagctcctccaggggccacctcatcgcctggccccaggctttcttgccatcttcacagccagaagcttccttgcttcatgcgcagaccctcgtgactccccttcccttataagggcccccatgattactcagggcccacctcaaccatccacggtcatctccccaccacgaaatcctgaactgaagcacaggcgccgggtcccttttgccacgcaaggtaacactttcccacgtcctggggttccaaacctggacatctctgggggctgttattccacccaccgtcatcagtgaggcgccttcaggaggggctgtgaggtcacgtgaggtcggcttcagaagggctaggtttgagtgcctggaggacactggcaggaggcgcccctgggctccatccatttaccacgcacgcactcagcacccctgagaccatccctggggcctacaggagaaccctgtacctcagcagccctgaaacctgctttccacttccggacctttctgaaatcaagacgcatcttt

SEQ ID NO: 321753 - DNA, 677 bp, Homo Sapiens
  misc_feature (49)..(49): n is a, c, g, or t
  misc_feature (445)..(606): n is a, c, g, or t
tggatttaattttgtatccccttgacccaacatctacccaacccttccnaccttcaacccccattacctgctccaggatccccattcttgacacgtaaggcaacagacacacagtgaggcttggccaccatcaaatagcttaacaagaggttgggagaccagacttttttagttccattcatgttggcaattgaagaacaccaccccaaactttaacaagatccctaagtagatgctgacgctgcaggtccctaggccacgattagtttacaatgtcaacccaagccctggagaaactagtgtcctcacaatgcctcaaagtattcaattaagactatgacattaaagagctaataataaaagccttcagtatttgacacacagtcaaaccaacagtaggttcttaataaatgacagatgaccagtggtagtaaaattaaacccnnnnnnnnnnnnnnnnnnnnnnnnnnnnnnnnnnnnnnnnnnnnnnnnnnnnnnnnnnnnnnnnnnnnnnnnnnnnnnnnnnnnnnnnnnnnnnnnnnnnnnnnnnnnnnnnnnnnnnnnnnnnnnnnnnnnnnnnnnnnnnnnnnnnnnnnnnnnnnnnnngatttgctcttgaatctgtgttctcatcacactatgctcttctgtccctacagcagccactttctcttact

SEQ ID NO: 321754 - DNA, 1092 bp, Homo Sapiens
  misc_feature (38)..(38): n is a, c, g, or t
  misc_feature (46)..(46): n is a, c, g, or t
  misc_feature (54)..(54): n is a, c, g, or t
aagggaactacccaggccaaggccttttggtttttttnaaaatagnagaacaanggtccttattaacccctgccctaaggctgggtccttgaaatggccctagccctcaaatatcccttcctgcccttggccctccccaaaatgttgggtattaacaggcacgagctaccgtatcctggcccaaaattattttttaatggttgtagtggagcaaattttcctcattatgtacctacagggaattagcacactcttaacggttcttgaatacaacaaagaatgtggtattgatgagtacacactatatataaattcagccaaacatccacatccaaacatccaagctgtaagactgacttttaacttaaaattttgaaaataaatttaaaaatgccctccaaactactggtaacacactcctttatggttttacgcagcaggttccaggaattacagttttctgtgcttccttaaatctttctcttggggtagccatcaatcatcttctttctcaatataggtctttgcattaacccgcgccatctgcctggccaagtacctgtctctagctgacattacagtttcttcattgttccgctttgcaaacttgctcactgcctcaggtggtctctcttgttctttacccttctcttgcccttcctctgtgagtctgtgttttgctcccagtgatgattcagaattagagggtttctcttggtttctttctttgtcctttgccatgtttctcattttgttggatctttcttggtcaagaaatttatcctttgccctagaatttgggctgctttcctttctgtcttgatttctttctgaagactgaacacctacctctcgtttttctctatctctgtatttatcattattttcatatctttccttccttactttcatatgctcttcctttgctttgcttttctcttccttctctcctttctcactgggtcggttctgatcattttgttgtctatctctttcttgttctctttgggaatatttctccctatctttctcccttttccatactctgtcacttctttctctttggtccctcgcccttggtttatcttcctg

SEQ ID NO: 321755 - DNA, 931 bp, Homo Sapiens
ttggagatttgtcacattttattcagtatttctgctgcactgccagcctagggatgcacttgattcccaagaaatgcaactgtcctattcgcagagccgtccacaggtacctaccccctggactgcagcaactttattaccttaactagcacagaacagaggttgatttaaactccttacactcacttctcagatcaatgaatgggcaaagaaacacctcatggctctgggaaggcatgttgagacccgtttttgcaagtcctgaggaatggaagaatatagctgccaggtatcccaagtctagggcagggagggtagtatcggcatcactttcactgcattctgttggtcaacgcaagtcagaggctcagcccagatccaagggcagggaagaggctccatcgtgtagttgggctcacttggaaggtaatgggaggagttggtggctgctttaagacacataccacatctagatttcaacctccagaaaagtccaaagatgcactcacaggagcccgttagtcaactgaagctggttcatggctctcttcttcaggtggagactaaccaactccctgacctccttctgttaagtgctccttcctttttcctgctgcctggaatgtctatgtgccatctggagctatggcagccttcttgcaaccatgaggcaaactctatgtgcaagagcaggtagctagaaagagcctgccagccctgggcttatatcctgcttcccagggagcttaaagatagcaaaacccacagccattttcatcaaatgccaggaaattcttaggctgggattgttgggattgtttgaatggttgagcgtgaaagacttgttataatgggcttgttgaatacggtgaaagatgagatggcttttagctgcctccactccccgtgtcccatgctccatagatgtttc

SEQ ID NO: 321756 - DNA, 687 bp, Homo Sapiens
tgatctcagattattttgtgaaagaattttactgtacttagttcaaaagagtagaaagaatgatttactattgcagacatatgtagggtaaaatcataatttatttaaactgactgtacaacaccatttagagttgatattgacataaatgttattagcctactaatttggaactgcatttctcaacaatgctggcaagcatcttccgtacttagcataccaagttgtaggggagagactgtgtatatattttttaaaagcaatccaatggatttgtttttgttcatattttgaaaacaactcgaaggatttttcttattttagaaggtagaaaatatgtggacctgtgttttaaattaatatgtatttataaattataacattgaatgatacaacagagctctaatattgatgttctcactttctgatatttaatttttataaatgtttttgtaagtaactaattgtagtattgcttttaaatagttttaaaatctatctcaaataagttctgcccagacctatttccttaggacagtattctaaagttcagtagtccagtgtgagcttgaaatactcctagatcccgtcagtgatttttatatataccaatacacaagcaaattattaatataccaaaaacctaatttctgcattgcattaataaaatacttgttattttgcctt

SEQ ID NO: 321757 - DNA, 699 bp, Homo Sapiens
  misc_feature (69)..(69): n is a, c, g, or t
ggaatataaatttatttaatattagtggtctttaagtataaacttgatgtaattggtttgggagggggncagtgatgatgacttctgaaacaaaatttggatttccttttaggaaaagtagaaggcatagacttacaagtctaacaggagataggagagagtcactcataaaaaatgcaaattgatgaacgtactattgtgatacattagttgaatggatgaaacttttttaaagtttcagatgaactcccataatgaatgatgaatttgtgatgagggataacctggaagtggtattcacacattatgctacaataaaaggttctaccgtggagaggattttgacacattcagtaactaatggaacacaccgtcaacatgaattcgcaccttacatgacagaagtgattcagggattcctatgaatagaaatgctgagaaggaacgcattttattgcagaagctaaaaagctaaagtaccagtcatctagagagaaggaaattaatgtttcttaataatcctgttaaatgtttgattgtttttggaatgtgttattgtaaagatgtcatgcaggacatgtatatgtttgtctgttgtaaaatgttaacgaatactttgttcagggctcactctctctttgtcatgaaagccagctccttgtggcgaggtaaagtggaattccaataaagaaattcctt

SEQ ID NO: 321758 - DNA, 871 bp, Homo Sapiens
  misc_feature (213)..(216): n is a, c, g, or t
  misc_feature (221)..(221): n is a, c, g, or t
  misc_feature (252)..(252): n is a, c, g, or t
  misc_feature (410)..(442): n is a, c, g, or t
gtagccaaagtaaaaagatttatgagaagaataaggactctgctatagatctggatgttggtttcactttcaaacacaaaaatagtttctttttaaaaaagtacagtagaatatcctccattcataattgtaattaatttagcataagcaaagaaatgaccttaggaacatacccaggttttaagatagatttctaggtaatgggcctgaaannnntttgntctgaatttattttccaacgatttcaaatantaatttgtcatctgtgtgtagacatatacgggcatgaacacacattcacccacacatacgaaaacacttagctttctatcagattcagggtaatttttttattgcaggtctcttttaatattggctagcagaaaacctatccccaacctaacagattnnnnnnnnnnnnnnnnnnnnnnnnnnnnnnnnngagctatttttccacacttcctcacagtgaaaagctctctaacaagataccagaaggtcgagagagacaatgcttttatggctgggccttgaggacaattctggttgcatttaaatctcagtgccaaatgcactaggttccctgccgttataatttttggatcagtctcttctgaaatcaggtcacagagaaaacaggatgatttctcccaatctctcctataaaacactgtggtaagacaagatttctttttgttctgggctatcattcccatgatcatgtgcttccctttcccttaggaaccacccaagaacatacaaggaaaagttaagggaaaacatcataagaaccactgtcttgccactagcacatgctttggaggagttctgcagaatggaaacctgaaacagattcactggctgatgctcc

SEQ ID NO: 321759 - DNA, 605 bp, Homo Sapiens
catcagctctcgaaccaatgaatattcatcatgattggtgatgccaatgcgggcacagatggtcatgagcatgtcagtgacagtcttagagtcatccaccatgatcgtcttcacagttccatccagcatacggatcttcaggggtctctgtttcttcctgtactccatagtgtcctgttagggcaggaagaagagacaggggcctactctgagctaggggtattatttcctctttacacagcccgaggggagagagtggagcactgaaaggaagactatggtggttcgttcaaaagcagggaattatgactgtctgttaataggaagaaagcatggggagggctaagagacaacagatgtaagtgctgaaaacaggaggtggaacagggagaagctgatggaaggggatgtggtggtccttgatgaaaggatacttaccccatttcggagcatgtagtagtccaaagctttcccagcctccagccatataccctttttggggtcatcatctgacagaaagagcccaaagtcgctggctaaaagagaggatggatcactttaggcttatgaagaccccaatgtggctgaacagcttgtaccatgtt

SEQ ID NO: 321760 - DNA, 377 bp, Homo Sapiens
aattaagtcagtagtattcttcaaggtacaattgcaattgagtaaagaccggaattagattgtaaagaagaaagaggtgatgagagaaaacccccttcttaactgtccccacccatcttgatctcattgtttcattactttcaatagcacctatattttcaggtcacacattatgttgcttaataagctgcctagtgtctactgttttcttcaacaagaatatatgcttctgaaaagcagatattttatattgttactgaatttcctctctgacacagtactggatataattaagaactttagggacacctaatgacttggctttttctggaaagctgtgaattaatgaggttaaggctgggtgtggtggctcacac

SEQ ID NO: 321761 - DNA, 774 bp, Homo Sapiens
tgactgtttcttaatcagtgccatgccaggaaaatagggatgtttccttcccagagatctgtgtgtcttttttcagaaacatctgtgacaggcccatcaattttgaaatatttggtttttgagcctgtcactctaaaccagcgtttaacgttcaaaaggcaaataactgatgaccaggcggcacattgttctgctccgtgagtgtctggcactgggaaaggtgtagattgtctagaatgacagcaattccgacgccccagtcagtcctgcgtgattgtggcgagggcgcgtctggcaccgggaaggtgtagatcatctagaatgacggcgattccgacgccccggtcagtcctgcgtgattggcgagggtgcatctgtcgtgagaattcccagttctgaagagagcaaggagactgatcccgcgtagtccaaggcattggctcccctgttgctcttccttgtggagatccccatgccccactccctcctgcctgcattttcagagctgcctctgaagctcgcttggtccctagctcacactttccctgcggctgggaaggtaattgaatactcgagtttaaaaggaaagcacatccttttaaaccaaaacacacctggctgggctgtaaacagcttttagtgacattaccatctactctgaaaatctaacaaaggagtgatttgtgcagttgaaagtaggatttgcttcataaaagtcacaatttgaattcatttttgcttttaaatccagccaaccttttctgtcttaaaagg

SEQ ID NO: 321762 - DNA, 832 bp, Homo Sapiens
  misc_feature (201)..(201): n is a, c, g, or t
gggggatcatcttgtcaaccacacctcacccaggcctggaactgttagggagaaggaaagtgccatgaattgtctggaaaccgaagacttgcataacatggtggaagggcagggctgggtggggagagcaggacaagttttctcattggaaatggggtccatgctctggcagtcagtgacatcttagtttgagtggttccnaaagacagacctattccagagcttggagtgagcatgtcctacaaggataggcagaggaagagatgggcccaggctatatcctgctaaaggaagggtctcagtatgggaaaaccattgagttttccgatttccaggtactaaactagcacttttaggatcttagcctttagaccataaggactttgggagccttaaacaactctggcctcttccctcatcaccacttctacttgctataggagattcttgctttctgatgcagaggcttttactcttggctgaccatgtgtgtagaaaaatgtctacacacagtatgtgctgccattctgtactatgcagtgatacatgaaagcatgggctcgggttaataggcctaggcaccagctttagctcggctgaagctggcggcccctggcaaattactttgattgaatcacctgtgatgttgaaggctgcctacttggtgaaatttaagtgagctgtatgtaaaatggcacagggtaggtgttcagtaaatgactccctttcccactactgaggctagagggacctggcaatcactacaggagggtgagaaagctagtagggaatttaagaaaatagaacattccctaactattgtttgattccc

SEQ ID NO: 321763 - DNA, 1553 bp, Homo Sapiens
  misc_feature (1284)..(1304): n is a, c, g, or t
cgggaaaagagagtttattttatacagtagttgttttattttatacagtagttgtacagtaattgaggaaaaatgttgtcaggtggcagaaaacaatggagccacctagaagctggctgatgcagctggggcacacagaggaggggcctgggtaccccttttggggaaactgagacgaagctatttagaacagcttgaaaataagagacttttctagaatggggtggcagctaaagtagcttctttttctttctttcagaatgctcagatgcatcagttccttaatatacacgtgaaatttgaaaactgtacattcggtgagattaaattttatatacaactagcaattgtccagctttgttgctcattttcaattaaggctaaagtgttcaacatgagaaaatgtgatacatttgatacagtgtggggtgggagtggatgggcagctcttggtggtactggaccttccacaaggctgtgtccacccagaatccatgctggcaggagggaggcagaggtatcaaaccaaacctctcaccaagcggcccaggaggggcagctgttcctctcgtgacagcacaggcccatgagacagtgtcttctttttgaggggagctggtccgggtctagttcacttcaccaagaagtccatgctgtcgcaatagtttgttaagtctttcaatttcttgttccttctcagagcagctgaactcaaggtgttgaatcttggcggccaattgtacattcatctgttttaaccttaagagttgccgttctgaacgtgtcttaactgagatgataatcccattgatgatccgggccacccgccacagccggagcagaatcagcaggcccagagcctcaaactggtgctcctggaacaggaggacaatgtcgaggatgaatgagaccaccaccacgacggcatccaggatctcaaacttgtggtgaaagaactccaggcggaagacaaataatttaaagatgatctccatcataaaaaagaccaagatggtgatgctcatgtagtggaataccatggcagcatagttattcttgtcgggctggatgatcttcaggtccaggatgagctcagcaagcaccaggagggcatccagaaccaccaagcagatgatgatgacctgaaacctgtgggagctgaacagtttcctcaacatgcccctgaagtcaaggggggccctgggtgcggggccaggggcaggggcaacgtcaggggctgcagctctgccttcctcgcctgagactggtgtgggtggtggctgnnnnnnnnnnnnnnnnnnnnnttcattctcccatttcttgtagttgatgttccaggcatggtagtcgtctcccacgaccgtgaagtgccttaagaacttgctcatcctctcagcgggagccaccttggccctgcgggtgactgcctagaaggcggggacagagagcaagagcttcaggcagttggccactcagagcccacatggcccaggccgggccaggccactgcaggtgaagatggtcccgggtgcgtagaaccccctgcaagcccc

SEQ ID NO: 321764 - DNA, 596 bp, Homo Sapiens
cccagccagtcccttctcagtggaacccctggttatgtcgtggggctcccattagctgctggattccagcctccataagggtggagctctcccgtgtcagctcgtagcacagaaggtgaagagcctgctgtggggccagggcttcccagattacgtggccccttttggaaattcccaggcccaggacatgctggactgggtgcccatccacttcatcacccagtcattcaacaggaaggattcctgccagctcccaggggctttggttatagaagtgaagtggactaaatacggatccctgctgaatccacaggccaaaatagtcaatgtaactgcaaatctaatttcatcctcctttcctgaggccaactcaggaaatgaaaggacgattcttatttccactgcggttacttttgtggatgtgtctgcacctgcagaggcaggcttcagagctccaccagccatcaatgccaggctgccctttaacttcttcttcccgtttgtttgacaatgctcagatgcatcagttccttaatatacacgtgaaatttgaaaactgtacattcggtgagattaaattttatatacaactagca

SEQ ID NO: 321765 - DNA, 763 bp, Homo Sapiens
  misc_feature (123)..(123): n is a, c, g, or t
  misc_feature (179)..(179): n is a, c, g, or t
tttaccttatttctaaaaaaaagtaatcctttgggggtcctttcaccagttagggttgccggtaattttggttttggaagggaatttttattaggttttaaagggacataatttcctcccttntagggagctttccagaggaactagaggatgaggttacctgcagaacccctcacttntatggaacctccccggcgggtgtcttgcaccctaggattacacacatgtagtaacacaatttatttccacattctgtagccaaagcctaatgggtcagggttcatcagtttaccacacggcggtcatctcatgttgatcagggtcggggttcatcagtttaccacacggcggtcatctcatgttgatcagggtcggggttcatcagtttaccacacggcggtcatctcatgttcatcagggtcggggttcatcagtttaccacacggcggtcatctcatgttgatcagggtcggggttcatcagtttaccacacggcggtcatctcatgttcatgagggtcggggttcatcagtttaccacacggcggtcatctcacgttcatcagggtcggggttcatcagtttaccacacggcggtcatctcatgttgatcagggtcagggttcatcagtttaccacacggcggtcatctcatgttgatcagcgtcggggttcatcagtttaccacacggcggtcatctcatgttgatcagaagccttgacagcaagcctagatgtctttggtcccagatcactccagcctc

SEQ ID NO: 321766 - DNA, 697 bp, Homo Sapiens
gattattggaaatgttttaatcactcttgccattacctacatctattagcatagatgatgaaaagctgttactggtgattatagatgagtatttccaggacaacgttctaaaagtacaattatttcttattggggagattacaggtagtttggcaaagcattgaagtacaaaggtacattttcaattaaaaagcacacttctacaaaagatttggtttttaaattatggttacacatttcagtaactcatagctgctgtgcaaattggtagaccttataagaaggcacttgtttgtaagccagagaagaaactttaattgcatcctatcagattgttgaggtgggtgtgatagtcttcaggtgcagtgcgttccattcactaacgctcactgtcagtgcccatgtttctagctgcctccatgtgactagtgagctgctggtgaaagtcgtgtgaaatcctgtacactgtgtatagaacaatgtaattttatgttaattgttattactttaaaacatatctaccatctgattggctggtaccgagagctgtgggtaaaatttgaaaattgtatttagaataagaaattttacattttaaaccctattgtcctttatgcattttcaatgaaatggaatgaaggctaatatgcttgctttatttacttttgtaatcttggattttgtagcttttaaaact

SEQ ID NO: 321767 - DNA, 1066 bp, Homo Sapiens
  misc_feature (45)..(168): n is a, c, g, or t
  misc_feature (224)..(361): n is a, c, g, or t
  misc_feature (881)..(1014): n is a, c, g, or t
ttacatcaatcaaaattttaaaatgcataaatggaaagtttacannnnnnnnnnnnnnnnnnnnnnnnnnnnnnnnnnnnnnnnnnnnnnnnnnnnnnnnnnnnnnnnnnnnnnnnnnnnnnnnnnnnnnnnnnnnnnnnnnnnnnnnnnnnnnnnnnnnnnnnnnnntgttggtatgggagaagttgaaatcacatgccttctgataggatgcactgggcagnnnnnnnnnnnnnnnnnnnnnnnnnnnnnnnnnnnnnnnnnnnnnnnnnnnnnnnnnnnnnnnnnnnnnnnnnnnnnnnnnnnnnnnnnnnnnnnnnnnnnnnnnnnnnnnnnnnnnnnnnnnnnnnnnnnnnnnnnnccttgctatggaggacatgataggaactcccagtcaatctcaagaatggggtctgcaggttggatggtggcaacatgaccgtgcaagcatcctggagtgttgcaagtgctttggaaaacgggcagcatgcttgaatgtgcacagatcaccagggggtcttcttaagacgcagactctgactcattgagcctgggtgggcctgaggctcatgggacctatccaatcagctccagctgtgcccattctgctggcccagggatcgtacttggagtagcaagactctagtgaacctatgaagagtatttgctatttacctcccaaacacgcaccttccccttcttttgattctaaactctaattttcctttgggaacatcctctccctgccctctgtgcacctgttttgggtcagatagtccccaacactcaggcaagaagtgtgcaacctgggcctctgcctccccatcctctggccactgtgaaaggttcaaggctggttctgaaacccaggcagggccagnnnnnnnnnnnnnnnnnnnnnnnnnnnnnnnnnnnnnnnnnnnnnnnnnnnnnnnnnnnnnnnnnnnnnnnnnnnnnnnnnnnnnnnnnnnnnnnnnnnnnnnnnnnnnnnnnnnnnnnnnnnnnnnnnnnnnntcctcttcacagggtagcgggagagagaatgagagccgagcgaagagggaag

SEQ ID NO: 321768 - DNA, 779 bp, Homo Sapiens
  misc_feature (18)..(18): n is a, c, g, or t
  misc_feature (28)..(28): n is a, c, g, or t
  misc_feature (57)..(57): n is a, c, g, or t
  misc_feature (65)..(65): n is a, c, g, or t
  misc_feature (104)..(104): n is a, c, g, or t
  misc_feature (123)..(123): n is a, c, g, or t
catactcccagccttttncccggtgccnggtgtaccccaggaccctggaccttaaangaaccccnggctgaacggagccttaggacctcccaaatggtaaaagnactacctaaaaatattaantattttcccatttaaatttgtcctaaacacttaattttttcctggctgagaataatctttaagacccctttattttcatcacccagcagtttccctatcactgggagccaatcttcacaatgacaaagcttttatcagctgaacaaaagatattgccctacccccaggatagtaaagaaccagtgactcaggagggtgtggctaggctcacttcctaacaaagttacacactcctgccctgtgcaccactctcacacccaaacactggccttgacaaaataacaaattatgacatgccaaagaccttcaaaatcacttgggaatggtcaaaatagattttgaatacagaattccaaatgttcacagaatatgaatatgctaatacatgccatacatgttttctgcttacttcgtatacaattttgtgtcctgctttttaaaagagttcatattctagtgtgaactttctaccataccaataaataaagatattcattgcagccttgtttatacaagaaaaatgatggaagcaaccaaaatgacaatcaaatgacaatcaatcagggaatggttgaataaattgtgactttcttattgacttgtaagcgctcttgatattatacataaagttattatacagttatagagtatacaaa

SEQ ID NO: 321769 - DNA, 620 bp, Homo Sapiens
cgagcgtgagggctgcagctcgtcgttccgccagggagagtcgccttcatagatgaacgcagcgacgtatccgaagagaagcgattgggcgaagggcgatgggcgttcggtcgtaacctcggcaaccgttattgcgcgtgaggagatccggcgttggatgtcaatgagtgcgggcacgtcgtagacgtcctgcagcacctcacggatcgcctcgagcacgatagggaaactggggaagcgtgcggcgacctcaagcaactgggaactgcgttggcgttgctgccacaggggtgaccgtttgccgggatctctccgggggagaagcagtgcgcgcgctgcgcattcgcggaatcgagcagcgaacagagccgatccgccgacctcccgggtgacaagctcttcgatctcgtcgacctcgaagccgatcagttctgcgcccggtgggtcctggtccgtctcgggaatccgcagtacaagtccgtcgtcgctggccaacgcctgcgcttcaactccgtagcgttcgcgcagtcgagcattcacgatcagtgcccacggtgcgtgaaccccaagcccgtaaggggaatgaacgatcagccgccagtcgccgagttcgtcatgga

SEQ ID NO: 321770 - DNA, 687 bp, Homo Sapiens
  misc_feature (558)..(601): n is a, c, g, or t
tgaattactagaggtaataacaaatcttactataaaatcaagaggtttaagaacatacactgggcagatgttgattccgtgcatgcccaccttttattaccaaacaaggttttgtttatatgattgtattagaaatgctcagacttccccagaaatgaaccataaattttggaacttcctttcagctcaagaggttcagctatattgtatttgtgcagtgtaatcactactatttctgctcggtttcctaaaaggaaaaaaaaggcacagtggtgatgaccctcatgaatgagccacgcttctgcattctcttagaaactgctgtgaaaaacaatttatgtttgcagggtttaaaaatcagtaaaaatgggaatgattgagctaaaacccactctatgagaaggaagattactgaaaagcatgtgacatattgctacaaagattttttttcctaaatgattcagtaattgaatgattatttaatatatagtgctatcaagcaatccctggtactttggacttccatggcttgttatataaaattacatttttacatgnnnnnnnnnnnnnnnnnnnnnnnnnnnnnnnnnnnnnnnnnnnngtcagatccatgttctaaaaaatttttgtaatgacatgacattacaagagtataaaaatggacattaaatcatggccttgcattaa

SEQ ID NO: 321771 - DNA, 852 bp, Homo Sapiens
  misc_feature (87)..(87): n is a, c, g, or t
  misc_feature (382)..(395): n is a, c, g, or t
  misc_feature (655)..(769): n is a, c, g, or t
  misc_feature (773)..(793): n is a, c, g, or t
taaataaagttttattggaacaccagccacactcattcgtgttcatgtaggtgtctgtggcagcttttacattacaacagcagggcnagcatttgcagcagaggctatatggcctgcaagccctaaaatcttcactttctaccccctttaacaaaaaagtttgcccaattccctgctagaagaagagaatgacatacaactaagaacttaaacgagtggatcagggaacacaaattatttacataataaaatttcagagagggggggctggctgaatttaaaaagcatgaattacgtgaggcttgattactgtgaagagataagtcaacttaaagttacttacatttaacatacaatttatatgcactggtttaaaacacgnnnnnnnnnnnnnnaaatgtaacacaagccaactactgatttggtacagatgacaaaagggtgatcagttccaacttcaaaaggaaaactggctatgatgagtccatattgaaaaagtcactgtcatttatgggtggtccaagggatttttttcaagggtaattttacctgcttcattgttcatttaagggtacacactgaactttggaactaacgcttgcatgggtttgtgcctccaaagcagtcaacactgaagtcttggctgggctcagtnnnnnnnnnnnnnnnnnnnnnnnnnnnnnnnnnnnnnnnnnnnnnnnnnnnnnnnnnnnnnnnnnnnnnnnnnnnnnnnnnnnnnnnnnnnnnnnnnnnnnnnnnnnnnnnnnnntatnnnnnnnnnnnnnnnnnnnnntaatctctctgcataagcaacaatgttaccattctgatggtggagcggcggccgctcca

SEQ ID NO: 321772 - DNA, 790 bp, Homo Sapiens
  misc_feature (291)..(291): n is a, c, g, or t
  misc_feature (347)..(397): n is a, c, g, or t
cacctcctggagtcctggacttccccacatctcccctgcccctcccacgtttccatagtccaagggccagagtaaatgaaaatacagcagccgcccaagcaatggggcccatgtctggggcttcagtcatcagcatcttcactggagtctgagttagctggcatcataggatcatcaatgagtgagaagtccctttctgagctatcatagccctgagataagtcatcatcatcttcttcatcctcatcgtcatcctcctcaggttgcagtgggtgggcaccgcaaggtagntacccagaggcggtagtcacttggtgaagagggggtagccaggggctctcaagccnnnnnnnnnnnnnnnnnnnnnnnnnnnnnnnnnnnnnnnnnnnnnnnnnnnaagcatggtgctggagtctacatgaggggatgatggtgcaccacccatcacaaatggcataaaaggcaaagatgcagaagtggcactgctgtgacccaaagatgacacagactgtaggccactactgctgtgttggaacgtgttatgcagagatagagacccagtgcttccaccctgcatgagggccatcatcttagaaaggtctggtcgcatcctacgggcccgcttcttgctgctctctggtgcaataggccctggcaaaacccggttgaacaccgtttcagtgtgatgaccctttttcccatttctagagttagctgtctgtactggttccattcccaaacagttcaattctgccttattattttttttacatctttgccacttcgtttt

SEQ ID NO: 321773 - DNA, 861 bp, Homo Sapiens
ttttctttagcaattgacacattttaatacaaaccagtctacattcattcctaaaaggctcatttccagtaaaaaatatacaccagtagaaacttctcccagaactggggcagaggctgaggagacctgggccagattccccaagactgacaggcagccagcttgagccaggcacaggaagaggctccagggcgaagggggggccctgctccatcttcaggttcaggcgggagactcccccacagagggagggaggggaggcactcggggccacatccagggcaagcaccacccccctgccctccacggcagccttgggagttggacgcgtcggccaaggctgctgctgttgctcctccaaagaaggttggcttcaaggccgtgtccagggacccacgagcagaggcactggggggcaagggatctccaagggggcaagggatccctaaagggggtagctcacaggtgagggggtttagggcccctctagggaagcgcctgaggccatacattcaagagtgtccctggtgaggcccagggaagagccaggacttgccaaggcccaggccgtcagctcctccaccagtgaccccagggctcaggaagacagcggggtctgacacggggagctgggtttccagtgccacgggtgcaggagcaaacctggaaacattcatgatacaaactcccctgttcagaaatgggtctggctttagccccagggacgggggcaactacagccaccacaccagtggctcagaagggagagttcatgcccagcttagtttcaaactgcagcttctgtcgcttctggtagcggactcggacccgaatctcatgtagcttcacgatctcattggt

SEQ ID NO: 321774 - DNA, 1045 bp, Homo Sapiens
  misc_feature (46)..(59): n is a, c, g, or t
  misc_feature (949)..(950): n is a, c, g, or t
  misc_feature (981)..(999): n is a, c, g, or t
ttctctgccaaaggtgtgcacgtgcaactttccatacaggtggtcnnnnnnnnnnnnnntacagaaccacagcagacagtatcttgtacactagaaatcaacataaccggattcccttctcatcgttttaaaaaataatatcccccaaaatctaagaacttagttttggtggtggacaggactttgatccccacccaaatgaaccaaaataacccaggagataattcaaaccaaagtggtagggtagagaggggatcagattttaaaataactgcttttgtgacacaaacatgacgctgggaaagacaggcttgggctaggcagtgtctctgacgatgactatcaccatgtgttcttcttctagcttgcccaatgtccttagtgctgactggaggtactgctgggaaaagtcgcagggtgggaaggcgtagagcatgcctgtgccgtctctgcccttggacccccccactggcaagctgatcacccctgcggcctgcttctgtttcaagtaggagaccaggttcctgagaagccgcctctgcagaccgggctctactgtgggcatcccctcagtgccaagcccactgggggttgcctgggtggctaagaggaccgcatagccgttggggctcccctgcttgatgcgtcgtgtgacctcgtcaagcttgggctggtccagtcgaaggcgctgggcgatcttcagctgggtcagcttgctcccagaagtgtggtctttgaggagactgctgatcaccccctggtccccctctaggatatgcatagacgtggggaagcagctgtttttcaacaccagaagcccattccaacccagctgtagtgtctgagcgtactctgaaagattcttcagctttttggtctcgtgttttggctcttccagaggcttgggctcggcctctgtggtccggtgattgcgctcgctgtctcttgnncatcttcccgtgggaagagtctgcagcctcnnnnnnnnnnnnnnnnnnnccccgttcctcagccccatgtctgctgttgctgagggagttgctgc

SEQ ID NO: 321775 - DNA, 575 bp, Homo Sapiens
  misc_feature (232)..(232): n is a, c, g, or t
cttaatttaaaaaaagttttattaaatcatttagacttgaaagaagtcacaagttaacacacttaagtgtgttctgtacaccaccaacccaaatggattgatttcagaatttttataaataaaacataaacatatttacagtgaaaaataaaaacatgttagcaagtgagatgattaaactgttacctataatcagtttgggggaagtaccaacctacaggattacatatancgacacttaagatttcattaggcttaaaaagtccataggttgaagaagttagttgtaatatatatgatccatttcttactacggcttttttcctcccaaaactagacctttcaaccaatttacataaaaagcttcattttccctttattggaggtaaaagtacaaaaagctgtaaacccaccctagaaccatctaaggaataaagctattgaatgctacaaataggactataaaactacggacataaaccgttatacagtttgtgctacttgtcctccaaaatagtgcagattcctaatttacccgccagggacaaaaatggagtcagctttttctagaaatc

SEQ ID NO: 321776 - DNA, 492 bp, Homo Sapiens
  misc_feature (383)..(383): n is a, c, g, or t
  misc_feature (409)..(409): n is a, c, g, or t
gtgaatatggcggtgagtttcctttaatcaaagacaaccatgacaaatttattaactatcaaaagctacattttactaaaaacaatctgcctttaaaaatgttgaatcatacaatatgtacaatacatgccgctttccgttttggacttcactatccatttgagtccttcagctagcatcaagcacttggcttctgctgcctctgacttggagtaatcacaggctctgaaatctcaaaggtcttcacaatctcctgggcagacaataatgaacatttagggcactggggcttactgcaagtgaaggcagagtcaggaactatgcaggggcaacagggcagagctttacctcccagtcacgggtaactcaaagctataattccnttgatttcctaacttgtgtgttatgnttcaaatccctctttttcttcattaatactaacaggctctgtttaaagacaaatttttcaaatttatcaaaggttattaaacc

SEQ ID NO: 321777 - DNA, 1855 bp, Homo Sapiens
  misc_feature (301)..(491): n is a, c, g, or t
  misc_feature (512)..(572): n is a, c, g, or t
  misc_feature (678)..(717): n is a, c, g, or t
  misc_feature (1278)..(1278): n is a, c, g, or t
gagagccgacggacgcgaccggcgggagaatctactagcccgcccgcacctcgcgccatcgcccacggtgcgcgcgtcgcacgccatacgagatattcgtcgtgccgcgcacgcctctcctctcggcagcctgtaccccgtcaacaccctaggcttcccgtccgcgcgcaccagaggggtgggcgcggcctccgagcgacacacaccatcccgccctccgcctcccgcgcgccccccgcccgactctacccctcaccctcgtggcggccggagatgccctcccggcccacctgcccaccannnnnnnnnnnnnnnnnnnnnnnnnnnnnnnnnnnnnnnnnnnnnnnnnnnnnnnnnnnnnnnnnnnnnnnnnnnnnnnnnnnnnnnnnnnnnnnnnnnnnnnnnnnnnnnnnnnnnnnnnnnnnnnnnnnnnnnnnnnnnnnnnnnnnnnnnnnnnnnnnnnnnnnnnnnnnnnnnnnnnnnnnnnnnnntaccgtcggcggcggaatccnnnnnnnnnnnnnnnnnnnnnnnnnnnnnnnnnnnnnnnnnnnnnnnnnnnnnnnnnnnnntgtttcccctctcccctcaccggggcccggccgcccccccacaccgggaggctcttgcaaaaaccttcctgaggccccaacgccgggccgccacaagatacatttnnnnnnnnnnnnnnnnnnnnnnnnnnnnnnnnnnnnnnnntccgccgacccactcagcgggtccgccgcccgtcccccggtcctcttccccgcgaatatggcggtgagtttcctttaatcaaagacaaccatgacaaatttattaactatcaaaagctacattttactaaaaacaatctgcctttaaaaatgttgaatcatacaatatgtacaatacatgccgctttccgttttggacttcactatccatttgagtccttcagctagcatcaagcacttggcttctgctgcctctgacttggagtaatcacaggctctgaaatctcaaaggtcttcacaatctcctcccagtcacggtaactcaaagctataattccttgatttctaacttgtgtgttatgttcaaatccctcattttcttcattaatactaacaggctctgtttgaaagacaaatttttcaaatttatcaaaggttattaaatcggaacaggtaatctaaacggaaactgatgaataatagcaatgaaacctgtattgaaaagatacttataatattacatactttttaggatttcatgcattatggagctgctgtagtnattattaacagtagcacagtccattccatctgtttcccatttcaaaaaacatgtagtagagtaacacattccagacatttgaaaaatctgcatatctatgtgtcaaccacagagctaagccctagtgagtccaataggacattgagaacattgaaagtagcaagtaagtgcgatggaaatattcactctccacaggagaccttaggaggacatgagtaatggagagtgtgaaattattcaggtaagaatgaaagattcatagaacctcaaagagaaaagaaggtgccggcatctgacaaaacgtgattagaaagagggatactacaaaaatgactgcaatcaccaactttctaaattaagatctgagggaaattatatcatttctttgttaatatttacagcagatgttgaatcaatgatatagatgaatccatcaaaattttagacgctggccatgttttcagtatcttcaggtagttgagcaagatacaatattgtaaaagttaatctacattgaaaattcatttacatttagtaaaatacttaaattctactaacaaatatattttctctaaaa

SEQ ID NO: 321778 - DNA, 507 bp, Homo Sapiens
gtcatgtcgcgcctggatcaccccttctttgttaagctttacttcacatttcaggacgacgagaagctgtatttcggccttagttatgccaaaaatggagaactacttaaatatattcgcaaaatcggttcattcttttatacctgtacccgattttacacggctgagattgtgtctgctttagagtacttgcacggcaagggcatcattcacagggaccttaaaccggaaaacattttgttaaatgaagatatgcacatccagatcacagattttggaacagcaaaagtcttatccccagagagcaaacaagccagggccaactcattcgtgggaacagcgcagtacgtttctccagagctgctcacggagaagtccgcctgtaagagttcagacctttgggctcttggatgcataatataccagcttgtggcaggactcccaccattccgagctggaaacgagtatcttatatttcagaagatcattaagttggaatatgacttt

SEQ ID NO: 321779 - DNA, 1052 bp, Homo Sapiens
  misc_feature (537)..(549): n is a, c, g, or t
  misc_feature (893)..(956): n is a, c, g, or t
ttgactgaaaactactttatttgaagacattttcttctatagttctaaacacaaaaggaatgctgttatagtgggtatttcataggcattcttgtattcaaatgaatcacataatgtttacacttttaagctacacttgaaattgaagacttaatacaaccttttaacaaagaaagtatcagtcatatcaaaacataactattcattctacagattatcactttccctaaaatgactactagatatgaaaacattgcagggacagctcaagtgccccattcttaagggttttttttaataggaaaaatgacaacgtaaatcacattttccttttctttactagtaatgaactatggcaatccatttgagaaagcaccagccaaccgtacaagtcatttcagcaccctttgctcttcaaaactgaccatcttttatatttaatgcttcctgtatgaataaaaatggttatgtcaagtacagacgtcagcaacgtgtcagttggtgtgaatttatgatgtgttcctaagtcaacagagnnnnnnnnnnnnntctctcatgtgaataaaatctaaggatgaaaaactatcctttgataattatcacaaggcaaaatcaaccaccttttcatcagtactagtgtggaatggaaatttctttattaatactttttatgggaatgttttaaaggcataggtataaatgcacatgcaatcagcttgcccctcttagatactaacttccccagcttcactcctccttttcactggaacaagctgctgaatccctaactccaaagtctgcagtgcttggtgagcatttttaaataaagattatatgtgattttcactttttcacaaaaatgaagtacagagaagactgaaaagcagtgagannnnnnnnnnnnnnnnnnnnnnnnnnnnnnnnnnnnnnnnnnnnnnnnnnnnnnnnnnnnnnnnactggttcgtgatgattgatagtaaatcacaaaaacaaaggacagatagggccaagaccgaagggaccaccagaccaccgagccccaatgtgcccc

SEQ ID NO: 321780 - DNA, 489 bp, Homo Sapiens
ttctcaaggagctctcctgcagttttcacttcaataacttggacacgcctgaaagggttgtcccacacgaaaagagagaaaaggataatgaggttcttttgatgctgtagtttttcctgggaagactaggaaggactctgaatttcaaaagaggtgatttctggcatgagcatctcttccatcctccctccctccacaagctacagtgatgcatgtaggcagacacggcacctacagagtacatggtccaagccaataaagctcaacaaaacccaaggcaaagatgggagcttatggcccttaccctttggaaatatccccagattggtttagattgaacctgaatttgaataaagagaagcaaaatgtagggggaagaaggattataaaatattgggattgatattggtatcagtgatttgaagttgatttccaagctattctgttcagtcagaggctttcttagcctttaacgggagaagagaaata

SEQ ID NO: 321781 - DNA, 646 bp, Homo Sapiens
gtgagagccaccgcacccggcctgttttgacattcttaatgatcttaataatttgggcatctgaaagtctgaaacagtgtcagtattgttagtcaaaaagaacaagttcttcaaccacttgcgtagtaccccaaattatattcaagtccctgtgactccaatgcttgggaggaagtcattgatatggatttgattaatgttataactttggaatttccttaactttctcagcggcatagattctaagccacttccatgtgctttcagatggcatcttaatagattggtgttgaggttattttaatgtccataaacaagaaaggtctgggaacaatctgtatgatttttctttcacattttcttatctttgccactggaggttaactgtcgtccagatatgcatatgaattgtgaaatgcaaagaagcaaacatttgggggtaggggagtaagtgctgtagttcttttgttcacttattttaatactatagaagtgtatttcattttataaaaagcaagaatcataaaaaccctctgtattttgatttatgaagaatatagcttctctctgaagtatctcaagatatatcttggggaccacaatgggatcacagtgtaattgtttgctgttggtgtcatgtttggat

SEQ ID NO: 321782 - DNA, 1744 bp, Homo Sapiens
  misc_feature (181)..(188): n is a, c, g, or t
  misc_feature (192)..(193): n is a, c, g, or t
  misc_feature (195)..(197): n is a, c, g, or t
  misc_feature (199)..(202): n is a, c, g, or t
  misc_feature (205)..(206): n is a, c, g, or t
  misc_feature (208)..(208): n is a, c, g, or t
  misc_feature (213)..(217): n is a, c, g, or t
  misc_feature (219)..(219): n is a, c, g, or t
  misc_feature (221)..(311): n is a, c, g, or t
  misc_feature (834)..(895): n is a, c, g, or t
atttgcgggggggaagccccccagccccctttttgttcggggccccggtgtttctcttttggggaaccaacgtatgtggcccactttctccctttcttccttttgggcccccgcgcgccccaaaggaaatggtttttagaaaactttttttgggggccgcaggggggcccccccatttttnnnnnnnntgtnntnnnannnnttnngnggggnnnnngngnnnnnnnnnnnnnnnnnnnnnnnnnnnnnnnnnnnnnnnnnnnnnnnnnnnnnnnnnnnnnnnnnnnnnnnnnnnnnnnnnnnnnnnnnnnttgcactttattccgccacttttattgagcaacagccgtggggacctgattctgcactaagtgctctactgtgagacatcacaggttgtcattgctagaggcaagaatctcttacaaagatgaaagggcagaacccagtgctttttttaatggttgttattccatgcagaaacactgactgatccagaactggtaactaaggcggtgatcaaacaggaatgcttttcttctcagtttaggacgaagacccgccatgacaatggcgggaacgctggagtaaaacctcacggcggccagcatgaagtttttcgccagatttgtggccccacccccaagtacccacgcggagaggcctccagtcatacagcacaaagggcatcgccttgggcagctcaggctcactctgttccacactgtctgcggtgggaggctcgggccggcctgggtgcatccagtgagtaccacgttcccttttcccggcacactgtctccaggacaggcgtgacctgttctccagaacggnnnnnnnnnnnnnnnnnnnnnnnnnnnnnnnnnnnnnnnnnnnnnnnnnnnnnnnnnnnnnnagaaaccactcatccctgaactaatcatgcaaagtcctccagtttaactccctgttgtgggcggggttcttaaaatttatgaaggcaaagactcctaggccggcccatgcagtctgaatacgctaccgaatgctccacctatggcttataatgcagaacgacctgtttctatcactgcaggacgggattgcaagattttcttatcctgccttggctgcagagtcccattcccgtccaactcaaagcactgggacaatgctggatgtgatagatggtccatgagtatccgcaaaactaaataataagtgggcgatggtgccccctgggtgcgggcagccttgtcttactaatttgatagcttcaaggagttagcaaactgtaggttgggtgaagaattcatttgacaaccatagaaacagatgaaaaacaattcccatagagtctccaaacaggcctttgcactgagaatgccgagccacgagaatatacaccttgacacaccttcacactgctgtcgggtttgaatggctcattaccaaaaccttagtggtaccgcctacgtgtcctctaaaaggtttttatcctacatataaactttttacaagagttggagacctaatactgaagacaaatttcctaagaaactcagtgctacttgtggggaatacaaagccagggccttcccccacaaagacccatagaaagtccctgagtgacagatgcgcgcaggcttggggctgggggatgccttggaaagtgctccaggaaaagcatccacacagcagccagcagagcagcagtcccaggccacatcccaggccgaccttccgtgggcccagccattcccta

SEQ ID NO: 321783 - DNA, 777 bp, Homo Sapiens
  misc_feature (658)..(658): n is a, c, g, or t
  misc_feature (739)..(739): n is a, c, g, or t
gttacatctgactttttatgacctggccccaagcctcttgcccccccaaaaatgggtggtgagaggtctgcccaggagggtgttgaccctggaggacactgaagagcactgagctgatctcgctctctcttctctggatctcctcccttctctccatttctccctcaaaggaagccctgccctttcacatccttctcctcgaaagtcaccctggactttggttggattgcagcatcctgcatcctcagaggctcaccaaggcattctgtattcaacagagtatcagtcagcctgctctaacaagagaccaaatacagtgacttcaacatgatagaattttatttttctctcccacgctagtctggctgttacgatggtttatgatgttggggctcaggatccttctatcttccttttctctatccctaaaatgatgcctttgattgtgaggctcaccatggccccgctttgtccacatgccctccagccagaagaaggaagagtggaggtagaagcacacccatgcccatggtggacgcaactcagaagctgcacaggacttttccactcacttcccattggctggagtattgtcacatggctactgcaagctacaagggagactgggaaatgtagtttttattttgagtccagaggnatttggaattggacttccaaaggactcccaactgtgagctcatcccctgagacttttgacattgttggggaatgcaccagnaaggccatgttttgtctcagtgccaactacttgaaggg

SEQ ID NO: 321784 - DNA, 658 bp, Homo Sapiens
  misc_feature (469)..(469): n is a, c, g, or t
tggtttccaaagtttattaaaaatcaaagaatagaaaaactttacataaaaatatgtcaattttagcttccatattgttgtccacacacaaaaaaatcgaaacatgatatctttttgtcaaacctgtagcacgcgaccacagtggtagccaggccaattcatttgcttcaccatgacggaaatggaacatggtacctgtgtctatgaatcgagttttaaaatgcacaccccacgggacacgcactgccagacccgtagtggtttccttaatgtgggtttacagtcaatattgctaatgcgtagagattagtacaggcctacagatcagtttttataaatattctttatcaataggttcacaatttaaatattttaaatatttttgataactttcggtcatcgagaactgcagacacagtgtgctactctattctggaatgcctcctagagaacctgcagtcgcagctgnacagctcccaattgacagagtgagccagtcctgctttcaacaagggcagaccgcagacattttaaagcttgtccttgctgggcgtcgatcacattcagagatcaatctagaactccccactgctgcacatgcatcagatgtcatggtaataagtatcttgtcttgacattctccactagtggacttcaa

SEQ ID NO: 321785 - DNA, 402 bp, Homo Sapiens
  misc_feature (17)..(17): n is a, c, g, or t
  misc_feature (61)..(61): n is a, c, g, or t
ggccccccttccccttncctcaggtagaattcagccacttctgcccattctgggacatttncccggccttggactcgaggagcaagagcaaatctgcaagccagcagaggaacccagctcattctgagtaaaaattaacctgtcaaatcaattacagcggcagaaccaattagggtgaccgcaggggaataaatatgcagtgtttaacttaatcatctttctgttcgaacagcactccggcagggctgcatgactaaggcaaatgactattacataactggtatttttattccttgccccttctctttagaaagagaagccagtaaatttcattttcctttaaagtggaaaaaaagacaaaggaaaagaaagaagattgtttctgaacttgcacaaatgatc

SEQ ID NO: 321786 - DNA, 880 bp, Homo Sapiens
cacacgtacattaggtcctgggtggaggaagaagtggtggagcctcagggccagggcaggcaggagcaggcactgatgctagagggtgatgaccctgccctctgccacccaggctgcgtccaacagcctgtgactcttccctggagaccccttctctcacacttttatctactggcatcacccaccccacatggcatataccacccatctctggtctggggctgagggcaaggactgcactagtccagggagtaggggacccttgaacaccaagagcaaccttgagaggtgccaacaatggtgtgctgggggtggggttactttagaaaaagtggacacagaccagactaaggaagaagtctgaggcagacggtgagggtggcccaggagccatggcctcacacagacccgaggcagagaacagctcattgggtcactggtgatcatccagctgctgtaggagtgtccgccgccgcctctccagctcaccctcactcagctcactttctgacgtgtcccagcctgtctgttggagcaaaggcacagttcacccttagcctgcactaagggccgtggaagcttgaccagcgtgctgactggcctagggcccctgcccctcaccttctccatcttgattccaaagcctggggaacggttagggagctctgcctgttggagctccctgtccttgtcctgttcttgttctttctcatcgctctccttgccagctttctcctcagggtctatctcactctcaggactattctgtaagagtccagagcccacctcctcagttcctgtggatagcctgggaggcaggtagaacagaactcacaaaatagcaggggcttaggtagaagttccttcactcaccgacttg

SEQ ID NO: 321787 - DNA, 770 bp, Homo Sapiens
ttttccatccaaggtgggataacttcataaacgagtgagttttctctctttagcccattcttggacatctgcttctccaaataaaaggtagaagagtagtcctaacaggttaacggcaaacaacaagaagaagacattcctccacccaaactcagggtcctgactaagaagaaatccgctgacagtgggtacaatgacaggtgctatgctcgaaaatcctcttgatgctcccatgagaaaactggaataccttgtgagcaatatctacgacattgatataaatccctgactgacactatgtgcttaatccgcaagagagcgtcagcaaggcagttgctgtgatatagccggaattgaggtaaggcagagacacaatgagtgctgaagaggggagacttcctaaaattgtggcaattttcctcacagtgatgagtctaaactttttggttagaaggaaatctgccagatagcctcccaccatgcctatgacccaggcaacaataaaaggaagggcagatagaagtccattgtctctgatgttaacatggtacacagagctgatgtaagttggtatgtatacaaccattgtgctaactaaccattgatggctgaaacagcctaaacatatggaccaaatgggtagagatctgagcatagctttgatgggaagaggctgcttagaagacccgacctgttgtttcaaggaggatatgatgtattctttttctgaggtgcttatccatggataggaaacggggtcatcataaatc

SEQ ID NO: 321788 - DNA, 639 bp, Homo Sapiens
ttttttaagcacctattcaataagcatacagggaagatgggggccacgagtgagaatcaatgacatgaaaaggaaagacggatgcccattaagacataaaggaagccagtgtgctgagcgggatgctgaagaaaaatgaactgtgcgctgcaaaaagtcatcagaattgcaacatgtaggcaagaggaaggattaggagagaaaagattatgagaagccacaagactgcaacaagtacaagcaccccatccccatatttctaataactgggccccaactctccaatgcaattctatttctgggaaaacaaatgtgtcagacagaattcaggggccacccgatgccttacacattctttcatgatgactaagctgtccatcccaggccatctctgtcgcctgcactctagtaatccacacttccccaaagagagggccaaacactgccagaaagccgccaattttctaagggaggaccacctattagatggcaactgagtgaatgtaagtcactgattggctcagaccctccccaaggtctaagtctatcctcagcctttccctctgaagtcctagagaccacccatcaatgaagcaggtatcccgaaataggaagagcaagattgttcacccaattctc

SEQ ID NO: 321789 - DNA, 594 bp, Homo Sapiens
  misc_feature (102)..(111): n is a, c, g, or t
gagtttgatgacattcttttgataatcttgagttggtttttttaacgtaagactagcctcactcactgtgagctggtaagattccacagaggagtcatctannnnnnnnnncctcagtagcataataataattttagctagcttgccatctggggacccttcctaagtggtagataagaaacttaaaataggattgtactttaccatcatatttccccacccagcactgttactggcataaatatgtgagcaagtgactggtgagagagtgatgcctttggcagggtatctgatggtgagatcgactgagaactgagtggaagagaaggcgaagtatcagattgccaaaagggcttttattcttagctcagcccttcacgtatcctgcaaagagctgctcagcaaaaggtgcttattgaattacacctcataacaggcagaatttgaatgctgttcatcacaggagctatggagtgcatagttttatagagagtatctccccgcaggcaagatacatagaacaggtgcagaattacagcatatactcatttcgcctcttgttaaataaaagcaaagacagtctcatgcgatcct

SEQ ID NO: 321790 - DNA, 812 bp, Homo Sapiens
  misc_feature (85)..(85): n is a, c, g, or t
  misc_feature (625)..(684): n is a, c, g, or t
  misc_feature (745)..(746): n is a, c, g, or t
gtactaacttttaaaagtccattctgtcatgatatgagcctgttgactgaaccgtgaggaacaaggatgaaaaataagaataganagagtatggttcagcctgagtctaagtggtctggtgttttatgatgactctaccaaatgtttaatttaaagtcttaatttcttatttttaattataatgttgccaactgtctgactgaccttgaaggatcagggatttttccacgactctaactgaacacaagatccttctcagacggggagaatgaagtgacaacagtgtgtcgatctgcgcaagttgtgcagctactgaaggagaagcaggaacacaacagggaatgcagacgcctaccaggaaatcgatgtgaactgctctcaattatgcagcaaatactaagaagaaaggacaatgctgaattcaaattcagttaaaggcagtcctcaggctctttcaagctagccctagatggcaagtgtgtcctgagacaggtttctctactgggtttcagcacggggctttaccatccttcagatcttttctaaagacaaaaatgacaaagtctatagatggaagagggggtaatgaagcagggaaggggaaaaagatgctgatttgtttacnnnnnnnnnnnnnnnnnnnnnnnnnnnnnnnnnnnnnnnnnnnnnnnnnnnnnnnnnnnntggttattgaaaaaaatagaacagtccactgtccagcagaggctgcttcaactctattgcnngcagggctcattctgcatggatctgtgtttcaggatgctgcaaggacaactctgcgggcaggaagc

SEQ ID NO: 321791 - DNA, 684 bp, Homo Sapiens
  misc_feature (124)..(162): n is a, c, g, or t
ccttaaagaattcactggtcaaggacaccttcccccaaaaggaaagcaccaaaggaccctttttaaggggaatgtttccccccaaacatttgaaaagggttcaaactaaaacagcttaaggttnnnnnnnnnnnnnnnnnnnnnnnnnnnnnnnnnnnnnnnccctgaacccacccagccataaccactttccttaatcgatcataggagtttcttttcattttataaaaagattaataaaaaatattgaaaaaattttctcatatttgtaaagataatagaattccataagtttccttagaaaacagacccagacactgccctccagtttccaccccgttgctgggaggatcagcaggactagaaagtttgggatactggagctgctggtggagaacggggaagtccagcccagaagaaatcaggaaatagggctcaggggcacgtgaggtgtggtaaggagcaactccacgtgatacatggctgcgcagaaaaggggaacacaaggtggtcggaaaggccttaaactcctccttgacatacaaaaccggtttttacaaagatccaagcagtttggtcccaaactgaggtgaacacttcaaagtttattcacatgcttttgttttctctttcaagaatcaaagtttcccaaattaaatgtttctaatattactacatatgcct

SEQ ID NO: 321792 - DNA, 1103 bp, Homo Sapiens
  misc_feature (151)..(152): n is a, c, g, or t
  misc_feature (451)..(479): n is a, c, g, or t
  misc_feature (903)..(939): n is a, c, g, or t
ggtataaagaatgcacgggtaaggaaggcgcgcgcggggtgaagggtggggctttccaattttgaaatgttctaggggatacttgcgcgggggcggttttcttttgatgggggcggccttacacatttcgctcgccgctcggagagggggnngggtttttactcattagaagaaaaaagaagcagcggcggcggtatgtattgttcgctccgacctttgcgggtggcggggaaagagaacgacggctggtggtgcggccgggggatcgttcagaaatatattttggggaggcgaactgcggggacccacaccggagaaaaactgttgttaatatagagggagggtgtgctttagcgggggagaggaagtacagggccagaaagaggtgggttatattttggggggaatagtaaacgggataagtagaatgtgtgcgggtgtggcgatggcnnnnnnnnnnnnnnnnnnnnnnnnnnnnnatattataggatatgagcgttgctcttttttggcgtggtgtgcgggcatggttatatcttgggggctcttgtgggtttcggtgggtgggtttttttacatctgccacttcatttattttatttgcaggaggagttgaaacaaattttaagggagattttcattttccccctaaacatgaatcattcaagtaaaaccaacttaactatagaaatgtagcaaagtaaggggaaagcagcacaacaacccaagaggcaaaggctgggggggagaggtgggtgcagtccgcatataacatatgcataaatgccttatgattcacctgctcaggaccgcctccccagaaggcaagcacaaggacccattttaagaggatgtttccccccaaacatctgagaatgcttcaacttaaacagcttaaggttnnnnnnnnnnnnnnnnnnnnnnnnnnnnnnnnnnnnncccctgaaccacccagccataaccaccttccttaatcgatcataggagtttcttttcattttataaaaagattaataaaaaatattgaaaaaattttctcatatttgtaaagataatagaattcataagtttcttagaaaacagaccagacactgccctccagt

SEQ ID NO: 321793 - DNA, 567 bp, Homo Sapiens
ttataaaaaaataagcaacttttttttccatttatttgaaataatatacaagaatatagtgtgcaaaatttaggggcaacatcatgaagaagtgtgatgaactgaaatcaattttacagctgtgattcctaaccagaaacaccacttggtaagtaacatgaaaagccatgattgtagctcagagcaaaagcagctgtattgccaatgtatttgctctaattttagacagttggaggaaaattaaagtgcaagtgttgcactgcagtaagtgcaaagtctgcccccaccataaagattatgatgacaaaatatatttaagatacatggctgaggagatacagaacacgaagttaaaaaatacaatggtgttgactgtttgttaatagcaccattacagtgactatatcccaatgctattaactaactttaccttggcctgggctaggtctccattggaaataataacggatggcggctgcacctggtgcatcaactcagcatgccatggtaactgcagcaggtggctcttaggctgggaccccacaccagccacctgccccatgttcc

SEQ ID NO: 321794 - DNA, 592 bp, Homo Sapiens
ctgatatgaaatttaatgtcttaggctgaaaaacactaaatttccatttttttgtaggtcagaagtggttgcaaactggatttttagactcttcctgttgggggtctcggacatttgctcttttccacagcggccaattcttcagagccacaaagaactgggcgacgcaggccagaggtgtgggagtccagcccttggttcgaatcccgctctccactgtccatggggttctcagcaagccctctggcctctccaagcacacgcagggttcctcaagcaattccaaactccagagaagacatcccaggtaaaatcggatggcagggacctgggacaccgctgtgacgggcagcccctgggctcgagtccacaactcccacgggagggcagggccccatcctgctcacaccggggtccccagccctcgatcctcacgagtcctcgtccaagaacaaactgtgcacacacgggcggtcagtcctggattcaaggtggcccatcggagctcgaactcaacggcctgacctagggacgcctccagtcccacccctacctttggaggtggagaatcaccgtgcaggtcactgaccca

SEQ ID NO: 321795 - DNA, 1565 bp, Homo Sapiens
  misc_feature (1432)..(1432): n is a, c, g, or t
  misc_feature (1487)..(1489): n is a, c, g, or t
  misc_feature (1491)..(1496): n is a, c, g, or t
  misc_feature (1498)..(1500): n is a, c, g, or t
  misc_feature (1502)..(1506): n is a, c, g, or t
  misc_feature (1508)..(1517): n is a, c, g, or t
gtagactgctttttgcctatgaccagtttgaacaagaattcacccaactttcaagatgccttttcaaaaggatcttgtagtcagttggtatgtacagacaattggcatggaagtggtaggatataaatcggatgactcctggctgctgaggtgccagctggatcagctggtgcacttcttgtttcttgtaagaggtttctttaaaatgactagtttgatgtatctggtaacatataggcctgactatacattttacattatttcgctattttgtaaactgggattttagaaagcacgtttgccattttgttaaagtacattgccccttaaattttggagtagtttttaaaagtttaaaatggtaatagaggagccagaaactttttaagcattgtaaaatgttttgaattgatattgactttgtttggaagagagtagaggcagggggctttaaagaaacaaagaaatgcattgtaaaaatgtagttttagagcaaattaataatgatggtggggaaagtgttgctaatttgtttatttccctggaagaaatgggaagtgtgataagcagtttaatttttaaggagctggtctcaattttagtactttttaattatgcaaataaatcaatgtttccttaaattttgtcattgctttgtcacagttgtctagggttcatatccaaccttctgtggcaattcaattttatatagtcttttaagaggtaattgtaatgtatttctgacagtataaacaaaaagaatataaggcatagaagaattgtcctctaaaaatatcaatgatgtatcctggaatgtgaagatgtccctttatagttaaaaattgaattattttaatattgtaccattgttagaccttgaatgagtccatgttaccgtgtgtgtctgtatatctatctgtagagaaagaaaaatgacaactgaaatgttacttttaaaaatcagaataaattgggcactgtctgtgttgcaccactactgtatcttttcgaaagaattaacagtatttgcctattgtaaaggttaattctgatgacgttttcacattcaccagactttttttcctgtattatttgcatccccaaatatttaatacaagtagattctgcatggcttgggcattcagagattaatagaatgatgactcaattttaattctaaagccatgaaaagttactttgagactgaacaattctgaattatttatgatacccaatgtccatgtttctttccctactgtaaaagaattgatcagtttcttcattaaagcagcaaaaacttattaaatcttgtaaataccatgtctctttttagatttctgtgtatgctgtgaatgaaatcattttgagatgaaattgtacaaaggcattttaaaaggctctgcatgcatcgtaccctcaaacagtacatatntcgggaaagtcaaagattccctgggcaaataaataacctaaaaggcaaacacttnnnannnnnnannnannnnnannnnnnnnnnccttgtcgggccggcctcgggcccctgcaagaaagcttttcctagaac

SEQ ID NO: 321796 - DNA, 1203 bp, Homo Sapiens
tagcaacttctaccagcaaataaagtattctcagtaaaacgaaaatgattctcaagttatcagtttgctgtttttaccacttatttcatgccctgccaaattcaagttacacagacttccattttcttaagataatcaatcatgaagaaatcctttatcaatcattcaaaagtaattttaagtgtaacataactgtgtttacttcccatgcacttaatacccttatgcgctaattttgtgaattaagtttactgattatagaagtatgtgctgcatagaagtctgtgcttagagggtgaagttcctaagcttaccttgaattacagctacatttcagtgttaaatgtgcatattaagaataattcttttggggaaagaaattatgaatcttcaggacagtctacaatggtttagagttacattctgcctagacttttatgacttgctgctattgttttaaaaaccccacttagtctcttcctttctgatttctaaagtaagcctcagaatttccaaaccaattcatccacagctgtttctgggctggtttttaaagtagctgcaacagaatcatgaggctttccctttttatcaaatacgaaaaacattttttaaaattctgcacacccagtgatcatcttttgtgcgggaaagcaagatgatgatggatgattttattcatccttttagtaaagacacaaaacatttttctcaacatttgtacagttctgaaaaaaacctggtcaccaaaaatatcttctctgctaattcagcaattcttgggctccagttaggggagctggggcctcactttctcccagaattgtgggcttcactggaagtgaaggtgcaggaatgactggactgtccaccccagccctgcctgcctgtggttttggccagggagcaagccatgaggtgccctggcacatgcacaaattgatcctttgcgtgacagtcttgtatggaaaacagatgctgacagaattgtagactaccatgccacacaaaaaggctaaatatctactccaatgggtttccagttcagtttgaagtcaatcaaatttttgtatttttcggtgtctccttgattggttttgctagtaattctgtaaattgtacatttgcaatatgaggttttttttccttttgtacaatttgaaactgatgcttcacctttcctttaataaactattcaaaatc

SEQ ID NO: 321797 - DNA, 610 bp, Homo Sapiens
  misc_feature (540)..(552): n is a, c, g, or t
caagcaggtagtcgcgggaaaggacccacactccttagccccgcagtgagagaggaacatttgcacgggcttcctgttgctacctggactgaaatgaacaatccacccctctagtgatcctggagacttgcaccgtatggtctttcctgctagacgcacagcgggaggcctcctacattagattcattttccctccacccgtagcacaaacttgtaagatggtggtggagtatgtttcctgaggctttgttcgggttttagatctcagtttggaaggtaaatattatttcccttctgagacagtcctgcagccttgaaaagacaagaataaaaatctaaaggcaacaaattctataacatgctttccatacaccataaattcccttatgggtcaaaatatccgcacactttcccctcacgttatgaaaagcttgtaactgttgattttcttttgtctggacactagcagacactggatatagtttttcattaggttagcagtctcgggaccatcactaacaaaacactacaacaaagaannnnnnnnnnnnnaacagattagtaataaagaaggacggcagtgtctagcaatcagccttacctgtgcctc

SEQ ID NO: 321798 - DNA, 620 bp, Homo Sapiens
ggggaagaataaactttattggcccacagaagggatgagggaacgagaaggggctagggataagaatgaataaaagtggaaaaactaaaacagaatgatttaaaatgtgcaaatacactttgcaacctccaccattcaatttagggattgatatgtatgtacagtgagatccatgtaggctaaagtgagtttcactttgtagttgatgctacttgtaccagttctatcattagtaagtcaccgtttaattctgccaaaatcagacaaggatctttctggttagtgcaaacaaggttttccatcctgggctgcagtctgacccgccagtgctcagtaggcatgcttgtgatgaattcgcacactttccagttccccacctccaatggcggccagggtctccagcctgtttaagcgctccaagcttcttccaagaacttcttctagccgactgcgtaacacctgagccccttccagttccacctgcagagttcggtctctctcagagctctctggatgggcatggaacttcaccagactgctatagagctgtctctctgcttgtaaggcctcattgagccgactccgttcatctactagtccttctagcatcagcagcaact

SEQ ID NO: 321799 - DNA, 636 bp, Homo Sapiens
  misc_feature (44)..(52): n is a, c, g, or t
  misc_feature (106)..(106): n is a, c, g, or t
caaagattttacacaatagtgacagtaagataaaatatgtagtnnnnnnnnnttcaggaaaatggtgcttatatgataaatattctcctacttacagcagtcaagnaagtcatataaatttagttaatattttaccacagtggattacttaactttctgtgctgaatgcaaaaagtcaagcattgcccatgtaagtctctaagtctaaatggaacagagatagtgtcgacagacagaaattagtttctccaaatgtcataattaactacaataccatcccttgcacaagaatagttggttctctttaatcaattctgacatatacagctaacaagtactttcaacccctttatgacagtatcacccacgagtaacagtaattcccaagtcggcttctcggtcaggtagctacctgtgactactgaagcgggcaaagccaatttaaaaaactataaaattaataagtgctctttgcagaaaaagaaaagtaatatacccatgtgttaaataaaaagcaaaagcacatccaaaccctctccattaaacgaatcgaggagcaccactccatcgcaaatgttctatgtgaacagtggccccaaaattatgcaaagtagagaccctgtacccatcaacccc

SEQ ID NO: 321800 - DNA, 504 bp, Homo Sapiens
ttttccagtttagaagcataagagccccttgtcaggcaaaatcttacagggctctcaatctacaaagcaggtaaaagaactgctaatccttttcatcccaattttcttaagagctgcctgccctacagctcctagaatctctgctttaaaacaaagaaaacaactagaaaactgggacttcagcttgtctacacaacaaaacacatcatattgttctatttcagaaaaacttcaaagtcatcctggtgaactacaatatgtgctagggtcaagctgtctctgtactacatgacaacttagttcagtgaccactccatgcttcaactagtcttcaaaatgggaaataattctactaaactttcagggttactgtgagggttcaattaaataacatatatgtatgggcagagctaatgaccaatgagtaggaagcattcttgctcaggcatgaaataaagtatctgacaaaattatatagcctcccataagaatgaacagaacttg

SEQ ID NO: 321801 - DNA, 1305 bp, Homo Sapiens
aggtcaaaataaaaatatatgtatcttgtgacttcataaaacatcctttactatatttttaaagaaagcagaagtaacagcaatatatgtaaaagtaatgatttaatgactataagcaagacaaagcaatagaattgtgcttcttttgcagactggggacaatgaaatgtttagctacaattttcccatacaaacatgaaacaatattcatatagaataaacaccctcacaaataactgatgggtgatgaacacacaccaagttcgaccaaagcaaaaaataaactgaaaattgttgggtggggttattcatattttaaattcaacatgcttgctctatttaaaaatacctgtagaagctcataataaatagcttctattttcagacatagcagagaaggcatattccattgttaactgtaaaagcaactcttaaatttaaaattactgctataccacctattaaaataactttagataaaatgccttcttttagcaacctgctggtttatttaaaaaaattgttttagaattatagtgatcaatatgcatttttaaaatacaatattaattccatcatagccaatggaaaattaagacggtttccatatttctcagttaaaggtttttcttcactgcaacaatttttaaagtaaacatgtattactggagaaaagtatataaagtatagaaagatgtgccaattgcttctaatggaacagactttagaattagatatccacattaaaaatattctttgctggtaagcaaggctcaacataggttatgggtatctgcaaaggtcgaaccagttgggagaattttaacaatcatttctgaatgcatgaaacacaatatttctttatagcatttataaatatatcatacaatactgtttcctgttatgtcatataccaatatggcattgtacaacaagcataatgccatctgattcttacaaaagcgaatcatttaaacaagtcagtaaaataaacggtagtacccgcttttaggcatacagattgtaaaactgaagttcacttttctttgatcggttttgcgtagcaacagagaagtataaatcaacaggaatcaaatggctaaatatgcaagaaatcgttattcacagtgacatggctacatagaatgcattattctatgcatattctttccgttggttgaatttcaagataaaaagcacttgttttctacaggttcaccaaacagcgtaataacaagaacgatcaaggagaatgtaatcggacgcgtgggtcgacgatatcccgggaattccggacctgtaccc

SEQ ID NO: 321802 - DNA, 635 bp, Homo Sapiens
  misc_feature (16)..(16): n is a, c, g, or t
  misc_feature (96)..(96): n is a, c, g, or t
aatggaagaaaccacngatcacagggcccccactgtgccgcctgaagacccaggagctgctgggtgcattgcaacgttctccctgagcaaatcggncatggtcaccacagtccagtcctcagtcaccgacagctctgcccctcggggtcagatcccaccatcggtgctcatcaagccagcaggcgaggaagcaacagtaactcaagtggccctccaagggagcagtggtgaccgtcacagaggtgacactcgtgagcaagctgggccgtgggtgtggtaagggattcctctccgcctctgtgctccccacttgggcaagaggagggtgcatgcgcaggctgggggccaatcctgcagggggaaggggcagtcctcattttccttggagagaagaggtgggcagaggacctcgagctatgcgagagcatcctccagaagccctgaaacctccagctgggtacttccattcattttgctttccctctctcaaaaagagaatccctggcaaccagtgctaaacatggcctatcagtgggaccctcctagtgattcactagcgccatttggggaacaaaatagcatttcactctctcaataaaaaaatcatctggctgaagatggtggctcatgcctgt

SEQ ID NO: 321803 - DNA, 773 bp, Homo Sapiens
tgaaaataccaaatcagttatttgaatatgcctaggattctaaaaccacagaaaataggcacattaatttccttagcctattactccctatggccagttggtacctcccaggtatcttcttattcttgcctgaccagcttaaccagttccatcatctgttcacatttgttcctcttcttagagcaacagagttaggtatacaagtaattaaataaagactaagcactaatgccctaatcccagctaattttaacaaggacactcaggaggataaagaatcaagaagagaaatattttttaaaaaagaatagaagtattatataacttttgttcttctaaacatcaaaatccagtcagaatggttatagaaaacattcaggaacagtgtctaagcaggaatagtagcaatttagtgagctgactaccagtgttctttttcataataattcccttaaacaactttgcattaaggggagatgctgcaaaagcaaaatgatctttttacttagagtaggtaagtcctattggaatttaagagaagaggatgagaaatggacagggaggaccacatagggcataggaaagacagtagagaaggaaattcattccaaatagaggtaagaagatagcagtaatgtgacacatgattttataaaccattccttaatttaagatcttggcagtcttgagaattccattgaagggaatattgtcttctaaaacctacgtcacagccaaaaagccctgcatgttaaacttaccttcagaatgac

SEQ ID NO: 321804 - DNA, 562 bp, Homo Sapiens
caggagagacgggccaccgcaggatcagtccctgagttacacccaagtgctcagcgctgttctcggctttacatttctaccttgatgggagttctcctttctgggcgttcttatagaacaaagtagaaccctgagttttgagtctggcgtacgtaacttccgatggcctttgctcgctggcgtgtgaagtttttctcagactgcctcttcccacatagcccagggttaagcttatgcctttaagctttaggctcttcaaaggagatttgaatttgggggaaaagtgttgcagaagtcctattgctccggattgaggattgttatgggttcctgtgtgtttttggcaagagggtgatcgaggctctgcccatttaggaggggcttgacgttgacacaagagttgaaaagaaaaaaggcccaccgacacctctctacctagccatttattccacagcagaaattggttcctacccatatggaatacgttgaaaccagacagacagggagaaagggaggggagaattcacagtggccattgaaaggtgtcactggaagtgattct

SEQ ID NO: 321805 - DNA, 763 bp, Homo Sapiens
  misc_feature (27)..(27): n is a, c, g, or t
  misc_feature (45)..(45): n is a, c, g, or t
  misc_feature (106)..(106): n is a, c, g, or t
  misc_feature (109)..(200): n is a, c, g, or t
gaaacccctgtgaaaaacttggacaantgaagctcaatggagctncccggttggtaaacacataaccgtaaccagaagggtgaatgtaccccagatcccacaaagnacnnnnnnnnnnnnnnnnnnnnnnnnnnnnnnnnnnnnnnnnnnnnnnnnnnnnnnnnnnnnnnnnnnnnnnnnnnnnnnnnnnnnnnnnnnnnaaactgtaatggcaagtactgtgctcctgtgaattctgtgagtcattctagtgaattatcaaactgaagggatgatggtaacccctgaatttgtacctatttggtccaaagtatgagtggcctggggtcacccaaaaagcagttggcgtatgaagtaagggcatctttttgaggactatgccctggaacttgtgtggtctgtgctgactctgggtggttagcccgggaattatactgcagtatgttaccagttggtgtcaggatagcattacaggtcattgtcactgcataagatgggatggacctggggagaaatttttatccacagccaggtcctaatgagaagggagtgttttagttccactgccactctctcctaaacaatgagcaaatccatgtaaatattacatgataaaatggacttacctgctaaaatctcttaccattttcttttgggttattttcccccatgcggaattttcactaaaatataactagctccactaacagtttcaaataaatcagtctgttactactagttggcaaacacgaatttatttttg

SEQ ID NO: 321806 - DNA, 635 bp, Homo Sapiens
  misc_feature (386)..(386): n is a, c, g, or t
aatttgttattgtgtagaaaattggaggttttctactctaggatagcttgtcctactataggatagtataggttcataattaaggattgttattggtgagagtcctaacaatgtactgaagtctgtcaattttagtatcttttctgttgcgtggaattcttattgttttcattaaacaaactatatgttcattgcacagtagttaagtgtataaaacaaagcaaaaggaacacagctctggctataattttaccactcaggtaccattcttacctttttcattgtttatctttttatatttattttcatcgctacacaaacattttttaggagtttgattctacctccattttggttagatatacaaactctaccccatgagggantgtatggtgtatttctagatttagcaacaattttcttgaaaaatgtacaatactatagaaaaatgaagatagtaaataccaggtataagttaataacagtgtttcttttgttcagtaataatgaactgtgtactagcactgaactttaggccctcctatttgcgtattttctgtttgtatatttttaaatagaggaattgtgattataatattattattttggaatatcctaaatcataaattcaaaac

SEQ ID NO: 321807 - DNA, 948 bp, Homo Sapiens
ttttttactccattgaacgtttaataaattatattcaagtatgactttctttaaaaaagagacaaaattataatgcaagtatttattaaaatgctgacaatttaaacatcctctgaattatatgaaatacttatttacttttgtgaaatgcgttagtgaaaatctaggagtttctatgtaaggctgagcattttcaacattcctggcctagatgagaaaagaatgcattctcttactggtactcaggaaatatttatacaatacacttgggttctacttgctggtgtgtggagactaggctagcacccatgactggctgggctctagaaaacaagcatgcagtgctcctgtgccatctgggacccaagagacaaaagtctgatctagggtgaagctacatgcagagggtgaagaggactataccaacagcctcacttgtctggaggagcaaaaggaaagccgtgcacagatattgctttgaccttaaaatatttgttaagtgaggcaagaaagaagccaggagtcttctcacaaccgttccaggtcagcaatttctaagatatttctatcaaggtaattggtagaaaatataaatgcgtgctggccctgactcaagaattaaaccatcgtaacatatacatacacaatttggaggacaggcagttatcaaacagtctataaactcaagtggggcatcagctcaattaatacctgtctatctggcttcagctggtaaggaatcataaagatgttcaaattttgatttttggtgaatgtatttcacaaagctaccatttcataaggacaataaggttcactatatcacaatacacgacaaaatttacaaatgagatgacagctattttaaatacattttgtaaaggcattttccactaactataaaatccagtgagacaaaaagataattacactatagttaccatcaag

SEQ ID NO: 321808 - DNA, 777 bp, Homo Sapiens
  misc_feature (597)..(678): n is a, c, g, or t
ttctgagcgtgccagcccatccatctgcaccagtaactctgtcttcatccgcaggcttccttcatgttctcccctacagagagacaagacgtgattctcctaagtgtcagagccttcgccctcatgacaagagcagcattcacagcaatgtccctgtgactgtagaacagtttctgttctgatggccaatggagccgttcatactagagttagagaaaatgagcaatttgctgttattttcacatacagtatgatagaaagcaagtaaatgaatataatgatggtatttgaaagaaaaccaaaggcaggcagtgagctggagaaaataactaaagggtccacagtcccactggtagattaaatgcagcccaactgtgtctacctgcagcattatttacctctttaaaaatgacataattgaggataatccctttcacttacatagcacacaggaaagtactttcacaccctcagcctcctgagtagctgggacctcaggcacaagccccctgcctggctaggtatatgtttttttaggatctatgccccttaatactcaactacctttgcctaagagagaagaccgtctctctctcnnnnnnnnnnnnnnnnnnnnnnnnnnnnnnnnnnnnnnnnnnnnnnnnnnnnnnnnnnnnnnnnnnnnnnnnnnnnnnnnnnttgctatatgtttaattatcatttgcccataactataattcctttaacataatattatcgaagtcttcagagcacccatccctatttcctgaccctttg

SEQ ID NO: 321809 - DNA, 977 bp, Homo Sapiens
aactggtccccatccagtttcgccatggtactagggtggctcggtccaagatcatgattaacccgctgaaatataccgacggaaaagattcttttgttcactctgagcagattccacttttttcctgaagtcgttctatttgtccctcaagacccccgtttttcctgtccactggttctgtcgtcaatcatcatttcgccgtttgtgtttgcctagcaagtttctctttagcttcttccagctctttctggatcttcagggacatgtttgttcatcttacgaattgtagagtgcaaaatttcccaaacaaacaatctggtaaagtcacgagatagttctgaagagaagatccaatttgttacggcagcacaatcaactatttgtgtacgaatcatcttatccactagtacagcaatcatctgtggatggttcctccagacctcaaacataactcttagcacatgtaactttccttcatcactttcagctagggttttgaagacttcatgaaactttgcaagagcactgaaggagtggctgaatgatttggctgccaagtgtagcagagtctgtacaaagacttctattttcaatgggttaaaactgaatccttcatcgtcgtcatcatcctggttaggatttggtacatctttcagaatgctgaagatttcatcattggttgccttacttttaaaggcaacagctaaacagagggcaacagaatgtccaggaagagaattgctactttcatctccatacttgtaaatgcaggttgggtttgcaggacacagagctgagaaggtaggaggaacaatatctaatatacgctgatggtaagacaacctcatacatttttctagaacttctcttacaaacttcggtttgggactttcaggatcttgactaagacaatctgaccaatcttcccagctccaacggaactggaagttacttagatgatgagcctcgtgccgaat

SEQ ID NO: 321810 - DNA, 602 bp, Homo Sapiens
actaatagcaaaacattatattatcttcccttatgtgtttgaaactgatcaaatttggagtagactgacttgttattttgaggcatatgagcatattttattcaggctactaagtataaatcacccatgcctataaagttaaacctaatgcaaattctacttagagtcatattttttatttcctatttcttggagtaattggaagtgctctgtatgctttgagagcaataaaacgacattaaatactcttcacctcagactttgtataaactggacaggctctctaaccatttagttggaattaagaacatttcgttgtagagctgagagtgaagtgcagagttcacaaatgtttagaatgtctagaagagacagcacctgactctcagaccagaccactgcattctccttgggcatcctctgtggttacttggcagtcccccttgcacagagccatccagggcccatgccatggcctttggatcaacaggggggcttcagtgctttgctgaaagggccctggaactcacttgcagcccaggaacagccagtgcatccagaaccagctgaccaccagcatgatgagggatatggggaagctg

SEQ ID NO: 321811 - DNA, 692 bp, Homo Sapiens
  misc_feature (85)..(94): n is a, c, g, or t
atctgaacaacaacactttaagctgtttttctaaatgcaggttgctgctcctttttcagatatggaaggaaaacgttaagactannnnnnnnnnaaagaaacaacagtcaagcctaaaatttgagaccccgaggcagcttcccgagggagactgctcagacaggaactgcaggacagaagtggatgccccacagaccctgggccccctccccaagtccatcccctctctgtgggcatgaggaaggccgcgtccgagttgacctctgaatgtatgtgatgagaggcagagctgggatattgcatttcttaagggttgcattgcttttccccttcgcccgcggttctttggcgcatggaaggaggcggttccagccatctgatgttgatcctgtctcagtctccccactgcctgtcaggatgagttagtcattgtttttctccgaggcggcctgcttgccacagccctgctccccaaggcctggtggctttgccgaagctctgggaccgcagccccagcgaggctcccaacctcacccagacgaggccaggagccccgccaccctccacgggatgtgcaccctcagaccccattctctctgttcgtccttccttgaccagtctgtaaaccttcactgtttggggatcgtcctgtccatccatgtaaatgtaaatgttggccgagtcgatattaa

SEQ ID NO: 321812 - DNA, 974 bp, Homo Sapiens
atatttttgtcaaaatagtaattaaccatagatgacagatgctgctccctagtcaatggagggtctcaaattttactctgcatctcattgggaaggaaatataaatttttaaaatagaattaacttagggaaaggcatcagtgctgcaactcttagcaccaaatgttttttcttggagcaccaaatgctctaaggaaaacattccaagtatcaaagttttcagatagataaatatttatggatcaaatccataaagaacagacattgttatgaaatatatatagatgccttcaaaactttctttctaggcagagtagacacataagttaggagtcatttcccacttaattgtttttgcaaccttatgcaacacgaatggattatgtgcaagacttattcatttttacacagaaagtagatcttgactgacatggtgtccagaaaatcaaacagaagctatttctctatataaaatataaagtgccattaaatttatagaaatggcttcattttaatctttttttggtggaaaagtatagggatttttgatctggtcttttggtaagaaaataacactcttcaaaacaaattcttttcaactgctagttagtataattggagaaaagcataaaacagatctggttcatatctttaagggcaatgaaattccatcagtctttgaactttattaatgatattttttcagtctacatatagaccactgccacttcctcttcattaagagctcttcatagtagctgtataacaatctacagaaagttatttttccatttaaaggcagaggttaattttcattgttcatgcagcaaaatgtaagtatgctacataattctagagaaatttgaagtagttaccaaagaaacatagccttagcttctgtagtattctcaatgatattaaaatagcaataattggtgtgcactcatcagaaatgaagtgcccatttaaggacc

SEQ ID NO: 321813 - DNA, 766 bp, Homo Sapiens
  misc_feature (173)..(237): n is a, c, g, or t
  misc_feature (586)..(586): n is a, c, g, or t
  misc_feature (605)..(606): n is a, c, g, or t
  misc_feature (625)..(625): n is a, c, g, or t
  misc_feature (642)..(642): n is a, c, g, or t
  misc_feature (644)..(644): n is a, c, g, or t
  misc_feature (690)..(691): n is a, c, g, or t
  misc_feature (728)..(728): n is a, c, g, or t
  misc_feature (737)..(737): n is a, c, g, or t
cattcacggtgtgcaagctgtggcctggagagaacatgggcagggcttccccagcctctactataccccagctttactccattgatcacaacaatggcacttttttcttttggtgcaaatatttccattttccaattgagcctagactttgattttataaaaggaaaagagannnnnnnnnnnnnnnnnnnnnnnnnnnnnnnnnnnnnnnnnnnnnnnnnnnnnnnnnnnnnnnnncgcatttatagataaaattattatggttgcagaagcatcaaattttgtaaaaatatctgtttactacaagcctcttttcaagcacacttatgacacagaaaatattcagagattaaattgcccatgaatctagtgctcagaggaaaatagtttgacaaattggaccaatgaagttgaaattggatcatagaagttcaaaatatttacaaagtgtcatcttttgtaatgtgtatcacaggactttgaattccttgggaaaatgagacaatttttttgtggcttgtgtaggtctgattttcactgtggatcaccctttatattttccttctttcaactccttccttctccngcaagttcataacattttnntaatatcaaaggaaggtgntaattttagaaatcaangntaaagaatgggtgctgtgtagcattatgtttactgggcttgatatnntcagtactggtggcatagtttaaaacgggattatacngtgtgtcangggatatgtgtatagacacggcatgttct

SEQ ID NO: 321814 - DNA, 741 bp, Homo Sapiens
  misc_feature (497)..(563): n is a, c, g, or t
ttcagagcaaatgttttattaacagatttttctccagtagtcttgaaaatctcccctggggagataaactggcaaaagggggcctgagggttgttggaagaaatgaaaagtacataggatgctattttgaaaaactgatttgtcagaagccactttattttaacaataatgtgactgcacctggcacatgagacaggctctgggcctgtttctcaatgttgtgaaaagcaggacagtcagttcccatggagtagattacagcgtgttggacaaggacattcccccgcgtgaaggcacactccatgggagccagtggggccaccatttcacggtgtgcaagctgtggccttggagagaacatgggcagggattccccagcctctactataccccagctttactccattgatcacaacaatggcacttttttcttttggtgcaaatatttccattttccaattgagcctagactttgattttataaaaggaaaagagannnnnnnnnnnnnnnnnnnnnnnnnnnnnnnnnnnnnnnnnnnnnnnnnnnnnnnnnnnnnnnnnnncgcatttatagataaaattattatggttgcagaagcatcaaattttgtaaaaatatctgtttactacaagcctcttttcaagcacacttatgacacagaaaatattcagagattaaattgcccatgaatctagtgctcagaggaaaatagtttgacaaattggaccaatgaagttgaa

SEQ ID NO: 321815 - DNA, 294 bp, Homo Sapiens
tattgtgaacaggcactgaagctgatgttattttaagattacagaatggaaaaagaaataaactattttaatgtctgataattatggggtagcccttgcattgcaagatgatgatttgattatggacacattatcaacagaattgaatttgcatggaactcaagacacgcttaagatcaccacagcataactgcagatttcaggaattacagtcatagagggtacatcaacttgaagagtagattgagtcttacaggaagtgagttacaataagtaacattaagagcccagctg

SEQ ID NO: 321816 - DNA, 656 bp, Homo Sapiens
tcaaaatcatcttctttctcttcactttcctgaataaatttcagaaatgaagattcaaatcccataggtttgtaagtcttcaaatcaaatgaccggggctgtgaatgtttcctaaaattctcttttgggacatgggttggattttttacagtgttttcttgccctgaactatgctgcctagtttctgattctttgatccttggtaaaggcagctggaaacttgtgaaataagtcccactttcagtcccattgggattaggtatggaattttctattttacaaggaggaggaggctgaactatattacactgttctagggaagtggttttggaactatgattacatttcaaagttcccctgtagagcagagtatctgcatcaaatactgagctgctttctatgcaccctttctgacctccatccctttcacttgaatgacagcaatcagtgttctggatgggtgcactactgtcacccggggaatggctgtgttctgtgcgctctgattcacagcttctattttcttctttctttatacagggatctgcttcagaagggggttcctccttaattttggtaccgtacttaacgcaaacaacaagattctccatctgttgctctaaataggcactactcatctgatgagtgcgtttgta

SEQ ID NO: 321817 - DNA, 572 bp, Homo Sapiens
gctccacccaccctctcatgcctgagcatctgcacacaccccagctgcgcctctccctgagctcagtgccctccttgctgaagggaacggctagtacaggaggagctggggcccaggggtctgactccatcaccaaggcaaagcccagagtggttgggctggcgtgagtgcaggctgggccctggtctgaaatagagtgtctttattgcttgtaccgtacaaatatgaagacgaggagaaaggccagtagggacggagaactgtcagataacaacatcgcacacagaggaaaaagaccctcacccacccgaaccaaccccacccctccccaccctgccatgaactgtgtagtacaggagatgggatagggagagcaaacccacaaaagctaaactccaaacacccagaggtgttgctacagggaggggaggcgtgggcagggcagctcatggatcacagtggggctcctcccactaggtcagcacccctcccccacaggatgaaatgcttggtccagggatggggcccaagcccacacaccatgcacactggaggacacgctgccctcaccc

SEQ ID NO: 321818 - DNA, 898 bp, Homo Sapiens
taagatttggggctttcccctcccccaccccgtagtgagaaggttggaaggagagatggtgaggatgggatggatggaggggcatcctgctcttgtcaatatgccaaggctagtcaatggagggtgcagcacaagccggtcaccgaagtgactacaaagaagaagtgccagggaatcgcagcatggaccttcctgggtttgggttatcgtgattcgtgtttaaaccagaaagactaattttgccctgcaccaaaaccagcatctcccctcttcactactcattcatgtaagaaataggaatgagaatttcagagcccttcttgcttagcatcaaaggatgaggtcggggaaaatcaactcaagaaattgagcatgtgacttcaaagcttctcctcccattaatcccagtctgatgggatggtatttggtaaggaaaggtgagcctggggatcaaccccactaatgctataaaaataatgcagatacaggaagtgtgctcatctaaggaccctagaatattgtcagaaccatggctgataacactccaactggaaacacgtgtgtaagcactggccagctttctgccgctggaagcaaccaagatgctgcctgcttgaaggcaaccactgtcagacaatgtcactggccttggaaaggaagggtgtgctgagttcctcctctcagtctgtgccccagagctgtctgatcatgcccctctgtgcttggggtttggactcagcaagatggcaggaaggcagggaaggaggggaggggtgtaagggagcatgctcagtcctccctgcctcccagaggctgagattcatgggggctagtggcctcagggtctgtctgttccttctgggtcagaaggaactctaggggagcaagcaccaccccc

SEQ ID NO: 321819 - DNA, 452 bp, Homo Sapiens
  misc_feature (88)..(88): n is a, c, g, or t
  misc_feature (227)..(227): n is a, c, g, or t
  misc_feature (247)..(247): n is a, c, g, or t
tcttgcttaaccatccaaaggaatgaggtcggggaaaaatcaaactcaagaaaattgagccatgtgactttcaaagcttctcctcccnattaaatccccagtctgatgggatggtatttggtaaggaaaggtgagccctggggatcaaccccactaatgctataaaaataatgccagataccaggaagtgtgcctcatcctaaggacccctagaatattgtcagaanccatggctgataacactccnaactggaaacacgtgtgtaagcactggccagctttctgccgctggaagcaaccaagatgctgcctgcttgaaggcaaccactgtcagacaatgtcactggccttggaaaggaagggtgtgctgagttcctcctctcagtctgtgccccagagctgtctgatcatgcccctctgtgcttggggtttggactcagcaagctcgtgcc

SEQ ID NO: 321820 - DNA, 718 bp, Homo Sapiens
  misc_feature (475)..(475): n is a, c, g, or t
  misc_feature (485)..(485): n is a, c, g, or t
  misc_feature (583)..(583): n is a, c, g, or t
  misc_feature (641)..(641): n is a, c, g, or t
  misc_feature (650)..(650): n is a, c, g, or t
ttttgggtgggaagacagaacagctttttattcagttaggtataaatcatatttacaaggaagaggtggggtgtactggggagccgtatcaggtccagggtcctgatgattctccttcaaggggacagtcctgctgcctcctctcatgctccctgggagactctccctcctcggtctctctggacctggcctgctgtgggcagctcagccatgcagggtagagctgggaatgcagatggggtggttaaagcaggagaaagagtgtggcaaggccagcatggggtggctgctccagggcccctgagcatagcctccttcttgcatcttgggttcaggcttcaagcgctggtgaggctggtggggtctccagggctccaggctgctcactgggctatggccctttaggggtctgtgaccgctcagtcctcttgcagcctttggagccctttcctttcttgccagtcttggaggcccncctgtccttnctgcagccctgggctggtttctgtggggatggtgtcttgtccagatgctgcatcagctgctgcacccagagctcctttgggtctgcacatagctctgnctgagagcgctttgcgggcaagaacaggatagctgggatggagcagcctaagcttggntcctgcttncggtagctgcggacaaccttggcgggaatcttcctttggctgtacttgaagcaacagtccctgagccc

SEQ ID NO: 321821 - DNA, 912 bp, Homo Sapiens
ttttctccttataagacttttattaatgccagaaatgaaacagcaaaaacaaaatgaatttgaaaaatcagtgtgattgtgggtgcagagatggtatgaacagggactgaggaaaaagccaggtctgaggagagccttcagtttcaactcggaacttttaaaggtcatgattcagctgatcctgtgaagtggactgtacagtgggtaggtcgcttcgtgtctttatagccaggctgtgtgctggacatcaaggctcttccctccccaaggaaagcttaactcccagtgctcctgggtttgtcaccttctggacttgcaggcttgagacccttgggtcccccgtcctgcactggacgacccctgactgggaggaattttctaacgaggtgagacagaagaaaatgaaacaaaaaggaactacagaaaacgatgtggggttaattgctgcattgccctgttatgctgattcccacatcttgtaggtctctgggatcatttctgtaacaaacattaggcccttggttagaaacatagctctctctcacacacacacatcgatcatctccaccaaaaccaatattttgacttatggtgcctttgctgctgtcagctcaaaaactacctgtactttgtttccttgaatcgttatgcttttgcatagccatcctctagcagttttatcaaagcaggacataattgcctacactctggaaatgaggggtgagtcacctttttcaaaattaaatttttaaaattctgacccctatcgccttccatacctttaatgtagagagtgcctattcagagcattccatttttaagtaatcacatccaaacaggtcacactacccatgtgtgtttcttcatgctataaatacgtttctggaaatgtttggtagaaacagatttctt

SEQ ID NO: 321822 - DNA, 1016 bp, Homo Sapiens
tgaatgtaacggttttctgcctcctcttcagctggaagcgttagtggtagtatgggcacagaatatatgtacactggcgatgctgaccatgcctcccaggtaccctggctctgggttccttgacctagggaacaagattggatgaggcagatctttgagcccatgtgactatagaatttgctgatgatataattttacaataacaatggataggaattttacctctctttttattagtttaatattatttaatattatgtacataagtgttcactcgcctaattaaaaacattgagtaaaccaagtttttatatagactacccttgccatatgatgctctttttctctaataatatgcagtttaaatcctgaggaatcaatgcccagcatttcaccacatctgaactctgtgtgggcattcttcactcgcctacaaggggtaaacaaggctaccagaacttgaatttgacttatagggagctacccaggaaggggaaagcccttgggactttttccaaaacaatcttctatttgaactgttcatcagccaaagtagtccactgaggtgacaaagctttcagaaatacaaagatgggaagataaaggtaacactggcccacttggggctttgacattggattgggtggactgaataaacacagcctaggtggcctgggcttgagcctcacttacttctccttgatacatagttcctggtctaccttctgaccctttttctaaaatagccagtgtctatttcactaggccatttacttacaagttcccagcttttagggaaaaaagagggaggggggagcatctagttttgaattagatatacatcttagaagtaatgagctattggcagctgttaaatcagattcagccacaaaccagaattctttcttgttgaacaagaccaatgagttagatgactttaataattccacttttctctccctctcttctcctcttcctgaaatcagagagatgagaaactactctttgaaatacct

SEQ ID NO: 321823 - DNA, 672 bp, Homo Sapiens
  misc_feature (442)..(524): n is a, c, g, or t
tttttgaggctcagacaatttttaatgtggtgaaagcatactacaaagaagtagaagaataacaattcagacccaggtaatctgacttcacagtccaaagtcttttcactctattaagtacatgcattgaccatcgtctgaactgatattgtgcccacatccaagcctctctggggaaggagatctatttttactgcagttcaacaggcagagctcatagaagcctgcgtctctgtaagcattgtcagcaagtgctcctggcttcttcttgtacaaactcttcatcatgctcttctctcagtgtgtttaatggcgggtcattgttactgtttagttgcctgatgggtttctggctcctaaatccaagtaacgaagcagatcctgctgtccctgggattatcccctcttgatgagtgatgacctcaggattggaggcagccgnnnnnnnnnnnnnnnnnnnnnnnnnnnnnnnnnnnnnnnnnnnnnnnnnnnnnnnnnnnnnnnnnnnnnnnnnnnnnnnnnnnttcacacggccagaatgaagacacaaaacctaatgtgctcaaatatcctctcttgttgtttgaaaagttgtctggagagcagtgcaaagcctcttcttcctcatgggcctgacttgtctgctgccgtgctgtcctcagcagcgccgtg

SEQ ID NO: 321824 - DNA, 397 bp, Homo Sapiens
cataaatgggtaatattaaacacatgttttgtttttaatatagctgcacttttaataaaatgctattgagactattgttgagacatggataatactgtattttacagtgatatattattgtctcagtatagtttgggctgtaaaatttctggaaaacaactttggcaacgttataaattcaaacttgctttgtttaggaatcagcacattttaaagcataatttgtatattatagttaaaaggttttaaatttttaaccgtcaaagctagaaagtattgaacacagaattggagacacttatttaagaatggagaaaataatgttacgataaaacatttgaagttactgatgttttgcatatttaagagtgtctggtttagaaaattacctgagcag

SEQ ID NO: 321825 - DNA, 785 bp, Homo Sapiens
acatttaaaacaagtaaggaaatctttttactataaaacaggaatagcaggccattgggtttagcagtgagaaatcatatacaacaaagaatggagacaactgttcatgacatagcattactgagaggaactgttgacaggatgagctatgtctctgggctttgaagacaatgaaatgcatcccagaacaattccttagttgagttgcatcaatgcctctgcttagtagtcttttgtgaagatggccctgggagatcttttctagaaaattctttaaaatgtcttatgagtgggggcttcattccttgcaaaattattcaggtaaataaaccctctagcacaattcctataagatggactgaaaatataggttagttctgtttaacaaaagcaatcctttatcttccaccacctcctaatcataaatctatcactaaactctacctgttttcttaagactcagtgtatacctttattctctttagatctcgttttaatagcaggattaacaaatacgcgatctttaagctagtttatttataattctaaaaaattactgacaagttgaattagatagtattgaaatttcacataaaagagacaaattggaaatttccgaattttagtgatttttgcttctttgaccgaaaccaggaaaaagaaattttatacataccttctttggaaggaagacgacaaaccctccgacacatggacatgaatgcgtacaaatatttttccaaactatcatcagttttcttatgtagcctagccatagctctaaa

SEQ ID NO: 321826 - DNA, 885 bp, Homo Sapiens
atgtggaaatgcaagaatcagcaggatcaagtccaagaagaatgaagccagatggttctgtaagacccaatgtgaatagacatatacaacaggaattatttaaactgcttaaccattcccacaaaaatgagtaggtatatttaaagaaaacttttttaaagcagaagttatctacaatattccaattgagagaagatatattcacaggcagtttggacaagatgactccagtcacatgaaagtttagttttattatagacactttatgcaaacatttcaatactttttgctacttctataatcttttagcaaggcagtcagttacagtccaaatgggaaaatataaacaaaattacacattttatcttttaaaatctactttaattctgttataaaatttataatgcagtttaaactatgatttctctccacttgatgatgtctctcactctgttcctttaattacgaagtctctgaagactctgaacttgactgaggaaatgttaaacagatacctcttcataattctgtaagtgtttgcttttaactttgaataaatgtcatatctaaacaaatattaaaaagtatttaacatctcatacagtcagagttcactggcgctttgttctagcctggacactgaccattgaaaaatagatgcctttctgtgccagcagctgctgatgcgtgccatgctccttgactctggcattctgaaacaccactattaagtctgcattctggatggtggacaggcggtgagcaatcacaatgcaggtgcggccttctctggctttgtccagggcttcttggacaaccttttcactttcagtatccagagctgatgtagcttcatccaacaggaggatttgaggttgtctgatg

SEQ ID NO: 321827 - DNA, 1062 bp, Homo Sapiens
ttcgacggtaaacatacttattacacatatttatcaacaaggcatcacaaataagtcacaaaaagtaggcttagtttagttcacaatataaatcccgtgaaaacacatttttcatctctgcagtttataatactctacgtatatgaatttaaagcagttaaacaacatttgagattaaattggtaaaaaagaattgtaattgaattcagacttcagaaaattgtgaagtaaaaggccatgatggagaaatattaagaatctgtagaattactaaactgtcacagtattattttcctttacaaaagcatctcagtaaaacaaaaactacagaaaacgcaaagtaaaatcagagattttggtttagtactttccctgagtctcttgttttaaaaatcaaagtaaggccagttcaaaattgacccacaggtcttgcctcctccatgctgccatggggagtacatttaagacaagaggctacgcatgttgaggtggtcccagggctttattcaaatgccaatttgcccgtgtcactgccacagggttatctgacccactgctgcatgtgggcttaaagagctgtcaaaattttatcttggcctgctataatataatatgcgagactatataccaaaggaagacaaacagtttcagttattaataaatattaaatttctaaatggatctggacactatatacatcaaattatggtaacataacagaaacaaacacttttatgtttaaaaattcttacataaacaaaggtttggggtcaagtcatcttaaacttctaatctcagatgttacaagaaaaaaacttcaaaaaagaaatcaaattcattagatcttaatatagtagaaaaaagtgattataagatgatacttggacttggattgtaagttgatactaattccccaaagtggttgtctctttgatccttaaacaaaactggcccctattgtgtctgtacttgatcacttaattgcaataatatttatgtgtatgtgtacatgtatatgtacatctacatgtatatatgtttgcaagtgatcaagtatttaat

SEQ ID NO: 321828 - DNA, 506 bp, Homo Sapiens
  misc_feature (262)..(291): n is a, c, g, or t
gtattctcctttattgcttgcatggttacaaactttcagaacaggcctctgagacattggactgagactctgccgaacatcttttggcatcggtgtcctttttcttctgtcgcggaaggcagccccggactgcaaggcctccagcagattatccatcactcctgtctcatcaccctcagtcttcatttctaataaacgctttttcttttgttggcgttcgagtctttctcgctctgctaattctttagctattctgacacgnnnnnnnnnnnnnnnnnnnnnnnnnnnnnngatattctcctttattgcttgcatggttacaaactttcagaacaggcctctgagacattggactgagactctgccgaacatttttttccaaggttatgtatttctggcagcaaagtaatgcttcaatatcctgaaatacttgaagcagtaatgttatgacttttacttcccatttaattatgctactgtaaactccactgggataaggtacatat

SEQ ID NO: 321829 - DNA, 258 bp, Homo Sapiens
tttttcaactcccatactttattgggacaaaggaggaaggatgcaaaccatcaccacaggcccacccaccaagggtgtccaggcttcagcacctagtacagcatgagtgagtacattatcaatacaggcaacttgggagggatggagtggggaagattccacacaggaaggagactagaggtccttctagggttgggggctgaggcatgtattgtactggcacagtccacttatggatgaagaaggaggtctagatcc

SEQ ID NO: 321830 - DNA, 736 bp, Homo Sapiens
  misc_feature (51)..(128): n is a, c, g, or t
  misc_feature (571)..(590): n is a, c, g, or t
  misc_feature (640)..(657): n is a, c, g, or t
aagtgaatgtttttgagaagggaaattgcgcccaatgtggggcgtgcggcnnnnnnnnnnnnnnnnnnnnnnnnnnnnnnnnnnnnnnnnnnnnnnnnnnnnnnnnnnnnnnnnnnnnnnnnnnnnnnctgtatatgaaagggccagggcggttaattcgggagtttggcgggggccgccgggtaaattgggggcgtccaggtttgaggcggttgggggactttgagttcaggtcggtgtggcagcttgatgttcaggtcaggctggtcaaaggtgatgcacgcctctgtgatgctcccgggcgggaaggggaaggcaggttcccggtgttcggttccccaggtcccatcttccttggtgttacacacagtggtgttggcgtctccatgggcattgaagcgaggattgaagtgtaggcacaggttgttgctgtcttttcccaggttcagcacaaagtttctatcccagctctggggagacgagacatgtgggtcttcgtggaggccagcctggtcaacacagattccatgctagccagggctatataaggagaccctgtcttcggagaagnnnnnnnnnnnnnnnnnnnngtcgaggcctcgtgagcttgggtgactggtccaaactcacatggctgctnnnnnnnnnnnnnnnnnncggtggggcggtatgaatgaggaggaagctctggaaaaaagattgagcccctgcagggcaccctcaggcagcaggcccc

SEQ ID NO: 321831 - DNA, 814 bp, Homo Sapiens
  misc_feature (652)..(672): n is a, c, g, or t
  misc_feature (703)..(711): n is a, c, g, or t
agcatgcaattttttattgttttctaaatctatttgtacacttaatatgctagtattaatttcacaaacagtataaagaatgtactccaatgatattacgcggcaactactcacctgaaaaagaaaacattgtctctgaaataattcctaattatacaattttgcaaataagcactataaatgttaaaatgttaagacttcagtgtataatgtcaataacatcctgcctttttaaaattgcttaaaacatttgttaaagatcatgcaaaataaacactgtattaaaatgctagattacactcaaacatcaaggcaatgaaacacaaaagagcaactatttagcacaatggactggcccagtaaataacttaatcagcatattaataaaaacccactgagtgataaacatcgaaaatgtaacactggatctagataatagcgcatctgggattctcaccatctaccggtcctaactgtgacttggggtaaaccaccagaattcattctacataaatgagctatgttaaacgataacaatatttcattgcatgatgacagggtacatttctagtccacacagtacttcaatgtgaccattctcttaactcggctaataattaatggaaagtacacttttacagtcacagcactnnnnnnnnnnnnnnnnnnnnntttacccttgctttgttacatgtttccaaannnnnnnnnaaaaagtatttcctttcttatgatccttccccagaactaacatgctgacttaggaacagatgaagtagataaagtctatcctagtatagagagcaatgattta

SEQ ID NO: 321832 - DNA, 1280 bp, Homo Sapiens
gatattaaatgttaaattttatttcaaaaactatcacagcttaaagggaaatataatttaagcattaagatagtacatttcagaaaataagctagtattttcatgttacattttaggtacctatcatttgtcattccaagagatccttgcgttctagactctagaattaaatggggtaaagggttatgcttttaagaactataagctgaaatgatttacttcagttcaatatagaatatttgtcagtcaagataacaatcaatgtgtacaaaaatttacataacaagaggaaaaataggcagtgcagcacctttagaaaaataattaaaagtttcattgcatttacaggtaagtgccacactgagaatttacaatacagtaatttactgcaatcacaggggagttccataaagaaacaaagctcttacactccaggtttttggaaggtgttattggaatgcttaactgaaacccacagaacttggtatatccttaggattgagttgatgaaggtcataaaaggttttcatagcatctattatataaaaggagttcactgcatttggatagctggtttagtgtctctgacaagtgtgaagcctagaagaattactggcttgatggtgatctttctgtatccggcaagacagaccttctccacagtaacaacgctggaatatttctagtccatgagagccttttctcctatgcttggtacacacttgaccttctttcaggacaggtttacagatcttggaccagaagtgtctagcacaacacaatcctgaggcacagtctgatgaccggagacaaacagaaccttcttgtcctacgaaggagaagacagtaggaaaaaagtacatagttactgctaaacctgcatcgtttcactaaaataattcaaaagacacttctgatgtgctaagaatgagtcttaacatccttacctttggtgtgatacatttttgaagacaaggtggttcttctggaatacccatccaaggtgctatgatcattaccaaagctttcagtgatggtttcctcaatttctcctcggaaatgattttgatcagaagacacacatattcctaaggaagcaggaaatagtgattaacttcagggttgtaatgcattactgctaacagctgtgacagtggcagtctgttatgccagcatcaacttgagatacttcattgcagtgacatcattttaaacacaagccaaacttcctctttactgttaatgcaaaactctccagatggacagaagcaccaatgtgt

SEQ ID NO: 321833 - DNA, 956 bp, Homo Sapiens
ccgagagagggggaggccctagaagaaattactgggcttgatgggtgattctttcctgtatcccggcaagacagactttctcccacagttaacaacgctggaatatttctagtccatgagagcctttttctcctatgcttggtacacacttgaccttctttcaggacaggtttacagatcttggcccagaagtgtctagcacaacacaatccttgaggcacagtctgatgaccggagacaaacagaaccttcttgtcctttggtgtgatacatttttgaagacaaggtggttcttctggaatacccatccaaggtgctatgatcattaccaaagctttcagtgatggtttcctcaatttctcctcggaaatgattttgatcagaagacacacatattccatttttgcagtaattcccggggcagcacatagcgtgacgcatgcagcgttttcggcgcttcctgcaggcgagacagatttgcacgcctgcgtcccctccgcgggtgggactagcgcagtactcatcagtgccgcactcctcgtcctctgcgcacgggtacggctggtagttgtcaatggtctggtacttattcccgcccgggtacaggattcccggcgcggcgctgactgcagagcctgggtgccccgcagcgccgcccagcggtgggggcaggttcttgatagcgttggaattgagaaccgagttcaaggtggcgctcactcccagcagagggtggccgccgagagccgccgctaccatcgcgacaaagacccgggtagctcccgctgcgcccagagccatcatctcagaaggactcaagagggagaaagaaagagaaaatgaccgtcactttgcaagcctgggtccccacgaaaccgtgccggttcggctgcagagtcagggtccgggagccccctgcggtcccagagtcctgactgcagggagcacagagctct

SEQ ID NO: 321834 - DNA, 1126 bp, Homo Sapiens
gccatttaccagggtaaggtgcccacccctgagaaattttccaataccagtaattttactgcaatcgccaggaggagtcccataaagaaaacaaagctctgtacactccaggatttttggaaggtgttattggaatgcttaagcggaacccacaggaacttgtatatccttaggattgagttgatgaaggtcataaaaggttttcatagcatctattatataaaaggagttcactgcatttggatagctggtttagtgtctctgacaagtgtgaagcctagaagaattactggcttgatggtgatctttctgtatccggcaagacagaccttctccacagtaacaacgctggaatatttctagtccatgagagccttttctcctatgcttggtacacacttgaccttctttcaggacaggtttacagatcttggaccagaagtgtctagcacaacacaatcctgaggcacagtctgatgaccggagacaaacagaaccttcttgtcctttggtgtgatacatttttgaagacaaggtggttcttctggaatacccatccaaggtgctatgatcattaccaaagctttcagtgatggtttcctcaatttctcctcggaaatgattttgatcagaagacacacatattccatttttgcagtaattcccggggcagcacatagcgtgacgcatgcagcgttttcggcgcttcctgcaggcgagacagatttgcacgcccgcgtcccctccgcgggtgggactagcgcagtactcatcagtgccgcactcctcgtcctctgcgcacgggtacggctggtagttgtcaatggtctggtacttattcccgcccgggtacaggattcccggcgcggcgctgactgcagagcctgggtgccccgcagcgccgcccagcggtgggggcaggttcttgatagcgttggaattgagaaccgagttcaaggtggcgctcactcccagcagagggtggccgccgagagccgccgctaccatcgcgacaaagacccgggtagctcccgctgcgcccagagccatcatctcagaaggactcaagagggagaaagaaagagaaaatgaccgtcactttgcaagcctgggtccccacgaaacc

SEQ ID NO: 321835 - DNA, 945 bp, Homo Sapiens
aaagcccttagaaggaatttcctgggccctgaaaggggggttcctttccggaattccgggcaaggacaggccctttttccccccaggttaccaaccgctgggaatattttctagtcccatgagagcctttttctccctattgctgggtacaccactggacctttctttcagggacaggtttacagatcttggacccaggaagtgtctagcacaaacacaatccctgggggcacagtctgatgaccggagacaaacagaaccttcttgtcctttggtgtgatacatttttgaagacaaggtggttcttctggaatacccatccaaggtgctatgatcattaccaaagctttcagtgatggtttcctcaatttctcctcggaaatgattttgatcagaagacacacatattccatttttgcagtaattcccggggcagcacatagcgtgacgcatgcagcgttttcggcgcttcctgcaggcgagacagatttgcacgcccgcgtcccctccgcgggtgggactagcgcagtactcatcagtgccgcactcctcgtcctctgcgcacgggtacggctggtagttgtcaatggtctggtacttattcccgcccgggtacaggattcccggcgcggcgctgactgcagagcctgggtgccccgcagcgccgcccagcggtgggggcaggttcttgatagcgttggaattgagaaccgagttcaaggtggcgctcactcccagcagagggtggccgccgagagccgccgctaccatcgcgacaaagacccgggtagctcccgctgcgcccagagccatcatctcagaaggactcaagagggagaaagaaagagaaaatgaccgtcactttgcaagcctgggtccccacgaaaccgtgccggttcggctgcagagtcagggtccgggagccccctgcggtcccagagtcct

SEQ ID NO: 321836 - DNA, 494 bp, Homo Sapiens
tttttgtttgcaattaatctagtcccagcacttttatttgtagagttctcaaatcaaaagtaacaaataattatacatcaggattgttaggaataccaattattttacaactgccactacgtgtttcttcttctctgacacaagtggcacagatccaggcttgctgtgtttaatacgattcacttcctttcgtcgacgagcttctttcatgatgcgctgttcctgaatctggctatagatagattttggtagatgtcgatgacgagctatacgttttatatgaggataatgctgaaatttctccttcaatttctggttataatccttggctgctttttctcgtgatgtaagcacacccaatttttcagaagcattagctttctacaggcgaatgttcatttcatcagatccacacataatatacttgctgtcagaagtccattttacacagataacatgttgcattctctttgtatgatatacctccctgcttg

SEQ ID NO: 321837 - DNA, 538 bp, Homo Sapiens
agatatcatcatattttattactaattgcagtttttgattccacgggcctcgtaaaataccggctttattgtctcccaaagtgttgtgattacaggcataagcatcatgcctggccaaaattacttaattatatgccacaagaaaaattatttaaaaattccaaggatttttggaaatattttcatgaaagaggtttacaagataagaaatgagtgagaaatgctgacgtagtacgtattttattgcagtgatattttcaggaagaacttcatttccaagtgtcaaatatttcagagggtatgtgatgactgtaagctgacaacagtagccaaggtgagccttttttctttcctaagaaaaaagtctcgcgcaaatattcaggaggtttgaaatcatcactttaaggaaaaaactgaaatatcttacagtgagttttaggtctacttgacagaggaatcaaaattaatttacagccagccattaatatgctactcacctgcatgtgttcaagaaaagaaaaatatgtcaatatacaag

SEQ ID NO: 321838 - DNA, 1091 bp, Homo Sapiens
tttttgcacttgatccatttttatttcaaaatgtctacaaagttttaattctccattatacaggtaatttttcaaaatctagacattattcaaatgtaagccaaagtccttacacaaatagaatacactcaaagatcaaaaatatacatatctttcagcaaactttgttacataaataagaaaaatatatacagctggtgttttcaaagtacaattatcttaacactgcaaacatgtatagaaggaactaaaataaaaagaaacactacagcaagggttaaggggaccaccaaattcattttaccacatcatcaattataaagatacatatatcaaatcttaggggaatatatacttcacactgggatcttaacttttacttcactttgtttatttttttagaatactctctggataggtgaaaatctatccatgacacctattacgaaagttacatgtgaagaattcaataatctaggtctttgtactctgggatagatgtaaaaagaattctttaaaagttaaatttgtataagcctatgttaacaatttccaagtaaactgttctattggaaattaaatatttcaaagtagaaaatgttaggaaaaacttcactcaaaaaattttaacacagtaagcaataaagaaaaattatgcccaatgtttccttagataagggcaactcagctaggtttatgttttacccccagaaattctcccttccttttcctttagctcgtgcccagagtttgaaaagcccggagactagaagctgcagagcgagcagaaatctcagacaatctgtcctcatcttcatcattaaaggcttcatgttgaggtaactgcaaattgttcatccttgcttttcccacattgtgctgaaactctggatctctaagagagccctgaattcgtcgagagggatgccagtaggatggaacatgtggtggagaaggcaactgtccagggggatttgttgggtattttggaatttttgaaactggaagagttgcctcagcaaatttgtggatattgtcttcagaatcttcccgcaaaggcagaggatcaactgtttttataccagcagctg

SEQ ID NO: 321839 - DNA, 1018 bp, Homo Sapiens
  misc_feature (945)..(945): n is a, c, g, or t
  misc_feature (950)..(950): n is a, c, g, or t
  misc_feature (953)..(953): n is a, c, g, or t
ttttcctcaggttggagattcatcgtaacatgcatgcattttcaaacagtaacagggtctcaaactttttaaagcagacgttagacaagcacaggggattgaaaattcccatttaaaaaatggaaactgcagtgggatatggagaagtcacacacttggtggggtggtggtttgtcctgcttccccaaaaggtggatatgaacttaattcacattttttaatttcaatgatctgacctgatgctgggatgtgccgagcagtactgccccctcccccaagggtgttggctcccaccgcctctcacagtggctctgcgcaagggcaagaggctcctgtggaaacttctgccctgggatactggcacaagctgccaagggacagctgagtctccttttccccatggggcactcttcataagtggcacattctagaggagggagagggccacggtcactgacccctgcagatggctggtagattggggaacagttgtctgaatgggttttccctttcaggacctcctgcccgcatgactgccaggaagagatgaggctcctagacttggggggccacaggtttaaggccagagctctgagtgttgtttaaacgcactgtcccttctagcccccaacacctgagtaactcacatgctggggtgctgcagttttctctcccaccctgaaattggtaaaaagacaaactggggggtaggactggctactgcaaaaagtcctgggtctttggtccacctccccaaggtatgccctggcagaccatgaagacaggaaaggcagggcaggagtgtagcctcacgccctgagcgctaccagcaggcctgtttgaggccaaaagcacaggcaagagaaagagtcaagtagggagaggggataaagagctgcctgtggtgggaacttaagagactgccactgagaacagccacagggncaacntcngcgcctgccacagaccagcaacccctgagctaaagaaggagaggtggagcactgcttcagtctgc

SEQ ID NO: 321840 - DNA, 1008 bp, Homo Sapiens
ttcatgagcgtattttaatttttaaaatttgaacaattcaagtaaaagtcagctagataacataaatacagagtaaatgcacataatttacagccatgtacataaatgcaagataccaaacctcacatgaatagtcaaaagttaacacttttgaggttcactatttagctatgactgataggtcataattcttcacataaacggggtacacattccaaaagtttataaacacaaaaactgagtcaaaccagaattttgtttctacaaggagtagcataaaaatcagtgtgtaggttaatgggaaatactaagtacatgatggagaagagatctgagtgggcagaaagtttgtacattgtattttatgtattaaaattcctcaaatttaaatcattcagaaatacctatattcttaggaatgttaaagtcattatatatttgaggagaaaaggctgaactgtacttatcagctccaaagggggtccctagattactaacagtctgggcagaagagcatgtaaacaacaaaaggcaggcatggacaattattgaagggcaagaaatggattgatttttagcacttaaatccttcaaatccgaataaatatttttagtgatttaaaaccaacctaaaaatgctgaaatgtctgtaacccagtaatagagcaaacattatttttaccaacccaaactctgctggtcctaacatagtaatgctatctcacagataatctaatgatattctatcctgacttcaaagttacaaattcactgtggtggacccatctagaaaggatggttctacaaagttacataatgagaatcaaacgaacttttggtgatagtttttttcctgggattaaaaccactgcatggtatcccgaaatcacaaacgctaattcttcagatttgaactttgaaatttaaaagtacaacaaactaaataatgtggactctacaccagaaataaaaaagtcatgataaacagatgaaaacaagttaaaaaaa

SEQ ID NO: 321841 - DNA, 808 bp, Homo Sapiens
  misc_feature (140)..(140): n is a, c, g, or t
  misc_feature (145)..(145): n is a, c, g, or t
aacagaaaaccggcaattgttatttattttaaataagaagtcataatactattaggaatagagagcaagatataaaatcatatcaacccttttagataaatacaaaggacaaatgaaatacacaaaaaacaatatatttnaaaantccactgttagtttttagaaaaagatttagcagtttccattaagcactacatcccactattccatttttaggaaggacagatgcttgaggccataggttaccagctcttgtttggtctttaaaaatgcaagtaagttgctaacattttcaaataagatttcaacataactctgacaatgccacaggacacacagtttggctccatgtacacgtacctggggacagtggcagtccccaggtctctgccatgccaagatcaggccccaaggccattcagcaccaggcacaatctctgctttcctgacaactggcctgctttgcttatttaccttagtagccttccaggtaactgacactggtgtttgaacgcttaactttcacaaagcttgtttaggcaaataaaatatgttcatactgatgctgggaattttgttactaattttttcccttaagttcaaataaaactaaggagttgataaaagggtattctgaacagaaacgtaaaaccaagagcacagaaacacctgctgtgtttcttctgccagtaacagtgacagagaaccctcaggcccttgctcgtccggctgcagcacacacggcctcacctgcattgctccccgctcctctctgctttttttccttggctagttgaatggctcggta

SEQ ID NO: 321842 - DNA, 747 bp, Homo Sapiens
ttaaattttaaaatcagaatagaactttatttgtggattcaagattttaaaaaatgattttacactttaaagtgtgcaataaattttgatacatcaatcttgatatatatatttactgtgtcagaagattttaaaaagtcaaatagtttataatcaaaatgaattgtgtttaacttgatacttatatggaataacttcagcattattaaaaacccaaaacaaacaccatttaaatttgagttctgatgaaatgcatttgtaatacaattttgttaaaaatttttaataagagattgtaggctaaagttatatgcttgtaatttctagaaacatatgatgtccttgctttatgaaaatgatcctactgactgtcccgcagtagaatgcatttgagacacttttctatctgggataaggggctgtgttgcttgatacatgtttcttccagaccacgagcccctagtgggagatgaaggggatgaaggtctgcagctggggactggtggcagttgagtctggtctcatttaacatcatgttctatgagtcacagaatcatccaaatgagtatcagccagatacaaagaaagctttgtattttctcatgcttagatagttcacaaacataatatttaaataattgtggcaaaatcctgttttaacaaaaataattttcacattccattctacataatgaggacatttccaaaatgcattggcccacattactattactttgcctgtgccga

SEQ ID NO: 321843 - DNA, 595 bp, Homo Sapiens
  misc_feature (311)..(325): n is a, c, g, or t
tttttgataacagaaagtttattcaagaattgtttgacagacaacccttttaggtaaggaaaaaagtaactactgaagaacaaagaaagttccaagagggaattaactctagttctacaaattcaggactatacagtgacgattaggagctgagttcatgccttttagaactaattacaattgttcgtaagtacgagtttaacataaatctacagctcttttctagagtacaatagtaactaaaatagctagttttacatgacaggaaacacaatgtcctttgtaacaggtaaatactaaaaaagtacaannnnnnnnnnnnnnnccctcatataaatacataatgtagggggataaataatacaaaaaagaaaatattttaacaggctataaccaataaatatatatgaaaatgttcactagaacacacgcttttttgagcaatgctggacttctgcaggcccagacatctatcacagttgtttttacatccattaaaatgtaaattctaagtgcaacaaaagtgtcctgtcaggaggctgagcaagcacacagccctgcccagcccctgcctgggacagtttgttcaaatata

SEQ ID NO: 321844 - DNA, 587 bp, Homo Sapiens
agtgattttagtttgtatggaaaatcttctgaagctttgatggtacatattcttattaatgccctcacattagaataactattttcagaacataaaattgtaggttcaaagtttttttcaggttcaatttcacattcttgagctaggcatggtactgatggttttcaccataacatacaccaatgtccttttgtctgtgggctcccatccagcctggtggctgaagtcatctacaggtaagattgaccaaacctctgaacaggactgaaaaaaatgttatcttcagaaaaccagccctcttgtacactgctgctgtgaatacaaattgattaacttttctggatggcaatctagcaatgcagatcaaacatttaaaaatacatatatatctcgacacaattttatctccaggcatccacatgaaagaactccacaatgttcagaagtgtacagataaggatactcgtcacagcattataatatgaaaaataaactgaaaaccacctcatctccaaacacaattaaattatgttaaaattctataaacagggattaggatgtgtaggtttacccaagggaaaatatat

SEQ ID NO: 321845 - DNA, 688 bp, Homo Sapiens
gccccagacccagccacaacagcccactgtcccccagctgggctagatgacctcaaagtttggagagtcagggacagggtccagggatgggaagaagacgtctccggggcctggaggagacaggggggtgctgggctccgaaagcagatgccgcccagactcagaaggctgccgctgggccacataggacagggggtgcctgactttggcctcgggtatcccctgggcaggtggtgaggcttcaaagccggggttttcaatcccttgaatgttgctgtccatccgcaccagctcctgggcacggcggttggaggctgcctgcctttgcttgtagaccaggagcaggatgagggggaggcagaggattcttacgatgcaggcacccgtagccagggctgcagccgtgatgttttcactctcctgggaggaggatgggtacaccacacagttggatggtgcatctttgcctgtctgcacctgcagctccatggcaccatggaccctgtgctccgagtggtggtgcctgatctccaccaccaggcagcagtagaggccgctatccagcagggtcaggttgcgcatggtgatggagaagttgccatggtggtcggaggccgactccagcccgtggcgctgagccaggtcgtggctggtgttggcagcctggtggcctccatggtgcaggtgg

SEQ ID NO: 321846 - DNA, 348 bp, Homo Sapiens
atgagccaacgtacccggccacaattaagcttaaaaaccactgagttaaggaatttcaggtgtgtgccatactggattataaatgccgaaaaacatacaagttagtaagcaaattataaaattaatattataacaatttattgttttcttttttatggctttcttattgtttattttactgttagttttgaaacttgttcttattttaatatgattcttcatttttttctaggttacatttagtaacactttttgaaaatgatcatcatttctctcacctctcatctttggaacgggagatgactttttgcattgaaacggttaggtttcttcttctaacgaattaat

SEQ ID NO: 321847 - DNA, 1888 bp, Homo Sapiens
gtccattctcattctgaatctgttgactggagtgaattcagtggtcacaatcccaccatcaaataagaatcactttcctcagagtaaggagctgttccgatcttctcaatagttcacacaggtctctcagatatatggcaccatgttgtaagtctcacacaagatgttctggtgtcactgtaaattacacaatatggcagtgtttgtcttatggggacatactgaaaggggcaaagtagaaaacaacctgtttgcatgttatatgtgagtacattattgtactgtgcatgggtatgagggcattgcagcccttgttaaagaggaattccaccaattgaagcctatgtcagttcccagctgctcttggtgctgagagtatctactcatataaccttattttgttagatcagagccctcttcatctacagtttggctcaaatggtttgaactgagtttggtcgaactgagtttggtcgtttatctcttccatctgagctttatttctcagcctcaggatatgtggggtacttgaccgtttctatcttctctcgaactttgtaggagggatataggcccgtccttcccaattttcctgttgacacctttagaatagccatcccaatgatttccagccacaccaatgatatctccaggttccatgggaatttcatctgcagttcggggttggtgagcataaatggcaatttgattgtgggcattctggcccccaaaatagtagatgtcatctaaagaatggaagtttgcagaggcatcaggatgtagtgtttgcataatttcataagcaactcgacagacctgggatgaaaaagtacacactaggaagtctgcctgagagagaaaatgtatatccaggatcactccacgaagtgaattttctgtgtatcgattgtgcagtcccgctgaccagggaaatagagttatcattaattaaattcataattggggtactttgtttttgcctcctttaataaagaaagggtcatctgtggccaaatacactctttttttgtccacttgcattctgcgtgcaagaagctgaaaatgttcttcaacatgcaccatgtactcttcaatgggatggaaggcagcttctgttcccactttgtctgtgcgtctgacatggactccaataactggatgtttgaagccaagcttcttggtggcttcttctatttctttttctagccaaggctgtgggcggatcaagtatttgacaaactgagacacccaccacactgcagggtcaccatgcactcgtacaagtcgatctgcgaggtcttctggtacagccaagggtaaatatggaggacggggatgaagactgtctacaatgggaagctcgaccacttgaacatttttgtccttcacttcacctgaccagtgtccagtggagatgccagatctgtctgtgcatgtctcacttacaggcctaaatacagtctcccatccaccagtagcatagcgccaattctgagattccaagatgagtgttcgctgggtgccatatgcaatcatgaagcagtagaccacatgatggagctgacagccatagccacagcctttgttgatattacacaccagctttttggctttgctgcagtccttgggattctgaagatatgttattctccgctgaaccagttctgtcagatctttggcctctttttcccgccaatcacctgctccatctgtctgactgaggtagtatagatccgtcattatagacctttcatgatgtcctaaatccaaaagaaattcatctgcatgtctttggagttcatttccttctaagttctttaatttcttcaattcactctgtaggaaaaaccagagctctttagctccctcgtgccgaattcgccaccca

SEQ ID NO: 321848 - DNA, 1263 bp, Homo Sapiens
  misc_feature (377)..(377): n is a, c, g, or t
  misc_feature (379)..(381): n is a, c, g, or t
cggccgcaattccttaaggagattccaccagcttttccccaagaatggccccggctggggggtaatcttgaaattggagcgcccgcttggacctccccgtgaaaggactccagataatggccctcagaatctcctttgggatttgttccgaaccgcttcggttccccccccggcgtgttttttatgggaggaatccaacccccttgtcatgtccaggggtttctttggaaaccacctaatgccctggttcccttcccctatgggcccgggccccaaacgaaaggtttaaaaagttttttcgggggcgaggggggcgcgccatgttgtttttcgccttccggggcgcccggggggccccggccccccgccccaacccncnnnccgggccctagggcgaaggtggcttttatttcctctcttggggaaggagggggagggagctttcccaagcacatcaacctaaggaaggggtggttgcgcccccagcagcgaggggctggaactgctgatcattcggaaggaagggttcgttcttgtccacttcctggcccttggctgcagggtgtgctggcaggggtcactccccttggggtggcagctcctgcatcagtggaggcacaaggaggtatctgctggtgttcacgaagaggagggggcaggtgccctgagtgagggagaaagggctggggtgtccgaccccacgccaacgcctgcccagtatgatcactttcataaggcctggctggtgggactcctcccaggaaggccctgaggggccccttggtagtgctccacacgatggctggtgctttaaatgtccatctcaaactgtgactcttcaccgcccgcccgcttatcttctgggctattgcgcaggtggctctggctggcttccatggggggctcatcactggaagggctggtgacccccggaatggtgggcagatcccttgggggtgttttggtcacaggtgagttccgacactccatcaggaatttccggtcatagatgatcctggtacctcccggggtggtgctgaagagcgtgccgccgggggtcgtgctgtagtccccgggcgggagctgcacgccgtcgccgagcaccacccggcgagtggcggggatggcccggcttggggtctggctgcagctgctgcccccggacatggtctcctgtgcgctgcacccgcgaacctctcgctgccctcccgcgcctccagccgacgcgtgggtcgacgatatcccgtaattccggccggtaca

SEQ ID NO: 321849 - DNA, 311 bp, Homo Sapiens
gggtagtgtatcttgtacagataacatgtatttttaaaggaaaaaaaacggaattgaagctattttttcttgcatttctaattggcctgagggacattccgtttgaaatgtactgaagttacagtttctggttttttctccttatttttcttataatgcttgaaatgtctaactattaaaaaagacaattggaaaatgttatgcatggggtttttaagaaaacaaagtgttctttttatttgactgacaattcattttacactctatataataaaatctccacaaggcatcttgtgggcaaattctaaaaa

SEQ ID NO: 321850 - DNA, 1133 bp, Homo Sapiens
  misc_feature (958)..(1008): n is a, c, g, or t
tatataagtgtgtaaaaagcagcggtacggtcccggaatcccgggatatcgtcgacccacgcgtccgagccagtgtgttttcttatttaactccgtttactacattctacatggtgtttacgtgatccacacttgaaatactagatcagtagacattcactaatataccaaaataaaatgaaaaattgagtttttccgtgaactttatactgtccagctctgttgattttaaagcttcttcatccaggtcagttcaggaagtatatctggagtacctgctctgtttttggctgtgagactagcactaaggattctggtacctttacccaaacctactgggctactaatacttctctcagcagttgatcaaatacaatagaccatgtaagctggggccgctcatccacttccagtttgctggtctccctgctagaaaacacattgtactgtgctttttctggaattcagtataatggcatcactgcctgtttttcacatcttttgtttcctgttcattttaaggaaacctactaaatccagttaatattaaatggacaccactcattaagaaatttctttatggcttctgctgaatacttaaatgccttactacagttatccagttgacatgtttttaattcatataaggtatattgggtatattgaagtatatattgtattacaaagacttgttcttgtattttaaaatgtcagtggcaaacatatatggtggaacctttctttaaagttgaaatggcgtattatttaaatctgaaaggttaaaaagctttcttcaccttatatatgttcttccactgtgactttttggttgaagactagtaaattaacttttagttagaagatgcctactgcttttgttgtttattttaatcagcagagcacagagacacataaaaactctgggaaatgactaggataaaaatatcagtatgtatcnnnnnnnnnnnnnnnnnnnnnnnnnnnnnnnnnnnnnnnnnnnnnnnnnnncaaaaagtatctgaagcaaattctcagactgaactacttcttagacctcactgtaagaatattttattcaatgtctcatttatgatagatttgcaagctgctcatttttgaacagctttttgcat

SEQ ID NO: 321851 - DNA, 129 bp, Homo Sapiens
ctttttctttccttcccaattccttgcactctaaccagttcttggatgcatcttcttccttccctttcctcttgctgtttccttcctgtgttgttttgttgcccacatcctgttttcacccctgagctg

SEQ ID NO: 321852 - DNA, 1014 bp, Homo Sapiens
  misc_feature (978)..(978): n is a, c, g, or t
gcccagaaatgcgtattaaatgagaatttgccaactccattttttgtccaattgaattgtttccggctctcggggggctgtctaaattccgaaaattaggacgcccaggtttggggatcttcccgtttcagaatgcgattccacagtaaaagagcccttaaagaagatccacatttaggggattgtgttcccaggaaccccttacggttttcgccccgcccgggcgctttctgttaattggtggaggaaattcccaaagcccctaagttccatggtgccaggggatcttccttagggaaatcactctaaggcgccaagtttcccccttgccctggcgggggtccgcggctgccaaatagaaagggttttggaaagcttctttgaggttccgagggcggccagacaaggatggcctcttatgagggttacgtcttactccgtttaagaaaagttttattaatgtgttaatatttcagcaaagttattgcaacaggttgaaaatgcagacacactattacaggctgtaaagtaacaaatgagttttacacaattaaaatattaacacatacttatgggatttgttgaatgactaacagacccataaaagaaattaaatctgagacgaaatccagtattagcacctacaatatctctgacagtgaaacttttaatggtttctctctcctaatgtatttttaaactctctcccaaatacagcgctctcaaaccccaaggataaacgaaaggcataagcagccccgatcctaggaacgtacagccaaaagcagagctacaaatatggactcagacttgagagttttactgagaagtaacttactgtacttgagccaatcataagatttctgtgcactgaatactgtatatgagaaaactgtgggtcataaggtttgccttagggatagttaaaaattagtaatatacagtattattcctatcaaatttttttcttcataagtntatatttataacaaaactataattaaaatatttttt

SEQ ID NO: 321853 - DNA, 907 bp, Homo Sapiens
acttgggttttaattaggtacataaatagcaacatgagaatgaggagttctaaggcttgtacattatctctaggtgaagggattccaggttagtttgcttgtaggatgatttcacagaagataacagaggtctggtctagtttttcctgaagaagaaagccaatttaatacattcaatactgacttctatgccatttttctgtagaaatactgatttattctatggagtttccaatgtttacctataactgattaagatggcagagcatggagttttctacttagttccaggtgaattcttcacatttcctggcttttgaaagttctccttccacaaatcttctatgactatatatcctcgtaaaccccagtcatataatctctccccactgacctgggcaaacacgatggcttgttgtggataatagagggaggcagctaatcccatgaaaccaggcggatacactagcttctttatttttgaacctctagccaaaaggagtccaataaggccagcaaaaccaataacaccaagtctcggaaaaaatccaggaggtgcattttggagatagtcatagctgtctaacccccattgaaccaaactttgcatcttgggcttagtttgggagtacgtttcctgacaccaggttgtgtatggctcgcaatagtgtcggagctgtgagatgctttcttcaagctggctccttgcctcctccacatacttcgattgaccctcaggaactgagtagagtgaaagctcatcaaccttcacggaatttttgggaggtgagtccttttttggtgctgcatagactttgaaggtgagcaagctcaggctggctggccccacggacctctgaattaccttgaacatgtcgctggcagcggaggctccggcagggtcccc

SEQ ID NO: 321854 - DNA, 535 bp, Homo Sapiens
ttaacttgggttttaattaggtacataaatagcaacatgagaatgaggagttctaaggcttgtacattatctctaggtgaagggattccaggttagtttgcttgtaggatgatttcacagaagataacagaggtctggtctagtttttcctgattaagatggcagagcatgaagttttctacttagttccaggtgaattcttcacatttcctggcttttgaaagttctccttccacaaatcttctatgactatatatcctcgtaaaccccagtcatataatctctccccactgacctgggcaaacacgatggcttgttgtggataatagagggaggcagctaatcccatgaaaccaggcggatacactagcttctttatttttgaacctctagccaaaaggagtccaataaggccagcaaaaccaataacaccaagtctcggaaaaaatccaggaggtgcattttggagatagtcatagctgtctaacccccattgaaccaaactttgcatcttgggcttagtttgggagtaccc

SEQ ID NO: 321855 - DNA, 699 bp, Homo Sapiens
aagtataagttttgaagaaagaactgagaatcctaagataatgaagaagtggtaactttcaatacctagtgcctcaaaggcatggcctaagcattgactgactgagagtcacagctccagaaatagaagctgggaattctagaatgtttgaaccagaattttatgaccagaactttaaataaaaagctatgtgtaatagcataaacatgggatgacaatagtttatatctttgagcacatatcaagataaactaattgagatatatacttgaaaatggggaattacaaagacataaaatattagacttgtcagataatctttactgccaagttaatctctgcccagtctcctctgggaggcttatactccagatgggcataggacagtatattaagaggtaaatgccaatactgagcaagcagcaggctcatcacacactatggagttctctgccggagatgccgcttcagagagcaccccagagtggcagggaagaaaactgttaccgtattataatcctgaagtgcctaaaaagttctatcactatgggaattaaagccccctatttataactgagtttgatacctcctaactactatgacattaaaatatattttgtcttataaggttttgaggaattgattttgttcctcgaagcagataaatcaggatttcaagtttctggttcaacagtatca

SEQ ID NO: 321856 - DNA, 1694 bp, Homo Sapiens
  misc_feature (1035)..(1057): n is a, c, g, or t
ccccgctgcttggcgcgtctgggggcgtcccggccccgcacacagtgacgctcagtcctactctcgccgcaaccataagacgctatcccgccacgagcgcgcttgtgaaaggaatacgggcggccgggccgcgcgctcatgtgggcgcctcatccaggccccgtccccggcgccggggccccagcaaaatatcggtagggcttctagcagcaactcgtccagttcggtgcgctggccccacacacccccggaggctactccaccgcgtctccacgaagtgggcgggcgccagacaccccctaattttatttctgtgcgccggcacgcgccgggggcgatcgactccacaggcgcggctcgggtcgcggggtgacaccctacagccggccgcggggggtgggcaaataaagttacgtcgacgcgcgtcgggcccccacacccccattagtgcggggcgggggtgttctctcgcgcgggccggacgcgcccctctagacctcgccacagcctccccccctgtcgccccagagggagataaggggggcgcgcgcgcccaccacaagggcccggtcttcccacctcccgccgaaagcgcatcgcctcccccacccaggcgggcttccgcccccgtcggtcgcgcggccagccccgctttacattcgcggcacctactgcgggcggcggccgctggtggtggggataccccggcgggggggtgacagctgctccggtggcgcatttcgcgtctgagagggcctccccctttgaggaggtcctccgatgcggcacccgcccctggggttcggtcccggggaccactctccatgttcgccgtcccagcgcccacccttatgcgcccgaacccccgggcgcgctgggggaaaagccgacccccccctggcaggcggcccacgggggggtcccaggccgcccggcggccccggaccccctctgagggggggagaagcctgccacaggccggtcgccggccgcccacgttttttcccctgtctccccccccgcctcctttcgtcnnnnnnnnnnnnnnnnnnnnnnncggcggcgaaagtatgcagcatttattacaaagccaagagatacagatgtcccagggcaaaggagggtacagtcacaggacctcagacacaggacaaggtgcaaacacagacaagcccatcagggggctcccaaccccacacacctacgctatgatggaatctcgagtctcgactcccgactcctctcagatctatgcacacttgaggaaatctcggtgggcagcgacctgccagggtctgtccctaaggaggtggtccgctgacctctcaaggggtgggggtggggtcagagcttacaggtttctgtcttcttgtgcttttagatgcagttgctctgtcctgaccaggtgaccgggcctcagctgggggtggaggggcaattggaaggctgtttgcctctggcaaagtctgggatctgtgcttgtgtgaggttaacccacccccacttccactctaggccccaggtgagactccaccaccagtcctgctagtgagggttccccggtgagggtaaggttggtgggggtgcagcgcttcacaatgctaaagccttagccctcctccaagagctgagacctctcagggcctgaatcttcttttccacaagataaatgatgcaaaggccacacacacagg

SEQ ID NO: 321857 - DNA, 459 bp, Homo Sapiens
tctagatcaattcaaattatttcatttgtctttcattgataaccgaaaatgaaataccctgtttgggagaagcagcatggccccattgaaatgaggctcatctgtggcaattatgaattcccaaattcctgacctcagttctggaattgaagtttcagtatgttttggcctcgggtttcgttatttgcaaaatgagagtttctttgaactgtctcacgtgactattaagcaactatacacaggacatcggttattttagagtgaaagacacagtgctttttccaaattgctctggctaccatatagaaaattgactgaaggagggccaagatggaaacagagagaccagtgaggaggcttctgtggttgtccaggtctgaggtgatggtaacttggactcggatggtggtaatgggaggtagattgatatgataaataaaattgacagaccaagcaaaa

SEQ ID NO: 321858 - DNA, 1285 bp, Homo Sapiens
tttttttaatttttcaaaccatcaacattttatttaataaaagcaactgagacattttctaaagtatacggtatatttgatataaaaattcttcaaaatatgtactatagaaattcttcaaaatatgtactaaaaatacaaagtttgtgaatctaaggtacagaaaacactttatacttcagtcacccaaaacaacagcttgtggtctcctccaattacacacagagggagagttcgatgccaggacagtccagatccaacggctacagaacccatgaggatgggctgagggtgtcctaaatgatgaatttgaaactggcttgccattttgccaggataaccagtggttgcaaacagattttcactaattgtggaccacctgaataagcaggctcgatccatgtgaacaggtctcttattttgaggataactggaccgagtaatatcccaaattaaccaatcatttcctgcaacggctccaactttgaaggtgttttttaagcaccagtgtgctgacattaatggcacttgttctgattcaagagataaaatagcctgttgggccaaaagatcataaaaccggattgttccattcttctctgcaaccattagcttaaaagtctcctcaggatgccagcacacactcatgccaggagaatgaagaacaaaatgagctgtttgcactccttccaagttccaaatcctgcaggtgtgatcgtcactcacacttgcaatttcttggccttctttgggatcaaacaccaaaccattaatgaaatcggtatggccctctaaaaccttatattcatttttatcctgaagatctgaagtaaataatctaattttcatatcagcagctgaagtacaaaatttgattactggaggcaatgaatcaagtctagtctctgggctccaagctatgccatcaaccctgactccatggtgaaatgttcgaagtgttttatactgaatgccttcaacgtctgcttcttcttcctgaaacgtacacgtgccaatgaccacataattattgccaccatatgcaattaggtttcctgaatccccattctcaaagggattaaattctaccacatgcacataatcttcacaatccacagtgtaggcagcatttcttgaggcatcttgcttcatcttgtatgtcaaaattcaagcagttgtgaaaattaaatagccttctactggacaaggtcacgaaacgcagagcgccaggaaccgaccagaggcaggctggtcttccttgggggctgccgcgacgcgctgtccc

SEQ ID NO: 321859 - DNA, 410 bp, Homo Sapiens
  misc_feature (172)..(172): n is a, c, g, or t
  misc_feature (206)..(206): n is a, c, g, or t
gttagaaattacaagtttatttttatattttgaaaaagatataatagaaaacaaaaataaacaaccaggcatatcaatatttgtgacatacacatacacacaaaaatgaatataggaaataacacgaagaaaaagcatagtatgttttgaaaccaacgtggggtatgcaacnagatttttgaatgaaatacaactaaaggttttanagtgtcctatgtaatgttcgagatattacgatcactcttatcctactagcaaaaattagcaaactaggctttaaaacatgattcctgttgttttagcaggatttattttggtaatgatcctgcttccttataaacaactacttatcattgttgaattcttcttgtgttaaggagtacaatgaggccaggcgcagtggctaacac

SEQ ID NO: 321860 - DNA, 480 bp, Homo Sapiens
ttagaaaacaatttttatttaaaaaatcataaaaagtactggaatgaaaatacaggtaaagcatttgaaaattatttttctggcttagactgtttactggctcgattctagctctgtcctggtaaaggcctccagaaccttcacctactattatcaagtctggcctcatagggagggacttttactgtactgaaaggaagccagctgaagccgagatctgaagcgctcagcttccagttcccggaagaaaacatcatcatcattctgtgttatcatgtcctgcagctgctgaatttccttctccatcttagatctcagctccctcttcaccttatgtaatgtctgggcctgagatttctctctggctttaagttcttgatgttcctgtgatatggcttctgccagcaatgaaaactggtccttatagtagttctccatggagtccagttcatcctggtggcgtctcctttgttcatctcg

SEQ ID NO: 321861 - DNA, 819 bp, Homo Sapiens
  misc_feature (23)..(23): n is a, c, g, or t
  misc_feature (36)..(36): n is a, c, g, or t
  misc_feature (46)..(46): n is a, c, g, or t
  misc_feature (63)..(63): n is a, c, g, or t
caatggtctctccctgggaattnacaggctccctanggccccagantctccctgttcccactnactgtttagaactgaacaggaatagtaactaagccctttctagggccccttcctcccccacagagctaagaaccagtgggttttcctttggggagttgataagagctggactgggaccagcggagggggctcaggactttggccttgaatgaaatcattggaggccaaccatgccccagctgcctgtttgtaacggaaaatcatgagtgggaactattgtcttctttggagcccctcaggacaacctcatcctcctggcccggggatgaccctgccttaaggtggcaagttactgttggctccaagtgacagccaggaatgcctggcaaaaagatgatgaaagggtgggtgacaggaacacaatagacaaaggctcagagaggagaaaaagagacacaaagaggcagagtgaggagagaggctgagctcctaatgaggtgagctgtgctaactgaacacagcctggcagtgccctctgcccctagccaggggcactgggaatgttcttcagtaagactgttgccagagcctgggcataaggaggcatcagtcacctacttcagagggatcaaagtggttcagagtctacctttcatggcacctttaatgccctctaagcaaagtggcctaggatgcccagcatgggagacacattgggtggtaaaggctgggatggcttccccttcccaaaagaaattttccaaccctatgtgcaactgctgcctgtacctttttgggatccaggctaggaattga

SEQ ID NO: 321862 - DNA, 1108 bp, Homo Sapiens
  misc_feature (208)..(208): n is a, c, g, or t
gacaatattttttctaaacccggaatcccaaaatttaaaacccccgcagtcccccaggaataaaattccctccaaaagaagccaacttaaccttgtctcggaacccggaaaagggtaaatcgttataaaaggttataactgcatttacagtgcaaactcgtggttcctttctactctcttataaacagaaaatgtcttcagaaacatngcctccctgcatttctttaaaacacctgagaaaggtaaggcttgaggagacacccactcaattccaacaggtctctgatcctgggacatttacaatacatgtgctgctatcaaaggtccaagattttcattatagcattatggtcaaacttgaaactcaaaaaggctctggatgaaaaggggaacttgcaatgtccattacatgccacgggctgtccctcggcatgttctagcaactggtcttcactggagctaggcaagtcatatacagcatctgtttcaaaattatcctgaagtttccgtggatgaagtttcttttcacacttcatcaaagaattctgctgctttgctggctgaagcccatttgttcttttcttttgattaggtgaatcttgatactgttttctgccatttcccctcatactttgattctttccttttaaaaggtcagacatttcagaatgattattatatggcttttgctgcagtggttgcctgtgctttacccactggtcaccaggagaaccgtcaggaaataactgctgactgtggcggaatttggttcgactcaatttttccacagtgggtttagccggcgtgctaccagttgaggaaaatccattgtcactgtctgaggaatcgccaaatcttcgagaaagccagtcccttaatggtctgataaagggaatggccataaaaaatttgttaggtgccaaaccaagtttggatttgggggtcatatcatttctatgacaaggcaatttctcaatagagaaccactcaatgttccgaatttctcttctagtttttgggttaaattttgtgtcttttggaattcctggaatgatgtacaaacgagcaagctggtcattgattcgaagttcaatgtaatcatccttcc

SEQ ID NO: 321863 - DNA, 731 bp, Homo Sapiens
  misc_feature (174)..(240): n is a, c, g, or t
ggcctggatgacagagggaaacccagtctcaaaaagcaggaaaatgtacattcgtttcatctaaatttagatttatagtctgcatattttttaagagtacactataatcacttatagggaggagatggcctggataatttttttaagtctaggatgaaaaaaaatagtagtgtnnnnnnnnnnnnnnnnnnnnnnnnnnnnnnnnnnnnnnnnnnnnnnnnnnnnnnnnnnnnnnnnnnncagattaaaatctctgctctcatagaacttacattccagtggggaagatagacagtaaataagaaaatatgtagtctataaatttaactattaaggtgttaaaaagaactataaagtggaacattttcctgatttggattattttttaaatccttggtgtagtcgaaccaaattccgcccacagtcagcagttatttcctgacggttcctcctggtgaccagtgggtaaagcacaggcaaccactgcagcaaaagccatataataatcattctgaaatgtctgaccttttaaaaggaaaggtgagtgatacacaattacagtcttttcagaaatttagatcatttggctttgaaatttttctcaattggagaattacatcttaatagttacagagagctctgagttactgatcaaagcctgtatgttccttacttatgatttgaagcagggctgaggcttcttaatgtttacagttccggtgtaaatccag

SEQ ID NO: 321864 - DNA, 888 bp, Homo Sapiens
  misc_feature (41)..(79): n is a, c, g, or t
  misc_feature (480)..(488): n is a, c, g, or t
  misc_feature (612)..(612): n is a, c, g, or t
  misc_feature (622)..(734): n is a, c, g, or t
cacctggttttaccgctcccggagaggtatcccccgcgtcnnnnnnnnnnnnnnnnnnnnnnnnnnnnnnnnnnnnnnngggggccttttccgcaacaatttttcgcctatttccgcaaagggttttttgataaaccttcttttgttttataaggaacccttgggggattttctcccagttctcaatcaaaccgggcgaaaattttcaactttttggcccccggggtttgccccatgggacaaatttatttgcacagggcccatgtttttgcgcaccttttccattccagggttacaaattccttatttccggggtttcattagggtcaaaaacccttttaattagaacaaaaagtcgggggagtgcctggtggggggacacagtaattccgcgaggcgcaagtccggttgtaaaaaaacaatgaagcccctcgaaattccttttgaaggtttccaaaccccctcttttcccccgggggnnnnnnnnnggaagaaatgccaaccctttgccgtgacaaaatggcccgagaaccaacctttatcctgttccaattctttttggggcccggcccccaaccttattggtttaaaaagttttgccgagggccaaangagacttccnnnnnnnnnnnnnnnnnnnnnnnnnnnnnnnnnnnnnnnnnnnnnnnnnnnnnnnnnnnnnnnnnnnnnnnnnnnnnnnnnnnnnnnnnnnnnnnnnnnnnnnnnnnnnnnnncaagagcaggtgacgtgtttattgtgggacgcctctttctgggggtcgtgctggctgtgagggaaccctcacaatccccaggtcccagaacagacagatacaagaacttgaatccaaactgcttgcacataaatagaacggaggttggcaaagg

SEQ ID NO: 321865 - DNA, 358 bp, Homo Sapiens
aaaatatgaattacccccatccttaaatgtgagagaaacagggggaaaaggaccaagttaatgcacaagccacaataccacaatggtaatttttccttttcaaaagatattatggaatgtattacctagcagcataaattcccaacaaaaagttgggcacccagatttggttatttagattaaaaatatttattacaggcagatttgcttttccccaggaaaacatatcactggaaacatttggagaatgcaaactgggttaaacctattcccaagtccattatcaagtaaggtatcactaaagaaaaagataggagtttaaaactggggaagcccacacacaatttagacaggggaa

SEQ ID NO: 321866 - DNA, 477 bp, Homo Sapiens
tttttattttgtattggttttatttaaattttacagaaacctgatcagagttaagtatgtaattataagtccagtaacaatttctacaaaaatgcacatacaatgccagaactccttaaaagcaactaatatcatatttgtgttttgcataaaacatgcattaatatgttggccaaaatcagtctctacaagaagagacagtccaatacagtcaataagaaaactagttgtgaacaacaggtaaaaaaagaggtttccagttaatgtgaaagaagggaataggtacctttcataaaacaaggcccttcaggcggctgaggttaactgatcgggtactattgtgctgcacggtaatgtaacacatcacctccaggacttggtcctgattggtcataggaagtaagggactttctggtagttacatcagatatttgagaagattaaaagttttccggacatgatggtatactaatagtg

SEQ ID NO: 321867 - DNA, 2007 bp, Homo Sapiens
  misc_feature (825)..(847): n is a, c, g, or t
  misc_feature (1238)..(1253): n is a, c, g, or t
  misc_feature (1476)..(1476): n is a, c, g, or t
  misc_feature (1555)..(1564): n is a, c, g, or t
  misc_feature (1707)..(1707): n is a, c, g, or t
  misc_feature (1818)..(1818): n is a, c, g, or t
aggtgcagtcatcagttctttaggggctgcaatgttttaaaaaaaataagtcatcagattttaagaaaaaagtgatgatttcttattgatatttttgtaacagaatatagctcttaactgaaaatccagaaccagaaacataaatcttgagtttcttttcatgtacataaaaagcaatagcgttttagtatagatagccctgagccaaaaagtaatagaattttctctagatatttaatacagagagtgtatagactgactctaagttaataatgtgcaaaatatcttaaacatccctccccttattcaacaattatgtatcagtgatcttgaaccattgttttatatttttcacctttgtaacctcatggaaagaggctttacatactttctatgtactatttacttagaagggagcccccttccagtcatgaaacttcatttgttttatccatatccctgaggactgtgtagactttatgtcagttctgtgtagactttatgtcagtttttgtcattatttgaaaatctattctgacaactttttaattcctttgatcttataagttaaagctgtaacaactgaaattgcatggatcaagtaagcatagttttatccagggagaaaaataaaaggaagccatagaattgctctggtcaaaaccaagcacaccatagccttaactgaatatttaggaaatctgcctaatctgcttatatttggtgtttggttttttgactgttgggctttgggaagatgttatttatgaccaatatctgccagtaacgctgtttatctcacttgctttgaaagccaatgggggnnnnnnnnnnnnnnnnnnnnnnngattgataaagtagatgattttgtttgtatccctacccatctcctggcagccctactgagtgaaattgggatacatttggctgtcagaaattataccgagtctactgggtataacatgtctcacttggaaagctagtacttttaaatgggtgccaaaggtcaactgtaatgagataattatccctgcctgtgtccatgtcagactttgagctgatcctgaataataaagccttttaccttcacacccggcagccggcacgggggactcgaatcgatctccccacgataccccggatcggaagacccccgcgtcccgcggcccgtgaccaagcgccgccaatgaaccccggttcccgcccaccgcgcgcgggcccgccggagccccgcgggnnnnnnnnnnnnnnnnaccagtggccccgcgtggccgcctataggagcgtccttggcgccgctttgcagccccaacctgggctcccaccgggtgcgcccgcccgcgtctgtgtggagcttctcccccgcctgtgcgccggcccatggaagcgtcccgctgcgcggcgccccggtagttcgacggaggcgcactctagagcacgaccctcgctcctcgcccccgccgggcgtgtaatgangatgaaggcccttcgctcagccgcgagtgggccccgccgcccttatactcgaagccccccacgcacacctacatcctannnnnnnnnnttcccctaaaaccgcggtccggaataatacctgccgtcggtcggggtttgacgcgcccgccccgtctcgtcatcggggtgagaatgggccggcctgattctctagagccggtccgagcgtatcttatgatactcccgccgccncttacgccgccgctttagccgccggccgcctcaacacgtccccgcccctcaacttctctgtttgacgcgcacgacgcgccggtggctggtaatgcagaagaggcttgttgngttggaatccgccgtacgcgcgcccgacagaggtagagccgagcgcagaagagagagcttaaaaatgtgcgcgggcacgcacaacgcacgtacatgatactgtgacgtccgtgtgaagtccggcccccctcgccgcttagccattggcgctgccgacgcaccccgcgccatatctacatatcgcgcccc

SEQ ID NO: 321868 - DNA, 580 bp, Homo Sapiens
  misc_feature (14)..(14): n is a, c, g, or t
  misc_feature (31)..(31): n is a, c, g, or t
  misc_feature (64)..(64): n is a, c, g, or t
  misc_feature (79)..(79): n is a, c, g, or t
  misc_feature (109)..(109): n is a, c, g, or t
  misc_feature (216)..(216): n is a, c, g, or t
  misc_feature (391)..(405): n is a, c, g, or t
aatggaacggatgnttttatgcccacctaanggcctatatcctacatccttgatggcttttagnaaataaaatcatgantcccaagtctgaattacatgatgagatggntcactagagctgcaaatatacaagtttgtatttaaaacaaaaataccgaagccattttactgaaaactagttttattttaaaattaaaggcatagcactcatctaantccattggtgtagactttagcaccatacttgctatttgcaattaatgtcgtaacacagatacattttggtttgcagtctgtacttgagtagtgtttatttagtggactttggtaaagcccttcatacatattaatctcttcacagtacacatttaatgatggtccagtattctcnnnnnnnnnnnnnnngcctactttaaagactaatcaataaattaaacaaaacaaaacccacacaatgttcccccaccccccaaagctagcagttgtgagttgtatttatattgaaacctaatgttttaaaaatagttctggttctccaaccaccccatcccaccccgggtatgcagcaatagtaatcaat

SEQ ID NO: 321869 - DNA, 691 bp, Homo Sapiens
  misc_feature (159)..(159): n is a, c, g, or t
  misc_feature (188)..(272): n is a, c, g, or t
  misc_feature (274)..(274): n is a, c, g, or t
  misc_feature (279)..(285): n is a, c, g, or t
gggggggaattcccacccccttggtttgggccccggttttccctggagaaccaagttttaccccattttcctttcccctttggggggcccgggggccccacagaaattgtttttgaaaaatttttttgaggggcggagggggcccgccaaagaattttnttattttgtttaggttaggggggaaatgnnnnnnnnnnnnnnnnnnnnnnnnnnnnnnnnnnnnnnnnnnnnnnnnnnnnnnnnnnnnnnnnnnnnnnnnnnnnnnnnnnnnntnttttnnnnnnntttttttggttctgaaagacctttactggatggttccttccagagtggggtatgggatacacacacactgcggccaggcattacgccagctcccggatgcctcagcctcgtgaattcggggtaggacgctcagggcccatggtcagcacagcgggtgggtgggttccagcgtggtcacttctccaggggtgcataattgagcagcttctcgatcaggtccacgtgggccagcagcatccggcggcagcagtagcgcttcaggcccagggcatccagcgcgtccccctcggtgtactcggcctgcagcagccccaggtaagcctcccacttgttgccgacgatcttgccacaagtgaagcagcgtacagggatgatcatggcggcggcgcgtcccagactgcccccc

SEQ ID NO: 321870 - DNA, 518 bp, Homo Sapiens
  misc_feature (485)..(485): n is a, c, g, or t
gatcatagcaggaaccagtttattggttgaggtggtggggaacaggggggttggaggcacaccatgaggagcgagggctcaggtctccccagggccctggaaatccatgccctccaccaagtcctgcaggtaggccttgtactcggtcggaggtgagggagagtgggtggctgttggaaatgtgcaggtccacagtattctccagggaggaggcaccccctacccgggccatttctaccaaggccctgaggcacgtgggcacaaccttgaccatcacgagcctcttggtccacggctggtcctggggccatgactcccccacacagaaccagagggcatagcgtggtgagcgtccgcttccttccgtgaaggtaatcagatctacaatgaagggccccaggtcaaacacgcctccttccttgtccttggggacctcggcatcaagcccatgcccgctttttggggagcaactcctcgctcattgnccagtatgtgtgggaagtgcccaagcccgctgg

SEQ ID NO: 321871 - DNA, 580 bp, Homo Sapiens
  misc_feature (77)..(108): n is a, c, g, or t
  misc_feature (160)..(205): n is a, c, g, or t
ctcaagttttagctgccattgtgaggccatggctgtggctcccaggagtcaagatcacagactgctcagccctgacnnnnnnnnnnnnnnnnnnnnnnnnnnnnnnnnaaaactacaactcccagcagccctaggcctatggttcagttacagcaggggnnnnnnnnnnnnnnnnnnnnnnnnnnnnnnnnnnnnnnnnnnnnnnaaaactacaactcccagcagccctaggcctatggttcatcctaggttacagcaggggctgcaagggagttgtagtcctccaagccctgactcctaccttggtggacagtggctggggttttttccctgactcctgtccccacttcccctgcaggttgtgcccacgtgcctcagggccttggtagaaatggcccgggtagggggtgcctcctccctggagaatactgtggacctgcacatttccaacagccacccactctccctcacctccgaccagtacaaggcctacctgcaggacttggtggagggcatggatttccagggccctggggagacctgagccctcgctcctcatggtgtgcctccaacccccctg

SEQ ID NO: 321872 - DNA, 321 bp, Homo Sapiens
aacaatggtaatatgcaaataacataactgaataatctttttgaatggaagttcttgatctcgatactaagcagattttccttagcatgtctacaggaatttagtgtcaggtcagagttatggtttcaaaaaattaggatttctgtaaacaaaggcctgcacttaaaccttaaaatttattgactgacatgagtggtataactagtgtatatatcaagagttaacatttttaaattggtgtgcaagaagcctgattcaaagtagctcacatggtaacatttattgtaatactttgagatatttagtaataaatattacacc

SEQ ID NO: 321873 - DNA, 787 bp, Homo Sapiens
ttttaaagtgacaactagatttaataaattaatatacattttgtttaaagatgtacaatgcacattctgtttaatccaaggttttagggtatcaaggaacttgtatttacacatatacaaatctcagacagcagtaatgtcagaagatccagggagaacagcagaatcttacaccgctgctctctgaatgctgagaacacaagtcaaatacatttaacttaaaaacaacgctgagagatcactgggaaaaatctccaaagagagaagtccacaaaaaaggacatgtaaaggggaaggtcaagttgttgagacaactactttattcttgggatgactgtggaggtggtggagatgagccttgtttgccagatttccgttcgtagttcacgagtcgttgacccacaaggtacttgtcatttttaatatgttcataaaggcgcttaaactggcggacttggaaggacaaaattgccatcaataccacgaccatcagtaaaaatggataaatccgccgatggactaagttttgcatttccgcagtaacacctagtaaaggaacaacaccagaagctatgacataaggtacacacagggaaagcaacagcacagagatcacgggagctgccagtttacgaacaatatagtgaaggtcaatgttccggatgccatttgcgtaaacctgttcaattacagttttcaaccaccactgaggacccatcaatgttatagctgcaatgattttggcatgcaggactccaagtgcccagtcctgccatggataaaaaag

SEQ ID NO: 321874 - DNA, 1334 bp, Homo Sapiens
  misc_feature (76)..(76): n is a, c, g, or t
  misc_feature (107)..(118): n is a, c, g, or t
ttactatttaagaaaaaatatttatttgcaagaaatggaaatacaaaagcataacaatttcaatttattttttttncccaaactaagtacaagtgtcctacaaagcnnnnnnnnnnnnggtatttacttagctatgataaagaataaaaagtcatttaaaaaacgcgataggacagataacagactcacaacgtatttagatttaaacactgctggtctacgtaacctgttacaaaagagagcaaaacctaactgtcagcatagacattaaagctcaccgttgattatagctcagggcctgctcagcattgtttaaaaagggtccactcacagttttgtcaaagagtgctggtgttctctatgaactcataaactgttttatctgaaaaggtgattttcttaagtagtgtaagcccaggggtacatggtgcaaaaaagttccatgtttctcactcagctggtgaagcgaaggaatgggagcagagaacagagcttaaaaccccctggttttcctttccccagatgtaaagcctgctagctggaactcacagaagattggaacaaaaagataggagatggacacctgggggactgctccagcacgaagggaagcgatgagcatcacacagcagggccattgcaggggacaggtgctgtaattcttgcccagagaacttgaaagcttacagtgtgctcacaggaaggaatcggctcagctagtccagaaattgctgcatttcccatattacttagttctttattcatcctgtggtaaagagtcacccttgttttccgtatctataaaactgaaagacttaaaatttacttagcacagcacgcaacaccctagtaaatgctcaagaaatattatttcccttccttctagaaaccaaggctaaataaaacattcctgaattttatgttgtccaaaataacaaaacaaaacaacacctagttttttcctgtgttaagtgctgaccctttgaccacaaaggcatggaacattaatcttcaaatgagccaggttcctttgccctgagaaatgttccgctatgaggatttataatacctttaatcctggctggttgtttttttgatgtgattgcactcctgcaaactgggattttcctaatggacgtaaccctatttcttttctcctgatgtgcaaatctgatagtggctcacttttaggaaaccacttttgagccttcagaaaaaaatttttccccacacccaactcaatctaataataaaagaatatatacaaaatctcccagtgacgagggattcctcagtcatcctggatttacctataaggcacatttaaggcacaa

SEQ ID NO: 321875 - DNA, 507 bp, Homo Sapiens; identical to SEQ ID NO: 123763
  misc_feature (31)..(31): n is a, c, g, or t

SEQ ID NO: 321876 - DNA, 768 bp, Homo Sapiens
  misc_feature (173)..(174): n is a, c, g, or t
  misc_feature (180)..(181): n is a, c, g, or t
  misc_feature (183)..(183): n is a, c, g, or t
  misc_feature (188)..(189): n is a, c, g, or t
gggcggttttttaattgggggagaatccacaggccctagttcaatggccagggttttcctttgggaaacaggttatggcccgtgttcccttacccttctggggcccgggcgcccaaaggaatggttttagaaagctttttcgagggccgaaggcggccgacagtgtttgtttnngggggnngnggggnnggttagtcacacaattttaattgtgaattatagtgaatggtaaacagtaaaagagtaattacatgaaaagctccatattttgcatgtttcaactgttcttcattgtctttacttgtaaggtgttgaaggtgggatccactcctgaatcttctttctagtggtagaataaggtacatattgttctggggtgccagtcacgttgaatttatggttcgtccaaatgaatttacgagcagtaagtggttttgttgttggaggatcatcagtcatactgtgaagccaacgatgccattcaggaggcaccatgcttccatccacatcccagaatgtgtttttgccattcatttcagtagtatatacaacccatcggtgacggccaaaaaattgcttgttgtcttcatagtatttgtttccatatttgtcttcccccactaatgtaccaaccttcgcatcatttgtcctgaaaaaaacccgtagatagcctcggagaccgccgtggccggtgatctgctgcagcccgcgtttcaggacctgcactaactccatcttgcctcgctggccccgcctcccgggtgcccc

SEQ ID NO: 321877 - DNA, 670 bp, Homo Sapiens
gatcgagacgtactttgacttccggttgtatcgcctgtggaagagccgccagcactcgaagctgctggactttgacgacgtcctgtgaggggcagaggcctccgcccagtcaccatcaggccactccctctgcaccgggacctggggctgggccgcctcgtgctccccgggactgtgtggctccggtctcgcctggagccacttcagggcacctcagacgttgctcaggttccccctgtgggttccggtcctcgctgcacccgtagccgcagaggctgcagtccctgggggccgggaggatcccgccctgtggcccgtggatgctcagcggccaggcactgacctgccatgcctcgcctggaggctcagctgtgggcatccctccatggggttcatagaaataagtgcaatttctacacccccgaaacaattcaaagggaagcagcatttcttgttaactagttaagcactatgctgctagttacagtgtaagcaccccggcccagcagcccagcagcccacatgtgttcaagaccctccctgcccaccccctccctgccgtatcgatcaccagcaccagggtggcccgtgtgcgtggggccagcgtcgccgggctgcccagcctggctctgtctacactggccgagtctctgggtctgtctacactggc

SEQ ID NO: 321878 - DNA, 571 bp, Homo Sapiens
agggtccggctggctctgcttgcgggcatcggcctcccgccgccacaggtccctgcgctccaacaagtaatgtggcacatggcccttctgcgtggcattgtagtgctcctgggcctgccgctgctgctctagcacttgtgccaggacctgcagtgagcaggaatgcctccggggggctctcttggcagctcgtgcattgtgacgaatgaagtccacccccaggcctggctccttagcttcgggacctggtggggttggctggggactagatacatggggtggtgggaggccagggccgcagcgggagtgcgcccgcaggaagtgggcagactctgtcccagaggcagggccaggctcctggagctgggccttgacccgggactccaccttgtcgtacttgggtgagcgccacagagctttcaggggcctgggctggccctgctcccggctgcgctcctgttctctgaagcgcttctgaatctccctgatccgcctcaggttctccttctcatggtccttagggtccttcctcttgagagaggccccaggacctagggagatcccctcgagt

SEQ ID NO: 321879 - DNA, 683 bp, Homo Sapiens
tgctcggcccattccctggtcttatccatctccatgcgccgcagctggtgctcccaggtgcccagctcgctgtccacctcctcatcactgtcatagccgtgctggtgctgttggactgccttctcccacagcagctgcatgtcctgcatggcccgcttgtgctgcatgatcatgtcgtacatctgctgcatctcctgctgctccttcagctgcttcttctgggcgtctgaaagctctgtgacgcccactagacccacaggcttccccttctcatagccgagccccttgaggtcctgaactgacagaggcgagggagaggcatccacgtccctctgcaccagtttcagcaggtgggagctctaccttatcctcttcaggcccccaccggctcttccgcttcctcttcacggtggctgcggaggctggcttcccgggggcagctggagcagggatgatagtgggcgcaggcgtggacgaggcggggcaggtggtggctgggggtaaggaccctgacagggcctcaggaggggacttgcgcttcaggccgggatcaggtgctgtgaagctgcctgtggagctggccttggctttccggaactcctccagcttctgtcggtagtacttgtacccttggctattgcgagcgcgtggtcgacatatcccgaaattccggaccggttacc

SEQ ID NO: 321880 - DNA, 1071 bp, Homo Sapiens
cacgaggggacggtttccagctggttttgaagtcgcggccgctgttcctgggacgtccggttgaccgcgcgtctgctgcagagaccatgtctgccgacggggcagaggctgatggcagcacccaggtgacagtggaagaaccggtacagcagcccagtgtggtggaccgtgtggccagcatgcctctgatcagctccacctgcgacatggtgtccgcagcctatgcctccaccaaggagagctacccgcacgtcaagactgtctgcgacgcagcagagaagggagtgaggaccctcacggcggctgctgtcagcggggctcagccgatcctctccaagctggagccccagattgcatcagccagcgaatacgcccacagggggctggacaagttggaggagaacctccccatcctgcagcagcccacggagaaggtcctggcggacaccaaggagcttgtgtcgtctaaggtgtcgggggcccaagagatggtgtctagcgccaaggacaccggtggccacccaattgtcggaggcggtggacgcgacccgcggtgctgtgcatagcggcgtggaccaaaccaagtccgtattgacccgggggcgtccaatcagtcatgggcttcccgcttggggcaaaatggtggctgagtgggggtccaacccggggctgggggaaatccggaagaggggggcgggaaaaaccaccctgccccctttaacgatggccgaaaactgggccccgcatacgcccccatttccctgggatggggctttcaaccgcccccgttcccgggcaacaagggaggcggcgagggaaaaaaagcctacctttcctgaacccttgggggctcccccctggccgaaaaaagccttgggggaacaccccgcccctaaggagaaacccccgcgtggggcaaagcctttccacccccccctaaggcgaaaagggccccacggaaggctccccgcgggccagattggtcaccacgggcccacaaaccgtggatgggaaactgccccaaacccaggggcgctgataacaaaaggacgggcgggagaaggccgcgga

SEQ ID NO: 321881 - DNA, 1021 bp, Homo Sapiens
aggtagcgaggcctgggtggcgaattcggcacgaggggacggtttccaagctggttttgaagtcgcggccgctgttcctgggacgtccggttgaccgcgcgtctgctgcagagaccatgtctgccgacggggcagaggctgatggcagcacccaggtgacagtggaagaaccggtacagcagcccagtgtggtggaccgtgtggccagcatgcctctgatcagctccacctgcgacatggtgtccgcagcctatgcctccaccaaggagagctacccgcacgtcaagactgtctgcgacgcagcagagaagggagtgaggaccctcacggcggctgctgtcagcggggctcagccgatcctctccaagctggagccccagattgcatcagccagcgaatacgcccacagggggctggacaagttggaggagaacctccccatcctgcagcagcccacggagaaggtcctggcggacaccaaggagcttgtgtcgtctaaggtgtcgggggcccaagagatggtgtctagcgccaaggacacggtggccacccaattgtcggaggcggtggacgcgacccgcggtgctgtgcagagcggcgtggacaagacaaagtccgtagtgaccggcggcgtccaatcagtcatgggctcccgcttgggccagatggtgctgagtggggtcgacacggtgctggggaagtcggaggagtgggcggacaaccacctgccccttacggatgccgaactggcccgcatcgccacatccctggatgggcttcgacgtcgcgtccgtgcagcagcagcggcaggaacagagctactttcgtacgtctgggctccccttgtcgaaaaggctgcggcagcacccctatgaccactccctgggcaaagcttcaagccacccagcagaagggcaccagagggctcctgctggagcctggcgccaggccttaaacctggatggaaactggccaaagcaaggggggttataccaaaaccttgtgggaagggccaggaaaa

SEQ ID NO: 321882 - DNA, 957 bp, Homo Sapiens
gctgggtggcgaattcggcacgaggggacggtttccaagctggttttgaagtcgcggccgctgttcctgggacgtccggttgaccgcgcgtctgctgcagagaccatgtctgccgacggggcagaggctgatggcagcacccaggtgacagtggaagaaccggtacagcagcccagtgtggtggaccgtgtggccagcatgcctctgatcagctccacctgcgacatggtgtccgcagcctatgcctccaccaaggagagctacccgcacgtcaagactgtctgcgacgcagcagagaagggagtgaggaccctcacggcggctgctgtcagcggggctcagccgatcctctccaagctggagccccagattgcatcagccagcgaatacgcccacagggggctggacaagttggaggagaacctccccatcctgcagcagcccacggagaaggtcctggcggacaccaaggagcttgtgtcgtctaaggtgtcgggggcccaagagatggtgtctagcgccaaggacacggtggccacccaattgtcggaggcggtggacgcgacccgcggtgctgtgcagagcggcgtggacaagacaaagtccgtagtgaccggcggcgtccaatcagtcatgggctcccgcttgggccagatggtgctgagtggggtcgacacggtggttggggaagtcggaggagtgggcggacaaccacctgcccccttacggatgccgaactggcccgcatcgccacaatccctggatggcttccacgtcgcgtccctgcaacagcagcggcaggaacagagctacttcgtacgtctgggctccctggtcggaaaggctgccgaaccacgcctatgagcactcgctgggcaaagctccaacccccaagcagaggggacaggaggctctgcttgcactggtcccaggccctaaacctggagggccaagtcc

SEQ ID NO: 321883 - DNA, 2852 bp, Homo Sapiens
  misc_feature (868)..(1186): n is a, c, g, or t
ggcgctccccgacgcgcgccgccgtgctcgacgtccactgtctctcactctgcatgcgcccccagctcgtctgtcgcttctgcggtccccgagctttcccttctgtccactatgcctgctcccttcggtctttgaggggctccaatcacgctctcgtcgccggctgcgcccgcgcaagtctacgttcatctgcgtgcccggctgggtcgcgtgtccctcgtctcgtcccccttgccgcacgcggcttccctccgtcggtgtggggttggttgtgttgtgtgagttgggtgcctgttctcagtgtatttcattcgtgatctggctcccgtggtgcttaaataatcttttgttgtcgatgtcgtcgatgtggtctccccgtgtttagcctggtgatctttctcgccacgcggtgtgccgggtcgttattgtgtgcgctgcttttgtgtgtgtaccaccggttggtgtggaccacgctgtgtgtcacacggtgttattaacttgtttcgccgtctgggtggctgtttcaaacttcgtcgttgtaggctgtatgtctgtctggcctcacattgataggttcaaccacctcacccgcgttggttatggggtttccctgttgtgcacgtagtgttctcctccatagcgttgtcacgctgttgttcccccggttcactggatgtgtgtttgtaaaacgtcttgggtgcctctgtgcctatggcgttttatatattccgcagcttcccttataggggggccacactttgggaaccacgtaaacctggggtatccgcgttatcctatggggccccctctcgcaggggaaactcttctgttcgtgtctcccctctttttgttgttctgtcgtttttgnnnnnnnnnnnnnnnnnnnnnnnnnnnnnnnnnnnnnnnnnnnnnnnnnnnnnnnnnnnnnnnnnnnnnnnnnnnnnnnnnnnnnnnnnnnnnnnnnnnnnnnnnnnnnnnnnnnnnnnnnnnnnnnnnnnnnnnnnnnnnnnnnnnnnnnnnnnnnnnnnnnnnnnnnnnnnnnnnnnnnnnnnnnnnnnnnnnnnnnnnnnnnnnnnnnnnnnnnnnnnnnnnnnnnnnnnnnnnnnnnnnnnnnnnnnnnnnnnnnnnnnnnnnnnnnnnnnnnnnnnnnnnnnnnnnnnnnnnnnnnnnnnnnnnnnnnnnnnnnaaaaaaattctgcaggggagaactttcctgaaagatattttttctggacatctctctctactgactgatagggtgaggctcagaacaggcttcttccaagctcagagaggctgagagatgggtcaactgggtgatgcccgttttgagagccttagcttcccaagtggacagcacagaagagctgggaggagtggctagaaaataagtttgaaatgagcccctgggttgaggactccagagccacagctgcattatagagacggggcccgctgagtcctctcctctcccccttacttcttctcctccggggctttctcagtgattccaggggcaaagggttcccacgagccacgtgacaggtgtgttctgggccacatattccaccatgtggtccagggcctcgcgggcgctggcgacacgctcacggctctgggccagaatgctgctggacaggtcctggaaggagtggatgctggaaaacgtggcctggaggtcctccacctggcggcgggcctgctgcacctggtccttcacattggtggggaggccctgaatgctggaccccagggaggtacaggtggcctgcagttgctgggcaatgtcccggaacatggtgagcgcccgggactcgacctgctctggcttgggcggctccttctcggggccctggagctgcttctggttccagctgagccacatctggtgcagcttctcctggccttccaccagcttctgatcaacgccttgcttgacagtttccatcaggcttagggcctgcgacagctgcagcagagcctcctgtgccctctgcttggtggctcgaagcttgcccagcgagtgctcataggcgtgctgccgcagcctctccgacagggagcccagacgtacgaagtagctctgttcctgccgctgctgctgcacggacgcgacgtcgaagccatccagggatgtggcgatgcgggccagttcggcatccgtaaggggcaggtggttgtccgcccactcctccgacttccccagcaccgtgtcgaccccactcagcaccatctggcccaagcgggagcccatgactgattggacgccgccggtcactacggactttgtcttgtccacgccgctctgcacagcaccgcgggtcgcgtccaccgcctccgacaattgggtggccaccgtgtccttggcgctagacaccatctcttgggcccccgacaccttagacgacacaagctccttggtgtccgccaggaccttctccgtgggctgctgcaggatggggaggttctcctccaacttgtccagccccctgtgggcgtattcgctggctgatgcaatctggggctccagcttggagaggatcggctgagccccgctgacagcagccgccgtgagggtcctcactcccttctctgctgcgtcgcagacagtcttgacgtgcgggtagctctccttggtggaggcataggctgcggacaccatgtcgcaggtggagctgatcagaggcatgctggccacacggtccaccacactgggctgctgtaccggttcttccactgtcacctgggtgctgccatcagcctctgccccgtcggcagacatggtctctgcagcagacgcgcggtcaaccggacgtccccctcgtgccgaattcgccacccaggcctcgctc

SEQ ID NO: 321884 - DNA, 767 bp, Homo Sapiens
gaggaaggggaagctccccagtgggggtccgggagttgcagtggagcaggggttctgcaggccactgtagaggcttctggaggtgtttagtccccctcggggcccagccaggccaccaggcaggtctgacctccgcccttccgtcggcaggtacagtgggggtggtgtcttgctggtgaggtggcttggtgagaagagagggtgcaccaggcctgggggcccggctttgggggctgctggtcggaagggagatgggcggctctgggcgggcagtgcttccccaagcccactggggtcacagcctggtggcggtaaggccccgtataccacatctgggctgggcatagcaggagctgcaggatacagccggggtcggggcaaggccggatcacccccttcgcctgccagcctccgaaacttctctcctggctcctcaggcccttcatccggctccagctctggcccatcgaggccaatgcccctccgcttcagcgtctcgaggatgtcagtgttggtgcggctctcgtggggctcgctgtactctgtgtacttcagcagcacacggtccatgtccgtgctggcatactggaagaggcggttggcgctgttgaagatgatgagggctatctcacagtcacagagcacgctcagctcataggccttcttcatcagcccgaacttccgcttggtgaacgtcacctgccgattcctttggtccaggatgcgggagatctggatttttttcctccccatcgtcccaggctgag

SEQ ID NO: 321885 - DNA, 424 bp, Homo Sapiens
  misc_feature (153)..(183): n is a, c, g, or t
ttagccaggtgtggtggcacacacctgtggtcttagctactcaggaggccgaagcagaaggatcttgagcccaggagttccaggctgcagtgagctatggtcatgtcactgctgcactctagcctgggcaacacagcaagaccctatctcttnnnnnnnnnnnnnnnnnnnnnnnnnnnnnnnctattttaattggggagagttaagtctgagagctgattttgtctacttctcagcatcagtttgaggtctcctttcattttatttcaaatggaaatagataaccaggtatattaaaagcaaaaggtagtaaactatgtccgtattattcacacttggaagttttcaacattaaaaaataactgaccatttgcttaatgctatattacttaaagccaccaagcctgtggtaagttgctgctta

SEQ ID NO: 321886 - DNA, 1153 bp, Homo Sapiens
cctttatttattttcttgttgatcctctgatgctcgttttttgcctgttgattgttcttttttccattttgttttgatgttttatctcctattcgtattgactcttgttattttagcgctagtaacatcagttttattgggatctggcggtggcaaccatagcctggctgcggggtcggggctggccctcacaggttgttgagttccagcagggtctggtccaaggtctggtgaatctcgacgttctcctccttggcactggccaaggtctcttctaggtcatcgatggttttctccaactttgccacagacctctcggcaaactctgctcgggtctcagcctccttcagcttctcctccaacagtttgatctcctcttcatatttatcttctttggtggaatactcctcctctgaggccatcagggacttgagggcctggtccatggttcgaagttcctcctccagctgtctggctcggctctcggccacctcagccctctcctccgagcgctccagctctccttccaggatcaccagcttcctggccacctcttcatatttgcggtctgaatcctcagcgatgtgcttggcctccttcagctgcatctcctgcagttccatcttctcctcatccttcatggcccggttttcgatgaccttcattcctctctcgctctcatcagccgccttctcggcctcctccagcttctgcagggctgtagccaggcgctcctgggcccggtccagctcctcctcaaccagctgaatgcggcggttcagggaggccacatctgcctcagcatcagtggccttcttctcggcctgctccagtttctcctgggcctccttcacggattcagaatacttttccacctcatcctctgtccccttcagcttcttctggagggcctgctgctcctcctccagctgcttgcagcggtcctcagcttgcttcttgtcggcttcggcctgctcggcgcggtcgatggcgttctccttgtccagcttcagcatctgcatcttcttcttgatggcgtccatggctgcggtggggggtgggccggccggcaggcggtgaggaccggacggactgggctgggtgagcggactgggtgcaccggtggcaggcgaggaggacggagcgggactgg

SEQ ID NO: 321887 - DNA, 676 bp, Homo Sapiens
cattaaccactgactctacattctcagataagtcacttaggggacaagatacaggttggtacactttgctttcagatgttaaacatgtaggaaaatcatttggaagatgaactgtacatacatctgtctttacctctgattgtgaaagtccagatatctggtcttgcttttccaatggatcacctcctttttcaagaatattttcagaaatctcactttccaaacacaaaacattagcctctatacctgtattctcgagttttttaacttccccttcgtcaccaactagcacaggaagatcttgagcacaagactcagaagatgaagatcctactctttcctctgtatcataatttgcagtatgcttctcactttcttctatttgctcattgcaacttttcaagcaattagcagactggttttctacatgagtctgcacagtacaaatgttactactgtctacatctggttggtgctctttttctaacacaggtgatgtgtcagattctgctgtttcttcatctactgaatcattggaagatgatttttcaggggcagctacagagctccgaagtttctttttcagtaaaggtggttttcttcctcttcttacagacttccgttttggagcctgtcttgtttgcttttctgactcagctgaagagggaacacttaa

SEQ ID NO: 321888 - DNA, 821 bp, Homo Sapiens
tgagttcttaaagactgaagacaggctattctctggtgcagatggccagcctgctataccaccaccgctttctgataccaccaagcccaagtcctccttgcctgccgtgagcgatgcccgtagcgacctgctttcagccatccgtcaaggttttcagctgcgcagggttgaggagcagcgggaacaagagaagcgggatgttgtgggcaatgacgtggccaccatcttgtctcgtcgcattgctgttgagtacagtgactcagaagatgactcctctgaatttgatgaggacgactggtccgattaactctttctgcctgctgcccaccttctttttctttccttcctacctgccttctttgatgccaaccccaacagacccgtagggggagaaaagggaggaaaaaagtaattttaaggggccaaagctttccctgaagcaaccaaagatatatccaagtgcttcctccaagtcaacatgtatttcctctccccattttcaggccctgtggggctcctgaggttcagtagctgggatgttccctctttccttcaagtgcctgttgcatattgaacaggaaggagaaatccccaaagacagattccttttgatcgggtttctgttggagatggggcttcccttaggagcccatattcaactacagccttctaaaacctgtgccctcagccacttcgaatgccaggcaccttctggttctaaaacggggaagtggtctgaatgaaccacagctgaccccttatcccgcgcactgaaaggggcagaagtaggacgaaaggtccaaggggcagactgactcacc

SEQ ID NO: 321889 - DNA, 1001 bp, Homo Sapiens
  misc_feature (282)..(303): n is a, c, g, or t
  misc_feature (332)..(332): n is a, c, g, or t
  misc_feature (336)..(336): n is a, c, g, or t
  misc_feature (338)..(338): n is a, c, g, or t
  misc_feature (340)..(340): n is a, c, g, or t
  misc_feature (342)..(343): n is a, c, g, or t
  misc_feature (618)..(704): n is a, c, g, or t
gggctacggcccgaggcgcgggggaatttcgggttgacgcgggcgtcgcctcggctctttcgtgagcacggtatagaggggcgcggcgcgggaagaagagacgaacgcctgctgcggcacaacaaggcgcggtgcgagacagcggccgcgccaccagacacggggtgcggcgcgaagaggggggccggggcgcgtaaagacggggcgggcgaaaggggaagggacggccggcggcccggcgagaagcggcggcccgggaggcgcgcggaaaacccccagtcnnnnnnnnnnnnnnnnnnnnnncgcggaaccgcacggcgagggcgcggganaacncncngnncgggggaggagggggaggccgggccggaggctcgtcgtcctcagggagcttggagggcgagactgcggcagcagacagcggggatggcgcgggcacggtcgacgacaccgggctcgggtcccaagacggctgccgctccggggcgacggggggagcggccggcaggggtccccggggcgccggcggcacgaagtcatttccgaagtccatcaggggcgcgccggcggcaggggcggtgggcactggggccgcggacagcccggcggcgggcttcnnnnnnnnnnnnnnnnnnnnnnnnnnnnnnnnnnnnnnnnnnnnnnnnnnnnnnnnnnnnnnnnnnnnnnnnnnnnnnnnnnnnnnnacgaactggtacttgaacgcgggctgcggccggggtgggctgtccgaggacgagaccagaggagactggtccaggtcttccatggctggagggtggagatgatgctgcagctgctgccgccgccgccggggccgcgtctcagagccgcgggcggttgtgggggttggggaggactgagaggggctgggccgactgagccgagggacctactgtggtgacggctcccggaacaatgagactgctcctcctgcctccgcgccggtgatgcgcccctcgtgccgaattcgccacccaggc

SEQ ID NO: 321890 - DNA, 1199 bp, Homo Sapiens
  misc_feature (273)..(334): n is a, c, g, or t
  misc_feature (432)..(523): n is a, c, g, or t
  misc_feature (820)..(896): n is a, c, g, or t
ggctgttgttgttgtctgcgcgcgtgtgtgtgttggtcgttgggctgtcggtgcgtggggtctggggcgtcgtggtgtgtggtcgcggtcggttgtttgtctttcatgcttgttgtctgtgtgttggtggttggcggcggggcctgtcgttcgagttctctgtgtgcttgcgtttgttgttgtcgttggtggccgctgttgagttgcgtgtgtttcgcgccctgagtttgttgtgtgtcgttggagttgagccttccttcttttcttgtgtannnnnnnnnnnnnnnnnnnnnnnnnnnnnnnnnnnnnnnnnnnnnnnnnnnnnnnnnnnnnngtcttcgctggcggtgctcgctctctgttcttctgttgcgcggttcgtgtggtctgttggtgtgcatgcttggcgtgggctgtgggccttggttttgnnnnnnnnnnnnnnnnnnnnnnnnnnnnnnnnnnnnnnnnnnnnnnnnnnnnnnnnnnnnnnnnnnnnnnnnnnnnnnnnnnnnnnnnnnnncgtgttgtgcgtattgtgttagttcctgggcccggagggtctcggtcgtcctcagggagcttggagggcgagactgcggcagcagacagcggggatggcgcgggcacggtcgacgacaccgggctcgggtcccaagacggctgccgctcccggggcgacggggggagcggccggcaggggtccccggggcgccggcggcacgaagtcatttccgaagtccatcaggggcgcgccggcggcaggggcggtgggcactgggtccgcggacagcccggcggcgggcttcctctccagcannnnnnnnnnnnnnnnnnnnnnnnnnnnnnnnnnnnnnnnnnnnnnnnnnnnnnnnnnnnnnnnnnnnnnnnnnnnnacgaactggtacttgaacgcgggctgcggccggggtgggctgtccgaggacgagaccagaggagactggtccaggtcttccatggctggagggtggagatgatgctgcagctgctgccgccgccgccggggccgcgtctcagagccgcgggcggttgtgggggttggggaggactgagaggggctgggccgactgagccgagggacctactgtggtgacggctccccgtacgcgtgggtcgacgatatccctgagaattccgaccggaccagcctgctttaagcgactgtctatagacatgcc

SEQ ID NO: 321891 - DNA, 608 bp, Homo Sapiens
ccatgctggggtgttaaaggactgattttacccgtagggaatgggaaataagaagctattccttgtaagtttgctaatcttatctgttccagaattattaaaagttctctgtcaaagacttaggcaagggcagatttcaatccccccaggcttgctagtcctactctttgtgccattcttcaagacaggaaggcaagtgctttccattctccttggaaaaactgaggctgaatatgcagcttgtcatgcagttttgctgaagacagagagagggtcaaaaattcaaaaactcaattgctctagggcagggggttgggagcaaagccaataaataaaatgggtggtataaatgcctttcaggaaagggtgtgaagggtggggtggatttaccagaagctttggcagtcagctttgaagtcttctggaaaggaaagtgtagcctcccaggcaagcagcctcatgacatcttccataaggctgatgtgttgggaaacagcaacacatgagcaagaagttccttgaaaaattttcttccctccttcttcttctggaactgttgggaaactagattagacccaggagtctggtttttgagaatggccctgaat

SEQ ID NO: 321892 - DNA, 1435 bp, Homo Sapiens
tttttggagtccaagtctcttatctttattttaacagactggcagcatcaggtcgcagcagcagtacagggttcctggctgggcagcacaggcctggggcgacagctcctgtcttgtctgcccagggcagtgtcaacttaggcctctactccatggctgtgaaaggacagcagcctcaaggcagtctagctcctgggcacaggcagccaaaccccctcccatatccagctaaaccagctccaggaaaggagaaggtcctgtttccccggcatccttggggcccagggactggttctttcaccggatgatcttgcctggttgaaccacagcagcatttgggctttttcatcctttcctacatcaagaactttcccaaatgtgggccctggggccctagcaaaacagtggccttggccacaggctctgggcctctgggaggctcccatctggcattcaggtggcggcacagagcagggctgtcagcacgggcagagagctgggcacaaagagtagccagacggcagggcgtgccacagggctccgagggtgggtggcccttatggtagagaaaccagaaggtctggaaaagttgcatgtcgccccgcatgcgatataccaggttgtgccaggcggtaggcagtgtgttgggcagcccataggtttctcgagccctgtagagaagctgccagtgcggtatggctcccggtatgtttgcctgggtcagattcaggatgtaggtctcatggtccaggaccacgtgagagctcccggagtagtttccatctatttggtacacacggtaaccaggattaaggccgatgtaggtagttgcactgggtgccaggaaggctacagccagcggccggctcagagtctcttcatcatagaagacctcaaattcatccacatgagtgtggccaaagaactgagcagccagggtgttctcatacctggctacaattcggtaataattccagctccagctcttcagacagtgccctgggggaatgtggccaattatatgcactttgtctcctcgatcctcagcagcctgaagctcccccaccagccactggagctgtcctgcgggatccgtggagttgatcaagagccagaagttctcacgggaacaaaaattcatattgagagagatgaggcggagaccggggtatggggaaagagcatagaaccccccaattctgagggtgcgcagggcttcggcaggcagccagggctcccaagccttggccatcgcttcatagagccagcgggaggagtggttgccctcaatgaaggggggagggaagctattgacaggtgtgctttcatggttacccacagcagggtacacctggcactggccccaggaacttcctcacaagtgctgtgacggcgacgcgtgggtcgacgatatcccgaattccggaccggtacc

SEQ ID NO: 321893 - DNA, 1309 bp, Homo Sapiens
  misc_feature (416)..(428): n is a, c, g, or t
  misc_feature (586)..(645): n is a, c, g, or t
  misc_feature (683)..(695): n is a, c, g, or t
  misc_feature (707)..(852): n is a, c, g, or t
cccgcgggggtttcgggagcgtgtttttctcccgggtgtgggtacagaaagagattggtgttttgttggttagtaaaccacccgctgggttgtttgttgacgaagtgttttgtggaggataaaggtttttcttgtttaaccatatattgggggggagggttgtctccctctccttgggtaatgacaattaggccgccgatgggggaggggtatgtgtttctgtacccggggtgtgggcgtgcggcggcaaataagttaattttttgagggggctcacatctgttttgggggggagagtggtttttgtcatggtgttccccccctccccgtggtaggagggtatgggcgtggtggggccggagtttttatataaaagagatttctcgccgctggtttttgtttcgaggaggcccgannnnnnnnnnnnnagcataccatcttctttcgggtagtgtttgtgatcgccccgcctgggtgggggcccccgggggggtttcttttgttgtgggcgctgccagttttttttcgtaccgccccggtgtttccccccgggaggtgttttatttgggggggatccgccccgttnnnnnnnnnnnnnnnnnnnnnnnnnnnnnnnnnnnnnnnnnnnnnnnnnnnnnnnnnnnncccgggcccccacggggaaggttttataaatttttgannnnnnnnnnnnnccccgcgagggnnnnnnnnnnnnnnnnnnnnnnnnnnnnnnnnnnnnnnnnnnnnnnnnnnnnnnnnnnnnnnnnnnnnnnnnnnnnnnnnnnnnnnnnnnnnnnnnnnnnnnnnnnnnnnnnnnnnnnnnnnnnnnnnnnnnnnnnnnnnnnnnnngacaaaaaaaaattttattgccataaattaatccagtaggtatatttgagaaagcacgcatcagttggttagggcaataagcgcctctaccacgttgcccatgtgttcccgcaaactgcgttctgctgctgctcgagatatctccatctcagtcattattagctccagatcttccttcttgatagtgacttttgccagttctttctcccgctcctgtttggctttctgctcccgggaccttctgtctccaatcacagacatggccgtctccagattggaactctggatctccttctcctctgcatagtcggtgacccgctccaagtccgccgcaccgctgtcatgtttccgtggcttctccggaggccgctctggtccactggtctcagtctccaactccagctccacatccccctcggtcgccatatctatttcaccacgccgccgcataagcccc

SEQ ID NO: 321894 - DNA, 248 bp, Homo Sapiens
  misc_feature (159)..(178): n is a, c, g, or t
aaaaatgtatatgctcaataacagtttacttggaaattttcactagaagaaataacatgaaagaacaccagcataaatacataatacatactttaattgtggctatattaaatgtatcttaatgtaataccgctgtaacatggtatcatctcattgttnnnnnnnnnnnnnnnnnnnngaacatagggaagtgaaactaaaaaactatagaatcctggattctgtggcagatggagtacccttattaa

SEQ ID NO: 321895 - DNA, 669 bp, Homo Sapiens
  misc_feature (405)..(415): n is a, c, g, or t
ttaaaggtgggttttggggatgtttaccctatttttttttatttggatgccctaaggcatataaagcgcatagtgaattacctactggaatgtaaatggttctaaaattaaaactgttaaaatagaaagagggaaaaggaaggcccaagaactcttaaagagaggctgagaacaagaacaaaaaaacccagaagtgtaggtaatacgtaacagcgcagacagaaccgttgtaggccatgtataataaataatgcatgccccaaatttcagttaatcatataatttcaacttgagttctaatactggaaccagccaaccacttgggcttcaacactgtactagatgtcagtagaatcgcttgatggaattacagccttgttacagttgagatcaagagagggtgcnnnnnnnnnnnccttcttttattaaagctatcattccaggctttgatcaaagatccaagaatatttgttctaccaggctggaatgaatgtggtttggaagttcagagtacatttaaaagctgcaacaaaatataggtagccaacaatctcagaattttggatcagcccagatggagatagcaatttgaaatgtcttcgatcccttacttaaatgacgaaatgtctatcagcccagatagagcaatttgaaatgttttcgatcccc

SEQ ID NO: 321896 - DNA, 587 bp, Homo Sapiens
ggtttggtaagaagccttggctttattcgctctgtggggacactgttccgttcagaggcccctcccagccatggggtgggggacagtggtgggcgtgggaatcccagcgagcatcctggagggtgcgtcgtctccatgtattttgctcttccccatcttttccatggggtcccctgccagggtcaagcactaatatgtggtgaaggcagcaaacagcgtcggcgtccctttaggggtggggagagggctgtagcaccaagaaccccctcccccgcccacgacatccctgaaaaggagactaaaataaagccccggggcctttctacgtaggggctccacttaaatatggaatggtggtaggcagagaggcggtggcccagcaatccttaagtccagattaccagctgtggggaggcttccagggggccaggagcaggctgggcagttccagccacagacacgtgggtggaggacggaaatatctccaagggggcacagtatcagaggagcaggatggaaggggcttttctgcctgctacgggatcctttttaaagaaatgggtgtgaagccgggcacggtggctcat

SEQ ID NO: 321897 - DNA, 554 bp, Homo Sapiens
catatcctttaatgaattgcaaatatattaacagaaaagactttccccctcaacactgtacaatttctgaaataagtcagttaaagcaaaaagaagacacaaaattacattgtttcaatgcaaacagaacacacacttcatacccacacttgcattttcccaggttttcacaaagaaaatgggtcaccatatttctcagtgaagactcatactatactctggctaatcagagacttccaaacttttttcttcaaaaagagcatttttaatagactaaatactggttatcactgagtttttgtttaaggtacaacagcagcatggttcaaatgttacttgtagttctcggaaaaattaaaaattttaagtgatgaatacagaaaatgtagggaccacctttcattcttttgagtaccactgttctcttgaaaaaatattctaaccttctaaaatcccagagttaagaaccatttccaaggggaaaaacaaatccaaggccacaacataacttctgaacaagtgtgtgcgcgtatatatatatgtatatagatgta

SEQ ID NO: 321898 - DNA, 929 bp, Homo Sapiens
gaggcctgggtggcgaattcggcacgaggcaggagatcactgccgcccttgcccttgcccagatggtcccgacagtggacgccagtttgccaggagctgctaccaagatcctgttactttacagcttgcctgtgtttgtgatcctggatacattggttccagatgtgacgactgtgcctcaggatactttggcaatccatcagaagttggggggtcgtgtcagccttgccagtgtcacaacaacattgacacgacagacccagaagcctgtgacaaggagactgggaggtgtctcaagtgcctgtaccacacggaaggggaacactgtcagttctgccggtttggatactatggtgatgccctccggcaggactgtcgaaagtgtgtctgtaattacctgggcaccgtgcaagagcactgtaacggctctgactgccagtgcgacaaagccactggtcagtgcttgtgtcttcctaatgtgatcgggcagaactgtgaccgctgtgcgcccaatacctggcagctggccagtggcactggctgttgacccatgcaactgcaatgctgctcattccttcgggccatcttgcaatgagttcacggcgggcagtgccagtgcatgccatgggtttggagcgccgcacctgcagcgaagtgccaggaactcttcatggggaagaccccgaacgatggaagtgccgagcctgtgactgtgaccccaggggccttgagacggaccacagaaggtggaccaagtccacaggtggcccactgttgtattgcgatcgaggcgtgttgaaggctctcacgctgcggaaccagatgaccgactaggtgatactcgggggagtcatataccatgatttgcaacaccctgagggcaggtgactttgaacacaatgcgaattcgatcttcgccaagtgtaaca

SEQ ID NO: 321899 - DNA, 548 bp, Homo Sapiens
tgtagaggacggcgccactgcgcccgaagcagtttttactccctccatcttctccactgaaaccctggtaccgcgacaggaccgacgacagggacttgacttgctggtcaactctcagaatgacgtgtccaccgttgcctccgtcccctccatcagggcctccaaactccttgcggggctcactgtggaagcagcttgccccagcgcctccgtttcctccacagacaagcactctccgatagtccacaaagtaccttttcagctttttctcagagagcagcttcttccccgggagttcctgatgcttggcgaggtccgcacggccgaccgagagcagcctgggagaagcccgctgtggcagtagccggctgggcttcaggccagcccatgtggacaaagcccaatgccccacgccctgaaacacggtcctcaatcttgctgagaaacaccttgcaggtgccatggccccggctcgggaaagcacgtcacttccggagcgtcgcaagcggccgaccacttccggggccttttggctccggaagcccaag

SEQ ID NO: 321900 - DNA, 1581 bp, Homo Sapiens
  misc_feature (216)..(225): n is a, c, g, or t
  misc_feature (230)..(231): n is a, c, g, or t
gggggggaaaattccaaaacccttatgttcatgagcccgggttttttctttgggaaacccggcatgagccaccggtcacctttcctcgacgggggccccgggcgcccaaaggaaattgttttagaaaatttttttagggccgaaggcggccggacaaggttttttggtcaaaggcgggggtcacgttccacagggtgagaggatcaaatttgggtnnnnnnnnnnagggnnaccaccgggacactgttaagtttattctagggtgagtgggtgcccaaggggggcagtgagtatggccgaggtcacctggtggcagggtgctcagggatggccacaggttctatagggccctgcagggcctgagtctctagtcagttgggatgcttcaccttctgccccaccccaagggggttggggcagtcatggatgtagtagttttcgtaattcgcagggatcagtgatgggcactgagcaggcttgattctcacacacatatgcagtggcctggtcttccaaccgtcggagggtactcaggaaaggcagctggcgggacaggaagctcgaggggtccccatcagccagaatcagcaccttgttaggaatgtagacagagtggacgcactgcaccagggccttggtgtccttggcctgacggtctccacagatcacgatctgcttgagggtctgctgctgggctgagagggcgcggaccatctcgggcaacgccaccgggacacgacgcatgcgctcggaaaaggcggtcaataggcacacacacttgtccatccagtccttgtggcccgtgaagccatgcagccggagcaggttgtgggctgacacggaattggcgctgggctctgctccatcctggtcgtccttcagacgcaggggcaggccagcccccagctcagcctcactgcagaagtagccgccaccctgggagtcccaaaagagcctgtcctgtgtgtcctgcagccgcagagcccactcgagccacgcactctcctgtgaggcctcatacaggtccagcaggccccgcaccacgaaggcgtagtcctccaggaagccccagcagggtgggttgctgtgctccacagtccccccagggccggtgtagcaggtccgcatcaggcggccactggccacatcaaacatgtgccgcttcaggaacttggcaccattggtggcatagttgatcagcctgtcttggcccaggacagccccagtcacagcatagcctgacaccatcaagccattccaggcagccagcatcttgctgtccaggtgcggcttgggccgatgcttccgggcctggaagagcttctccagcccctgaattgagcaaggtccgcacggcctccacatccaagccaaagcgggcagcagtcagcctccagcgagtaccggacggtcagcacattctggccctgcagctccccattggggtcatgactggggctgatgttaccagcctctgtgaggccgtagtgcttcatgaggagctggcctgaggtcagcggctcggtggcacccaacacaggctccgggaggagctgctgaacctctttgaccgtccacaca

SEQ ID NO: 321901 - DNA, 1021 bp, Homo Sapiens
ccccgttgggtgagggggccacccaattctcggcgcggaataccggtaaagagaatgtgccccccccttttctgtccatggctcttctccagcgcgcgcgcgcctacaatattgcgtatatggtgcctccccgtttgggacggcacgcgtgtcaggacggtttcccggtgaataggtcccctacagaaacttgccctaacggggaattgggttttaacgagccccctgccgggcttgcgcccaccgcgcgaacggcgggctatgaatgggggtgggggaaatgcgccacgccccccgtacgccccaatgcgcccccggggattcttcccctagggaccaaccaggccttattggtcccaggtgtccaagtttacctggatggggacgcggggcggcccaaagcggatgggttttagaaaacttttttgaaggtccagaagcggcccgacaggagggggtgggagccgtgtgttgcagggcggtcctaccttgtgatcctgtgagagtcaagtccattagccaaagggatctgagcattgtgtgcattgcaccgaagtatcattgctatgactggagctaagaatatccgtgtccactggacttgtactcctgtcattattcacatctgagtctgatcgttcttcagactgaaaattttctggatcagaagtctgaatatgctgttcaagttctctattatccactgatgctgaagagtccctctcattgagaggtgattcgatgttttcaaagtcacttgtctcagtacttttgctgctgtccccattatctccatcctgctgttgctgcagtgacaagcttttgagtttttcagtgctttcttctagaatagcttccacagactttaggcttcctacaggtcctttgactctttcacagtcatcatccacattaccagaatcgcctccagctttctggtatgctgtccttttggaataagatactggggattgttcaggtagcaaaacaaataatctgattgtatttgcatgccgatcca

SEQ ID NO: 321902 - DNA, 209 bp, Homo Sapiens
tttttttgtcttagaatatcaaaagaaaaagaaaaaggtgtctagctgtttgcatcaaaggaaaaaaagatttattatcaaggggcaatatttttatcttttccaaaataaatttgttaatgatacattacaaaaatagattgacatcagcctgattagtataaattttgttggtaattaatccattcctggcataaaaagtctttatc

SEQ ID NO: 321903 - DNA, 881 bp, Homo Sapiens; identical to SEQ ID NO: 120916
  misc_feature (232)..(251): n is a, c, g, or t

SEQ ID NO: 321904 - DNA, 816 bp, Homo Sapiens
  misc_feature (49)..(49): n is a, c, g, or t
  misc_feature (97)..(143): n is a, c, g, or t
ggacaacggcgggacccctactgtacgtcgtcgagatatatgttgctcncccaaagaggccatttcagggtgtcgtttaaaaatgccccaagagaannnnnnnnnnnnnnnnnnnnnnnnnnnnnnnnnnnnnnnnnnnnnnntttcggcaaggccctggaagtttttttaaagccccttttaggcaaccattgggaatatggggcttttgatatttcatggagtcccttggtgaaggctgttgctgagctctgtgaggagagagctcttacgatcaatgaacttgagagcttctgccagtgtcaactccaggaaaaaaccatatcccagggccacatagatgcgtgaagtatctgggaccactgtgtcaacgaagaagttacagcccaaatccacctgcatatataactccgagtgcttagcttcctggagtcgctcaatgacatttctcagttgaaggtatttggccagctgctcatataccttgtctcgatggtccagcacctttcgcaagtcccgctgcagcacgtcactgatgaaggtctcgtagcgcagcactttctcccccgtggcctccaccgcccgccgcttagggggcgtcgccatgatgggctcctggggagtggggagggggaagaccatgttgaccgatccagtttggcctcacacacagttcatctctaccctctcaacgctgggaatcggcttgtccggctcaagctggaggttcagccttccgcccctcccaactcggggacccgaccacccagggacacccaagcgcggcctttacctcaggccgccagcaataagccc

SEQ ID NO: 321905 - DNA, 462 bp, Homo Sapiens
tattgtagttagaaccatctgacacatagcttttattccattggttttttgttatgtctttctttacaagaatttgaagtccatcaggccgggagttttgtttgttgtgtttgctgctatctcccagtgcctaaaattgcctggcatacagtaggcatttaataatctttgaatcagtgaaaaccagatggtggcttggcatttccacataggaatgagccaaggtggaaatcatccagggatataagtagatcttgaagtgataaggaagggtcatcataatcatgtgggggcccattttgccctttcttgtttcttttctctagggttcagcaacagcctcaccaaggactccatggaatatccaaggcccttatccacatgttgctagagggcttagagaactacaaggcctgcagaatttcccagagaagcctcaccattgacttcttccccccatcc

SEQ ID NO: 321906 - DNA, 475 bp, Homo Sapiens
  misc_feature (346)..(346): n is a, c, g, or t
  misc_feature (355)..(355): n is a, c, g, or t
  misc_feature (460)..(460): n is a, c, g, or t
ttttttcaaaggcattcaggctctttaatgtctgaggatggggggaagaagtcaatggtgaggcttctctgggaaattctgcaggccttgtagttctctaagcccctgaaaaagaggacagaagagattgaacaaagactgggtctgggttacgcccccaggcttgctctgacctccctcccttgactccagtttagagggaaagatggtccttcccttctttcgctctcttccttcttcaggtcaccaccctaaacacagagtctgggtagtgggggtgagctgctctcacctctaggcaacatgtgggatatggggctttgatattcatgggagtccttgggtnaggcttttnctgagcctaggaggaaaagaaacaaggaaaggggcaaaatggggccccacatgattatggatgacccttccttatcactttcaagatctactttatatccggggntgattttccccgggg

SEQ ID NO: 321907 - DNA, 1381 bp, Homo Sapiens
  misc_feature (74)..(130): n is a, c, g, or t
ccccccacccggtattttgattccataaaaatgggttcaccattgccagaatggtcccgatctccggacgtcannnnnnnnnnnnnnnnnnnnnnnnnnnnnnnnnnnnnnnnnnnnnnnnnnnnnnnnncctcagctctttcagagagcacagtgagtgcttgcacaaactctgcttttgaagcaatccactgacctggtaaagatcaaaagtacaaacttgcatgtttattgattcggcaactctgcttatggagagatacatgtactagtcaccagtacattttaatattgctctgcacttaaacaaccaccacctgtcactgagctacagaagtgttgattccataaatgttcccagtgataccatgtaaggtgataccagtaaaaaaaatttccaaatggatcttttgttctgttacatggacaaatgtaccatcacttaagaaacagaaatgcagcaatttctctccacacataggcaagattttcttacatgactctgtaacttctacttagtccatagaaaaacagtcccttttctaagggtgaaaaaatacctcttcaagagacaggcaaaaatttgaacattacaagaatgtgctctttgtagcctttcatccctcccacaaataggtcaacagtaaaaaaaggatgaagtttaacattctagctagaaacgtacaaatgtcacatgtggacttttgtcatcttttctgattatcgactacttcaatttcacttgagttgtgcttttattcttctttggaatggcagttccagaaatcattaaatattaacaaatgatgatgtcagagttctagaaataaaaatatccatctattgtagtactagtccaaccttttcagaatctgtacctggacacctccaattgtacaggtaatactgcaaattgccatctcctataccaaacttgagtttttccaagaatgtcttattttccatcaaatccagtgcattgaatacatcaaatcctttcgatttagccagtatgagcgcgtcgctcatgaggtccagcaggggcgtctctgtgtggatgttgtagaatgagtaggcggctttgaggctcttgtgagcagggtggtgcatcaccgtggaggggagcgtatagaagctcaggaaatcagtcagtttaccgttggggctctccactacaaacgtgtcaataatgtgctcccgggggaggaaccagtgggctacttcctcttcatccatcactggagccagatgaaactgcttcaggtaagtgttgattaattctcgaactgatttgatatcttttggttccattggtctcaaacctgaagtctttgtaacatctggaagtctgtatagcttcattgttctctgtaaagtcata

SEQ ID NO: 321908 - DNA, 815 bp, Homo Sapiens
  misc_feature (99)..(194): n is a, c, g, or t
  misc_feature (196)..(196): n is a, c, g, or t
  misc_feature (211)..(211): n is a, c, g, or t
ttttggcaaggcccttttttgcccaccccgccaccccagggtttaacttttggtattttttagttagaagatgggggttttcgcccatgttgggcgagnnnnnnnnnnnnnnnnnnnnnnnnnnnnnnnnnnnnnnnnnnnnnnnnnnnnnnnnnnnnnnnnnnnnnnnnnnnnnnnnnnnnnnnnnnnnnnnncntaaacaggccttgcncaggcaatgagcatccagttagacaggttcttcaaggcctagtaatagttctctggttacaacggtgctcagcttgtctgctaggaatgggactcccatctggacatgtctaggtcagtgttccaaaatatggccagtatggaaggaggtcttatcacatgcttctgggatggatggtctggaaggcccttggtgggctctgtgttggctagttggcttctggtggtccaggaggtcccaggcgatgggctctctagtaagccctctagggactccatcactctaacgaagatggagagtagggtcagtaccacacctaacaggtagaggttcaacacatgcttcatggctgaaaggaccctactcctctgcagagaaacagagctgccttctccttctgaaaggcctctggaccctccgggggaacagccgggagtggatcgccggctgtaggagcaggtcgtgcaggagtccggaggaaagtcggttactaagcaccagcgcagaagcttcccgccacaaaactcaccggagacaaaagcgccgtcagccgcagagcgcagagcaacgccgcccagcctccgccccttatagccgcgagcac

SEQ ID NO: 321909 - DNA, 379 bp, Homo Sapiens
ggacctcttcaacctgattttggcgtctcaccctccctcctcccgtaattgacatgcctgctgtcaggaactcttgaggccctcggagagcagttagggaccgcaggctgccgcggggcaggggtgcagtgggtgttaccagggcaaagcactgcgcgcttcttccccagggaggtgggcaggcagcttgagagcttgggaagcagaggcttttgagaccctagcaggacaattgggagtcccaggattcaaggtggaagatgcgtttctggtcccttgggagaggactgtgaaccgagaggtggttactgtagtgtttgttgccttgctgcctttgcactcagtccattttctcagcactcaatgctcctgtgcggat

SEQ ID NO: 321910 - DNA, 828 bp, Homo Sapiens
  misc_feature (353)..(410): n is a, c, g, or t
gtgtacagccagactcgcgcctgttgtttctttcggcgtccctccgcggtctcgcgcgcgcccagcattgttgtcctttcgaacgcgtgcgtgggagtgcagcgggttgtgtattaaagaaggagggtggctgcagacaacattctttgttagggcggcgcgcgggatggccccccgcaggaagcggaatttttctcttcgtggtgtagacgtatggagtggcagaggccgattgcgtggagtctgtggccgcgggagccgcccgtgcaggtgggtggtgtgggggttagctgggtgtgtggcggggttgttctgtggtctggatacgggcggggtggtttggtctagggggnnnnnnnnnnnnnnnnnnnnnnnnnnnnnnnnnnnnnnnnnnnnnnnnnnnnnnnnnncagcttctcaaactttattttcattgcccaaggttgagagatgtagcttcttgctactttgcaggtatttcaaccattatttccatgaattcctcctcctccatttggagggggttgattctgttctctcgggcgtggtcattcagcagttcctctggagatgttcttttaaagttcctcctgtagcgaaccactagtatggtcgaggactcagatgttttcatttttttaggagcaggttgcgggtctgagtccccagttggggtctccggcatcatctcgttggcctcgttggaatcacaggggacgctcctcttcaccccgccggcactggattgtttgtccattgtatatattggttcttcaatgtcagtggcaggcttttgtaggttttgaatcttctcagtccagtaggcca

SEQ ID NO: 321911 - DNA, 407 bp, Homo Sapiens
ccttcattttgtttttattatagcatgtttgcttaatttacagcaagcagaaaataagctgggtcttgttttgatccaaacattgatgttttaaaggttgtacacaatatttgttaaaaagaacatataaaaatacctttttagaagcctctataagaaagaaaatacaaagtttaaccccacaactttcctctttgctagaactgtaaactactgctacagttttaaatagactttttgttgtttaaactatacatccaggaaaatctaaaaaaattaaagaaacgtgcatataaacgattgcatagcagaacatgaacattaactgcaaacagtaaagaaatgaaagttagaaatactatcaaatatacaaaggttctagaatcaatcctttaaacacattcccc

SEQ ID NO: 321912 - DNA, 949 bp, Homo Sapiens
tggacaatgcttttaatggcaagtcatcacagcaggtctgcggaggtgcagggcagcgctcaggccttgctcagtttcttcttgatgaagtagctcaccagccgctgcgcctcctgctggtactcgctgagcacattgcgagggctgctgatctggtccccttccaggcggttcaggagggtgacacacaccacggccgcttggaggccagcgctgcacatggcggcaaacaccgaggactccatctcgatattgcggacgcggctgcataggctgcctccagatacgcctgcttgtccttctccgtgtaggagcagagagccccatccagacggccttgcccttcatagaagtccaaggtgcacatggtgttccccaccactgtggtgaacttgctcagctctgcagaacacagcaacagctcctgcaccagcttcttgttaaggtccgttttccggatgacccgcttccccaggacaatctgctcaaactctgccttgaagcaggtatccactgcctgctctgttatgaccacagtgccgggctccagacttgtgactttcagctttctctgcattggctcccgtggccgccattccgccaactgaggcaggacccgtcagaggagagcggctggaggcggacagacgtctgcagtgggaggcgctccaggcgttccaggcagtgtcctgccggcgagtcacccgcgaccgcgagtcacctcaccaagccctgaattgggacaggagacgagacgtgtcgacgagctgcggagttcctcgcttctctgggcccactcggcctgcgcagagagccgctacacccgcggcgccatcctcgcactgcgacaccggcgacaaacgcaatgctccagggccggacgaagggacggctctcgggaggctcgcagacggcggggcgcgggtctgtgcgccggagcactcgaatt

SEQ ID NO: 321913 - DNA, 402 bp, Homo Sapiens
  misc_feature (27)..(28): n is a, c, g, or t
acaagattaggggttggagaggggttnnggttttggagaagtctttcatcggtctcatttattgcgatattttctagctttgcatccagtacaacacaatgaagtattacagtgatttttatcattgcatcagcatatacaaatacagatcaaatgcaaataaagtgtgcttacagtggtgatccaaacataaaattgcaaagggaattctctttgaaagtgtaattatttttctccaatgtaccaggtatatatttttctctatgccaggtatacatatttgtcttcatcacatgtgacaaacatttgatgacttgtcactaagtaggattcatttccatagggcaactttgaaatgtgtggtccaaatacagcattccagcacatgacctcagcatcacc

SEQ ID NO: 321914 - DNA, 763 bp, Homo Sapiens
ttgaacgtacacaagctttattgggcaacagcaacgagccacgctggcaaacaatgaaagtagagtcgctcagaaacacgaaagatcatatgtgtgtcatcacagcatcgagaatttaaatcatctggaagttcctgctaaattaaagcatactgtgccagagctcccctctaatcaaaaaacgctgtcctggggaaaatttgcaatgaggattacagagagagagatcaaccaatgaggaaatcacagactcttacatgagtttacagttaaccccactgcaacaaaataataaattagccataatttgttttttttgcaaataccatgccccccacctgaccccacaaacacaacagtcactgacatggcccagctatattaacagactgcgcctcaaaccatgctgtggcggagaagacagattcacgggtaatgccgctttggcctgagaagatgcttcggagctccaggtggaggagctgctcacgctgcaggatgctttgcaggttcattcaaaaccaaatttttttccaagaagaactggacataattcatgggaatattttaagtatatataagtggcaaaaaagctgtacattgaaagaagggggagaaataaaatgtgttgtatttacaaagctctttgtatatttttttaaatgaaaacaaagctgggagtgatagaattttaatgcaatgaaaaccaaataattcttcaaaaaactttagatgacatcattctctcgctctttcacacaca

SEQ ID NO: 321915 - DNA, 959 bp, Homo Sapiens
  misc_feature (67)..(67): n is a, c, g, or t
agagaaagccccggcagggagccccgataggaaaccagccacgttgtgctttgagaagtgtctttancaggattagctatgcaggcgagcctcacttacgcaaattggcatgcccctgaagaatgtgtgcgtgtcaattttggtaaatggaggaactctcattttaagggcagaaaagagactgttttttaaggtccctgtagtgaatccctttcgtaaaacagagtcttcttttgtaaagtgattctgcacccgtgtagtgacctgttatgttagtctagtgctgagtatctattactgggaccatctgcagagaaccccaggggcaggcaaagaatagcagcaactcatcttgctctgagtgtgggcagtgtgtaacagggagagtgggctgagagcggacagtgtgtaacagggagaagcagactgggtgtggggccacaatgaggggaggtcaggaaggtgggccttgcctagcatgagcagttctgctgcagcagcggtggggtgtccgagagacgcgtgttcttggaggagcccagcatcgacgggtctgtgtccagcgaatcagacatcttgtcacaaatggcatccaccaggcgctcaaaggcctgccttacactgatgttctcctttgcactggcttcaaagaaatcaaacccaagctgctctgcaaggagctggcccttctcagtgggaacaaccctctcttcctccatgtcacacttgttccccaccagaataacttgtgcattgtcccaggagtaggtcttgatctgagtagcccagtcttggacagcattgaaggactcttcattggtgatgtcatacatcagaatgaagcccatggccccacggtaataggctgttgtgatggtccggtaccgctcctgcccagctgtgtcccagatctgcagtttcacccgcttctccctcgtgccgaattcgccacccaggcc

SEQ ID NO: 321916 - DNA, 531 bp, Homo Sapiens
ctccaataaaggtaaggtttgttccattctccttagcctcctgtttttctcctaaaagaggcagtcgatgcataaaatctccagaaaaggtctgtgttttaaagagttcactgcagttctggaacaattttgatgatgtttgatatttcccagacaagcctcttttttccttaagtttttccaaatacaactctacttcttctgccttgaagttatagatttcattgtaacaatcagcgcttttcagataccaggttatattcaaagacaggtcacaaggttctccatcaaacttcaggaagatagtggtatttctgaagaggatctttccaaaactaaaataatttttccccgacggtatcggaatgtgccatttggaccggtcggcagcagctacggttgccggtcccgcactgaaaaacgacagtggtgacgggtgagctcccagaagcagaaggatgacaggcaacacctgaagccacgcagccgccgccatcttcacagccgtggagtgcctaccgaaagcatttc

SEQ ID NO: 321917 - DNA, 358 bp, Homo Sapiens
tttatgaacaggaagaattctttattcagatttaatttctcttgcattctcaaagaagtcaaggaaatcctggtttgcatatttgtttaaaaattttacagaatagactgaggtataaggcaagaattaactatcttttgatttctttagttatctcatgtattttactgctaattcgttcacaattttaagcaaatacttattccactgctgttattatgtcacaattcacaaaatggaatggatttcccaatctgaataaaaaacaagactcttacccctaaactatataaacagcactatgtgtgactactgtcattcataaacttggatgctgaagttcattcaaccatccctt

SEQ ID NO: 321918 - DNA, 490 bp, Homo Sapiens
tgcacagtatttcttaatgtaaaattgtgtgatgcttatatcattaaaatcaacttatttattttatcttttggctttcaggtggaattttagaaaatacctggcaagtgaatagttctgaaagtgcttcctcttaagttctttggtataatttggtcattttgatagtaatcaacccattaagtaggtactttaacaccctcatatcaattaaaatggaatgtggagtacagatatttagaaaaccatgactgaggaataaattatatttttgacctcatggaaaacagaactctaaaattttacttatgtttctgtggcaaagatagccatactgcctatgaagacatctctaactttatattaaagaaatgttctataaaacatctctttctgattattagaagtaactgttctatatacttttttaaagtagaagaggcaagtttcaacttgaaaaaagaataattttgaatttcataaattatac

SEQ ID NO: 321919 - DNA, 806 bp, Homo Sapiens
ttttgacagctagagggtttttttctttaataaaaaaatcccagacacactttgaagtcctagagtacaccagcaacagaaggaagggaatcccctcatgggggtactgtagggccagcatcatcaggaaagctccaggcttcacatctgatacagtattgtcaggagcccacttaaaaaataaattacaaaaaggctgttttgggagtaagcagttgaactgttttttccccctcaggtgcaacagagattgagcagactacaaatcggtccgtgcactggctgccttgggggcatatttaggcatcagttcatttatcttccggatgtagtcagacttttctgcacagcctttgcatgtctccccccagtcatccagaatcttcttcagctctttaactcggagcttcttcaggtccactgtgctcaggtcgatctgcttgtcatacttaagctcacatatctggctgtccttcttcttaagcttctcacagatcttctccacagggatgtggtgggccagaggctttgatacctcattgatgattttggtggctgcatcatctgtggccccgatatagtagcacaaccgattctctttgcctcttgcttcccggcagaactttataagttcgttttcaatagtggctggtgagaatgtgacatctctgtctttgaggtcctggtaaaatcttcccagataagaaatacaaacttcgcagtcgcccggccgcagcgcccggctgcccggcagcacgctcagagccagcgccaccgccagcccctgcgtggcccacatcctcccc

SEQ ID NO: 321920 - DNA, 956 bp, Homo Sapiens
aaagagcggccgggggtggggaacccaaccccccggtcgcccttcttgggggcccccccggaacgcctttctttatggcgcccgggttccttcccggcctgttttcccttgtggggggttccagggtcccccccgggggacggcctgccaggtaaacccaggacgggggttttccaggaaagctcgccctttgggccttcttcgtcccggatgcggggcgatctccgccttccccgggagccgcagtttctcccggagagacgcgttttcggctcttcctggtcccagcagcgcctttcggtggtcgctcgccatcactttcagctggcgctccagggccgccgccttctccctcagcgcctcttgagccgccagctccgcctgcagccggccgttctgctcctgcagctccacgcgcaccctgctcacctcggccaccctttcctggtccttgaggctcagctcctgctgcagctcttccaggcgccgccgcaggccctcaacttgcaggcccagctggctgacccgggtctgggcctcggccaccacctgcttctgctgtaggcaagcgccctgcgcctcgtcccgtgcctgcgccagcagtctcagcttgtcctccaggtgagccaggcgctgttgctcctccaggcgggcctggctcttggccttgatcagctcctcctcagcctggccacgctcgctgagtgccgctgctttcactcggctcagctcctcctccagggacagccgcgccgcctccagcctctgcacccgctcctgcatggccttctcactctcctccaggtgacgggtcatatgctccacctccttgatgcgcaggctttcggagtcctccaggctctgtctgcatcttctcttctccatgtccaggcgctcctcggcctggatggcccgcatcttcagctcagctgacatgccctcgtgccgaattcgcc

SEQ ID NO: 321921 - DNA, 545 bp, Homo Sapiens
ggcacgagcagccacttcaagctccctgagccctctctacagagacgcggaccccagacatgaggaggctcctcctggtcaccagcctggtggttgtgctgctgtgggaggcaggtgcagtcccagcacccaaggtccctatcaagatgcaagtcaaacactggccctcagagcaggacccagagaaggcctggggcgcccgtgtggtggagcctccggagaaggacgaccagctggtggtgctgttccctgtccagaagccgaaactcttgaccaccgaggagaagccacgaggcaccaaggcctgggatggagaccgaggacaccctggggccgtgttccttgagttccgagcccgaccatgacagcctgtaccaccctccgcctgaggaggaccagggcgaggagaggccccggttgtgggtgatgccaaatcaccaggtgctcctgggaccggaggaagaccaagaccacatctaccacccccagtagggctccaggggccatcactgcccccgccctgtcccaaggcccaggctgttggg

SEQ ID NO: 321922 - DNA, 608 bp, Homo Sapiens
ggcctgctggggtttatttgtctagctggggcagggtagggagggtcccagtcccaacagcctgggccttgggacagggcgggggcagtgatggcccctggagccctactgggggtggtagatgtggtcttggtcttcctccggtcccaggagcacctggtgatttggcatcacccacaaccggggcctctcctcgccctggtcctcctcaggcggagggtggtaacaggctgtcatggtcgggctcgggaacttaaggacacggcccagggtgtcctcggtctccatcccagccttggtgccctggaaggaatgggcccctgccctgacctcgtggcttctcctcggtggtcaagagtttcggcttctggacagggaacagcaccaccagctggtcgtccttctccggaggctccaccacacgggcgcccaggccttctctgggtcctgctctgagggccagtgtttgacttgcatcttgatagggaccttgggtgctgggactgcacctgcctcccacagcagcacaaccaccaggctggtgaccaggaggagcctcctcatgtctggggtcccctcgtgccgaattcgccacccaggcctcgcat

SEQ ID NO: 321923 - DNA, 558 bp, Homo Sapiens
  misc_feature (25)..(25): n is a, c, g, or t
  misc_feature (27)..(27): n is a, c, g, or t
acaaggtttggtttttgacgagagngngcgggtaggatggagcaatcctttatttttacacactttgacaaggaggtttgtcgtaaacaacctttccagtggagaacagagaacaggaaaatcagcctccagacatcagcagctgctctgttcagggccgaggctcccccttgccaatgtggtgaggtggaggggtgtactttccttcctttatcagcttatcccgctgcttcctgatggtacctgcacgtctcatcgttttctgccgaagcaaacactctacgaaatcatcatattctatcttgcactctttctctgcccgagtataaccgattccatgtgcacattctatccattctttttcaaaagcatggcatcgaccagccatcttgtagggctgttcaccactctggattgtcaaccatcgatctatgttaaggccgaaccttttctggatgtccaagaaaggcatggccgatgctcgtgcccttgactcttctctggccgccgcttcagaacgactagctagcgacgcggacgcctgccgtaaagggtgac

SEQ ID NO: 321924 - DNA, 753 bp, Homo Sapiens
  misc_feature (42)..(42): n is a, c, g, or t
cctggcacccccttttggggtctcccccacaaaacacctaanggtcaagtgaaatcccttgcccctgttgccatttagggaggttcaagccagaaatgacccgtttgtcctgattccttcccaccccaactactttcctgtgtgatgttttccagaggtagagcccaactccttccctacagcccaagaagatatattcatcctaagaaatcacgagccagcatctgtatttccttaggaaaagtagcactaaacatcatagtgtggcggacaccctttggaggcatagtatcttgttcgactattctacgaatctgaggctcaaaccccatatccaacatccgatcagcttcatctaacaccaagtatttgcaaaagtgtaatccaatctttcctctttccatcatatccactagacgtcctggagtggctactaacaaatggcatccacgttccaagtctcgaatctgctgaccaatatcggcaccaccataaaccacgcaaggacgaactctagatcggtatgaaaattttctggcttcctcgtagatctgtactgccaactctctcgttggtgctaataccaaggagattgggtattgtttgcggcgcccataccttccattttccttcatggccctcaaagcctcgcctggaccatctgaataaatctgactcaagatgggcaacagaaatgctgcagtttttccagaccctgtttgggcacaagccatcaagtctcttttctctttg

SEQ ID NO: 321925 - DNA, 440 bp, Homo Sapiens
  misc_feature (32)..(32): n is a, c, g, or t
  misc_feature (44)..(44): n is a, c, g, or t
aacattggctgtatttccttattgggtttcangacccccgtganggcccagacgcaataaaaaaagtagtaaagctgtttcccccagatcaaaaactccccagttaataagcatcattccaggaaagttttatgtcccttggagaacctgagcacaacaaatgaaagcaatcgaaagtgtcagtaggaaaaccgaggatacaaccacatcaactgaacgctgtggcccccgtctctttagataggaacgcagtgataaccatattttaatattctccaccttcttaagtctgaaatgaggtatttcatatttcctagctttcctggcagaagtaatatggctgaagagttttgcaaataaaaatctctgtttatatgttctctctgccacacacatcatgaaaaaaaacatccaagtaagacacaatctttcaaaaaaat

SEQ ID NO: 321926 - DNA, 705 bp, Homo Sapiens
acacacttttattttctttgttttccttcctcacatacagaacttctccacataccacatttcttgcagctataaagtcacttgatgttggccgggtaccattttatccctaaaactctgttgacatcaaaatatgacagttatatccataaaatatttacatagcacggcatattaagctttagacacttggcaattaaaccacataaaaagaggacaagacccccatcctacgtgtttggaatcaggtgttcaccggtccctatctggcgactgtacactgggttcaaagggcagcagaggcaacaggcagttacttcagaggacactgaacactatgatctgggaagcacgttatgatgtaacccaatgtcatgtaccacacacctttctccaaggtgggtctcataattctagaattgggagggtccagctgttacaaaatgaagacagacaacacaacatttactctgtggagatatcctactcatactatgcacgtgctgtgattttgaacataactcgtcccaaaaacttgtcacgatcatcctgactttttaggttggctgatccatcaatcttgcactcaactgttacttctttcccagtgttgttaggagcaaagctgacctgaacagcaaccaatggctgtagatacccaacatgcagttttttcccataatatgggaaatattttaagtctcc

SEQ ID NO: 321927 - DNA, 1203 bp, Homo Sapiens
  misc_feature (64)..(64): n is a, c, g, or t
ggcaaacaggccagttacttccagaggaccactgaaccactatgaatctgggaagcaacgttantgatgtaaccccaatgtccatgtacccacacacctttcctcccaaggtggtctcataatcctagaatggaaggtccagctgttacaaaatgaagacagacaacacaacatttactctgtggagatatcctactcatactatgcacgtgctgtgattttgaacataactcgtcccaaaaacttgtcacgatcatcctgactttttaggttggctgatccatcaatcttgcactcaactgttacttctttcccagtgttgttaggagcaaagctgacctgaacagcaaccaatggctgtagatacccaacatgcagttttttcccataatatgggaaatattttaagtctatcattccattatgaggataaactgctacatttggtatatcttcattctttgaaacacaatctatccttggcactccttcaggctttaatcccaattattctgttcattttcacaagaatacaagggtttccttgagaatagccaaaatcaggatcattcataccactgcatgcttgaagtaatgaaataggaaactgacatgcaacataaactggacccttctgttcaaaaagtgctccatcaggacagactgtgaggttcttctgttcttctaaagtatatggttttagaaacttcttaaggtcttcaatgtaccctgcatacgaagttggatcagacctactgaatgtatattccaatgcggtcactggttttggaaaaaccatgagtcctgggctaggaatctggtcacggtattttggaacctcatcgttgagagtctgaagcataacccacatcgtgaatgagaagagtgcagccaggaacccataaaaaactaggtagaagagcaagatcaaaccccagctcttggcggtgcgccccaggaattctccggtggtcgggttgtagatgaagagcttccactcggccaggctctggttgagggacttcttctcgttcttcgtcatggtgtgcgcgcggacggcgagaggagctgcggccgcggggatggaggcggcgagggctgcggaggcgcgtcccggctccggcggcgcagcccggagacggcagtgaagggtgggaccgccgagaacacctcctcgttacggggagtactcgagccgacccc

SEQ ID NO: 321928 - DNA, 492 bp, Homo Sapiens
  misc_feature (22)..(22): n is a, c, g, or t
  misc_feature (39)..(39): n is a, c, g, or t
  misc_feature (44)..(44): n is a, c, g, or t
  misc_feature (54)..(54): n is a, c, g, or t
  misc_feature (71)..(71): n is a, c, g, or t
  misc_feature (90)..(90): n is a, c, g, or t
  misc_feature (108)..(108): n is a, c, g, or t
atggggtaacccaacaacccanggtgcccgttccgggtnccacntggccccccnaacaacaccgggaaaanaagtaaacaaatgaagtgncaagaatgaagggatcanccccaccccaaaaaagtccaggatgaaccgtgaacaagtttttgggacgagttatgttccaaaatcacagcacgtgccatagtatgaagtaggatatctcccacagagtaaatgttgtgttgtctgtcttcattttgtaacagctggaccttccattctagaattatgagaccaccttggagaaaggtgtgtggtacatgacattgggttacatcataacgtgcttccagatcatagtgttcagtgtcctctgaagtaactgcctgttgcctctgctgccctttgaaccagtgtacagtcgccagatagggaccggtgaacacctgattccaaacacgtaggatgggggtcttgtcctctttttatgtggtttaatctcgtgcc

SEQ ID NO: 321929 - DNA, 655 bp, Homo Sapiens
  misc_feature (487)..(578): n is a, c, g, or t
agtgcctgcggccctcggcggcctagtacacacgcacctgagtgagtggcaccagaggaccctctccatgtttagggacctcctgggcctcaggagcgtggcgcccgcccctgggcggactccccccatccgcgggcgcgaatggtccgggccgcgtccgcagtgctgctggctgctccctggttgctgggtgcaaagtgctgggttctgggtttctggattcgcgggccgttcacacgtagcctgtgccggctcctcgggtgagtccgtccgcgcgcggtgccccgggacggcctaggctgccgggggtccggggccccaggcattccgggctgcagattgacggggatcccggatgcaccgcgcgcccccgcgccctcaccgacgggtccagacctggtgggaagaaggtgcggggacgggtccctgaggatcccgatgcctacgagccaagatgctcaggtgtgacctacacatgtgacttcannnnnnnnnnnnnnnnnnnnnnnnnnnnnnnnnnnnnnnnnnnnnnnnnnnnnnnnnnnnnnnnnnnnnnnnnnnnnnnnnnnnnnnnnnnntgcaggagggagcctcggaagcagggcctggccggcagagcacacctgctgtcaccagggaccacaggcagcatgaa

SEQ ID NO: 321930 - DNA, 336 bp, Homo Sapiens
  misc_feature (15)..(15): n is a, c, g, or t
  misc_feature (31)..(31): n is a, c, g, or t
  misc_feature (52)..(52): n is a, c, g, or t
  misc_feature (58)..(58): n is a, c, g, or t
agtggggagggaaanaaattgaaaagggganccctaattttttaaatcccanaaattnaacctagcgggacatttaaacaggaaggattagggattttttctatgtggttaaccctggactttctgaacaaagaccaactgagcccctccccagtactctggtggatttttcttcagcaaccattacgcaagtcttagttgtaaccagcaatgttctgtgtgttttatgtttgctttttagttaaaaatcaccaccaccaccaaaaagaaaaacaaaattttttggctcctggattttcaaaacacatggtagacctctctgattttaggctttta

SEQ ID NO: 321931 - DNA, 962 bp, Homo Sapiens
gagacattttcattcaagtatattaatgtagatattttaaagtgggttataagtttaacattgtctttaaaatagaagtcacagctatcttccagcctgtcttctttaggaacgctgttgacatgccagggctccgtctacactggaagcagctatacagctgtgaccacatcgagctttagccagtcacacttctggaactgtccgttcagtccatcccctcaagggttcttacatttctggctaagctcctcacgtaggtgcgtaggttctggttaataaaattcactgttgtgtgaaagacatcacggagcaaggacggcgtgtgactggccaccttcttggccagcagcagggccagcaccagcatggtcttctccttctccatgtctctagggtaggcctgcagcagctgctccagggcagtggccaggtccctgttccggtcctcctccgaccggctggtgttcctgagctgcagggccaggccgttcaccaggcccggagggatgctacggtccatgctgtccccgacctgggcgaggtgcctggcaatattccggatgatgtcttcttgactttcagaatctgcctctattcttcccaagcgggagtggctgctgcgtttgccatcagtctgcagctcatcgtagccctcccactggggagccagcactggcagctcgtggcccagtgcgtccagctctctgcggaagctgttgtcagaacagctttggaggaagccaaacaccagtaggtttgtgatgcactcatccctgaggctggaaccgttgttgacctcacagtccatggcctgggcagcgcggcagctccgactcactcctggttcacagtgtcccagtggcgaccaccctccagccgcgggggcgcgggcgcgtccgggccgaggcagcgtctcccaggccgacgcgtgggtcgacgatatcccgtattccggaccg

SEQ ID NO: 321932 - DNA, 538 bp, Homo Sapiens
atcccgcgccgacggggctgtgccggagcagctgtgcagagctgcaggcgcgcgtcatggctgctttgagacagccccaggtcgcggagctgctggccgaggcccggcgagccttccgggaggagttcggggccgagcccgagctggccgtgtcagcgccgggccgcgtcaacctcatcggggaacacacggactacaaccagtgcctggtgctgcctatggctctggagctcatgacggtgctggtgggcagcccccgcaaggatgggctggtgtctctcctcaccacctctgagggtgccgatgagccccagcggctgcagtttccactgcccacagcccagcgctcgctggagcctgggactcctcggtgggccaactatgtcaagggagtgattcagtactacccagctgcccccctccctggcttcagtgcagtggtggtcagctcagtgcccctggggggtggcctgtccagctcagcatccttggaagtggccacgtacaccttcctccagcagctctgtccagactcggg

SEQ ID NO: 321933 - DNA, 1331 bp, Homo Sapiens
  misc_feature (45)..(58): n is a, c, g, or t
  misc_feature (66)..(203): n is a, c, g, or t
gggggccgcgggccccaaaaagaggttttaaagaaattttttgtnnnnnnnnnnnnnnccccaaannnnnnnnnnnnnnnnnnnnnnnnnnnnnnnnnnnnnnnnnnnnnnnnnnnnnnnnnnnnnnnnnnnnnnnnnnnnnnnnnnnnnnnnnnnnnnnnnnnnnnnnnnnnnnnnnnnnnnnnnnnnnnnnnnnnnnnnnnattatgaaagataagccatttattgaccattcacttttctaaaaaaacacaaatgtgagaataaaataaacatacctaagactcactggcccctccaggacaggaagcagccctggacagagagcctgcaaacgagtttccttatgcctaatgtctgaacttctcatacattctaggatttcatgtttcgttacaaaggaaaggaaactggctagaagattcatgtacaagaaggtcacaactttaaagctatctgacgctaatgacttgtacaatctggtttgcaaactctgagagacagtatcaaataagcactgtcaaagactactcccagctaatctttactgtcatttttctttgaaattgtctttgggactggctatgttctcactgtagcttccgtttatcccacagcacaaaccctaaagtccatgtgcagtctccatgttcaagtataaaagtctgtttcaggacaaccctgggttgctgtagtgtttctctctctgtagtgtctacttggtgtcatgcccttggacaggctggccaaatggcagcacaatgcagggggtgacacggtcaactctcccactgccgaacttgctcccctttcaatctggtcactgcccatggtcaaggttgaaatcttgagatcagtgacgaccttggcctatcttcagtctgaagttgcactcttatgtaaccgaatccatttcttcaccaaaaattagctttcaaaaggtgtctggcgtattcttaggaagtgtcctgagatggagctggagggtcctggccttcgggctctggagggggtgctggcacagctgcttttttctgggccgccaggaactcatgaattgctcgttctatttgtggcctgaagatgtggttaagttttggatccaccacctgagaaataatcctgtctactccagcttccaacatccctgactgaaccacactctgcctcagaccatttcgcaactggtttttgttcatcgtaggattccattcctgcttgtccagatgtgttgacacaaaattatccactttctgcctcaggttttggtaagctggcttggtgtccacgtcggccaggcagtcccggcggaagctgtcaaaaaggccccc

SEQ ID NO: 321934 - DNA, 1039 bp, Homo Sapiens
  misc_feature (904)..(931): n is a, c, g, or t
caagaaggcgcgcgcccgcaaactgccaacacccaaacccccgagcctgggtggcgaattcggcacgaggctggaacacaaggtgttcggcgtggagggcagcagcgcctttctggagtgtgagccccgctcgctgcaggcgcgcgtggagtggactttccagcgcgcaggggtgacagcccacacccaggtgctggcagaggagcgcaccgagcgcaccgcccggggactactgctgcgcaggctgcggcgccgggactcgggcgtgtacttgtgcgccgccgtcgagcagggctttacgcaaccgctgcgtcgcctgtcgctgcacgtgttgagtgctacgcaggccgaacgactggcgcgggccgaggaggctgcgcccgccgcgccgccgggccccaaactctggtaccgggactttctgcagctggtggagccgggcggaggtggcagcgcgaactccctgcgcatgtgccgcccgcagcctgcgctgcagtcactgcccctggagtcgcggagagagggccgtaaccggaggacccccgcccctgagcctcgcgctgagcgggggccgcgcagcgcaacgcactggtgaccagactgtccccacgccgggaaccaagcaggagacgacaggcgagagaggagccagacagaccctgaaaagaaggacgggttggggccgggcacattgggggtcaccggccgatggagacaccaaccgacagggccctggctgagggcagctgcgcgggcttatttattaacgggataacccttgaatgtagcagcccccggaaggggggcccaagtcgggcgccagatttcgcccggaaggaaagggacggggaaatccagctccccaagaaccacaccaggtcccgaggaggtgccctggaaatgnnnnnnnnnnnnnnnnnnnnnnnnnnnntccttgggggacgggaggcctggaacaacatacgtgcccaacacggcttggccccccggtaaggcgaccccactctctgccccctcctttttcaaccacacgccatta

SEQ ID NO: 321935 - DNA, 842 bp, Homo Sapiens
  misc_feature (74)..(74): n is a, c, g, or t
  misc_feature (243)..(243): n is a, c, g, or t
  misc_feature (326)..(338): n is a, c, g, or t
tgttaaagaaagtttgttagcccgccaaaccgtcaattaaattttggcccaatattttctggtgaaacgggttntgcaggagaaatgttccaagtaaggtgcatcgacttccaccatcctttcgtgcttctttcatcaaaacgaaagatcttggaaaatcccatccacacttttggacttccccatctcggttaaggaagctgtccaggcccttgagaagttctttggggtctatgggacccngaacccatgatggtggttttatccaatttttttgcgacgtcagcacctcgggctcaggggggagggggtaaaattttggaggnnnnnnnnnnnnncaaccaaccaggacccaaaactcaattatttagggggcctcattggatcaaaaagtcttttaaaaaataaaggccaactcagtattcatttcccccccacccaactccatttagggaggggggtcgcagaaaaaagttctgagtggattcaaaaaagtaaacgctggatgagtgaatttgggtggtttgggaagggagggtggttgattatttttgaagttatgtagtgacggtccttcggccacagatttcaagtcccaagcagcgtgggctggtggggtgggcaagataggtgggaaggggcagaagacacaagtggttgggctggtggctgctgttttccctttcccccctctctcaggatcctttcaagggcttagatgttgctgcggcttgtttctgttttcctcgtggccggcctgtctttctccgagaaaattcaaacctctaaacgaaccccagaatccccggccgtaatgcactctgcgttgataccactcttcc

SEQ ID NO: 321936 - DNA, 1023 bp, Homo Sapiens
ttcttcttaattttgatgcctggaacaggggctgaattaagagcatccagaaagcccaggccctccataggctgtggcgggatgatcttcactttgatctctttggtggcattaggtgttgtgttgagtggcttgtatttcttctctgcagggggagtggcatctcctggagcagctacgttgctctgacgtttgagggggatgggtttaaggttgtacttgtcagaaaccaccactgtgctggcattcttcttcacaggcaccaaggatggtgtctccagctctagtccagtggaacggaacttggcatgactggggtgctgtggtgcgaagagacttgggcttctccctcttcttctctggggcctcctcagcccgggtctcagccttcacctctgtcaaaggtcgctcaggaagggtagttcgactttttccttcatctttacgtttcttcttatctttctcagcaggctgggtactgctctgagagcggatgacagccatccagtcgctgacaaggactgaggccaatttccggagctcttcatcctcacttgacttgctcagctgcttcaccagtttagctgtgttgttctgcttgagatggtctacagtgagcggtagatgctgcagggtcagtagaatttgctggaggaggggaatgttgttggttgtctttgaatacgtcagccaattgttaagaagtttgtagccgccaacgtcaataaatttgaccaatatttctggtgaacgggtctgcaggagaatgttcaagtaagtgcatcgactcaccatctttcgtgcttccttcatcaaactgaagatcttggaaatcccatccacacttttgacttccccatctcggttaaggaagctgtccaggcccttgagaagttctttggggtctatgggacccgaacccatgatggtggtttatgttgctgcggcttgtttctgttttcctcgtggccggcctgtctttctccgagaaaattcaaacctctaaacgaaccccagaatccc

SEQ ID NO: 321937 - DNA, 1713 bp, Homo Sapiens
  misc_feature (790)..(819): n is a, c, g, or t
atcatttgataatactgtttattgtccacggaccgagcgattgctcaagaatgatacaaagcatcagagacatgcgcagtctgcttgtcaactttcaacaactcttgtgtgttcccagcaccggaaggtctcagacttcatattccagcataaacacagtgctcccctcccccaaaaatccaaacggaaacaaaatcaacagagctttaaattacggcagcaagtccaatatttcttaatacttatcaagcaaagatttgaaaataactacaatgtaaactttattttaaatattttgagttgcttgcaggatgaaaataggagaagagagctgtgcttagaacataacatataaattaaacgatgccaaatggagagccttcttaaactatatatatattgccactatttattgtgaaggtatttgagcggcttcctctgtcagctgccacccggctcttcttaacctgttttgttttctgctcagcacggttaaaagaccaacgtgtgtggatcaaatataaaggccacacctttcagaccgaacctactcaaagatcctttactttgcaataatttgaactggagaaccaaagacgggagacgaatgaaagcaaagatgctcaaagaaccaaaggaaagacctgaaggaatccacctgcataggccacgcgttccactctgggtcaaatgcttccacgatgcagaaacctttttttaaaaaagtgcaagtctaatacctaccaagggtaataaaaaacacagcacaggaatgattacagctgatgtnnnnnnnnnnnnnnnnnnnnnnnnnnnnnntcagcagaaacaggagtaaatgttacatatgatatcaccatacaggaagcgaacaggggtggggtgttatatgggttggaggggtctggtggagttgtatatactgaaatcacatggactggtccattatgacatcttaccaactttaggtcactgtacagcatgaaaacgcccgtggggcaggggccgattcctggataccctcccagtctgccctagaaagggaagtcatcaagatctgtgctgaccaggtcccggtgggcatgggggctgcatgccacttgggggtcaggagtcttaacaggtgctttggggttgccgctgaatagaacaggctaaggtggctttggaagcattttgcaagaccacgcccaggccgccaagcttcggtttcattgcgtgtgtatgtttacataatgtgcctgtatatcgtcagtttatctttacaacacaggtgggaggaaacaagagattctccttatcattaccgagaaagttcttcctatcctaacccccatatcactggcttcaggaaaccacactgagggaacacataggttccctagttccctaggaagtttcttagctaggtaatctttgtcatttaagaaatacaagcagaagttggtatatctgcaactcaggttcacctatcatctgagaattcacctttagaaaaataagatgtctcttaaaacaggccatagtgtcctggaggctgagaaagaagtgagtgtgtcaccaaagccacctacctccaaaatccttcccttcctaggctggacttcttactatgcttagctggcgtcacatgcagaaagccccgtgcagaacgatggctgtcagtctttgagggagggaacactaagcctgggagggcacagcaagaccccc

SEQ ID NO: 321938 - DNA, 839 bp, Homo Sapiens
  misc_feature (138)..(150): n is a, c, g, or t
cgtaaaaattagaaagttggggggtggaggttgcgtttcttgcggccaaaaaattttcggggtttctttttacccctaattgacccccgggcaataaaaattgtttctataggccaagaggcaatgcaaagttctttnnnnnnnnnnnnnaaaagggcccatgctggcttaggggctttaaaggcgcccagactcacagggtgctgtgaagagctcctttattggggtgatggaatcggttccaaagagctggtttactgctgtgaagggatcgcagctttgaatttcaaagctctggttctcagtcctcgggcacctgtgcgtgaatcgctgccgcaaggctgggccaagttaaggccccacgcactttggcatccgggccagggatggtctccagaccccacagggtgaagcggctgaagttggcagtggctccaatgaagcggtcgaagtcccgctccagcggctcctcctcttggtcgtcagtcccggaatcccgcaaggggtctggcttccccatcgacaccttcttctcttctgtcaccatcacgtatcccacgaggccaggcggcaccgccacctcctctccccgtagacagcggccccgaaacgacacttcgagtccctcggggccctggcggatggcgggcgtgaagaagcgccccaccggggcgggcccgtccaccgcaacctcgcagggcagcagatgcagtgtggcgggtacggcgtcgcgcaatgtggcggagcgcaagtggacgcggtgcctctcgatggccgcttcgtcgccgctctccatcctccctcctacgcgacgccagggctcgcgagctgacactccc

SEQ ID NO: 321939 - DNA, 1094 bp, Homo Sapiens
  misc_feature (45)..(77): n is a, c, g, or t
  misc_feature (86)..(306): n is a, c, g, or t
ttgctgctggctgggttctgctgaaagccccttggcgctggaaannnnnnnnnnnnnnnnnnnnnnnnnnnnnnnnngagcccgcnnnnnnnnnnnnnnnnnnnnnnnnnnnnnnnnnnnnnnnnnnnnnnnnnnnnnnnnnnnnnnnnnnnnnnnnnnnnnnnnnnnnnnnnnnnnnnnnnnnnnnnnnnnnnnnnnnnnnnnnnnnnnnnnnnnnnnnnnnnnnnnnnnnnnnnnnnnnnnnnnnnnnnnnnnnnnnnnnnnnnnnnnnnnnnnnnnnnnnnnnnnnnnnnnnnnnnnnnnnnncaggtaggatggctgttgaacggacgcctgcctggacgccctgggcactcattggagtcatggtacttatcatgggtgtctgctgcagtgtctggtgtgaaaacctttgagtggaggtcagtccatgtccataggtgggggcctgctggtgcacatagccactgggccgctgttgcaggtggcgggtaggatctacaagagtaggattggtagaagggtgggtgctctggtaaggctggctggagtagctggggggcaccatggtacctgcagggcctgtgtgttgctgcaatcccacatgagaaacataaggagtatagccctgggaagtctgcaaaccgtaggaagagctgggagtcatctgatggacagatgactgtcccaacatgccctgactctgtatctttgcctggagctgttggcgaaggcgctgtccttggggcaccgcaggttgctgctgccggtacacagaggtcttataagaggagggttctaaacccatgacgccagtcatggttgtgggcagcactccagggtaagttgttcgggtgggcagcttctgcattggtaagcgcacaggacggtatgggtccacacgagggccacctgcaggtagtggctggttctgggtgtacaggcctatggagccttgcctgtagttaaggtgtgttatagaaccagggtttgggtggtgcaggaggtccggaggcactgtcacaccataagggccgctccgacccgggcccattccatagtcctctgtcttggtagctggctggctgcgtttc

SEQ ID NO: 321940 - DNA, 526 bp, Homo Sapiens
  misc_feature (446)..(446): n is a, c, g, or t
ggagttttttttaaaatcaattcttttaattgctgaaattaacatacataattgatgtaggtgagagagatcacaagtagttggatgaaatttatagtaaatcatcctattgctggagacagtcatgaagagctccatcctgttgatctgctgaactgaaagggactgttcattcagccttcaaggacatgcacatcataaaggaggccaagcaaaaatcaaagcaaacaatagctacatgtttggaaaaatatacatcgaattacacagacaggaattatgaccagttgtgtacctgctcaagtgggaacattttaaaatgtgacagtcatctatgaatactgaaatgtgatggtcaagtggtccatcatcaacacaaatacaaatggaaatcattaaactttcaggaggggccatttgaataacaatgtcaaggcctgggtttntccagcggtattttggtcttcttatctggataagcacaggcagagatgggctgggtagtggccggtttctggatgcagct

SEQ ID NO: 321941 - DNA, 216 bp, Homo Sapiens
gccacaaattcttcgtaagatgcaaatcatatgcaaaatagctgcaatgcaggagctctcgttgaatgcaaaataaacacattttactcctacacaggcgcctaacaccgtcgtcctctgtatcccactttcggttaaggggcagaaataccgccctatctgtaaattaggcccatggaagccgagccgcacctcattcctatatgcaaattagct

SEQ ID NO: 321942 - DNA, 974 bp, Homo Sapiens
  misc_feature (27)..(27): n is a, c, g, or t
  misc_feature (49)..(49): n is a, c, g, or t
  misc_feature (62)..(62): n is a, c, g, or t
  misc_feature (68)..(68): n is a, c, g, or t
  misc_feature (84)..(84): n is a, c, g, or t
  misc_feature (97)..(97): n is a, c, g, or t
  misc_feature (123)..(123): n is a, c, g, or t
  misc_feature (133)..(133): n is a, c, g, or t
  misc_feature (165)..(165): n is a, c, g, or t
  misc_feature (168)..(168): n is a, c, g, or t
  misc_feature (175)..(175): n is a, c, g, or t
  misc_feature (177)..(177): n is a, c, g, or t
  misc_feature (194)..(194): n is a, c, g, or t
  misc_feature (207)..(207): n is a, c, g, or t
  misc_feature (809)..(928): n is a, c, g, or t
cccttagccaccttgataaagccctgnaaaaatcgggacactgggccgntgaaaggggcatnaggggnagagagcaccctgggnacagacatcagtntctgagggcagctggaggccctgggnaaacggaagntcagatgactttggtggaagggactgaacaangcncctgcananccctgggaggaggcagnaaggggaacccantgaggagggcaggtcttctcgcaggatgccgtatcagctgtggggagagctatgggtgtgggttccattcttcgggggccacttcaccccccaaatgcccccacactcctgggtcctctcctcacagaacccttgaccttgccaaggccccctggggtttgctgtaacgaatgagcactgggcaggtggatgaggaacgggaaggagatacctgcccctgccaccgggaccccgtcccaccagccttggggagcagtgggtaatggaggaccagctgcacctgaacacccagaacacaggcccccatgagctctgggtctgctttaaaacctatgtacacatctctccccgcctgggctggactggccagtcactgagggcaggggcagggcctgtgtctgaccccctcaccctttcccgggacccagcacagagtgagtgctcagtgtttaatgaatgaataaatgaacgggtggctgcagtggtgcaggcctgagcaagagaagagggggaaggggtaaagagaacatagcacggggagccctggagggatgagagaatttaagaatgttggaattggccaggcacgggtggctcacacnnnnnnnnnnnnnnnnnnnnnnnnnnnnnnnnnnnnnnnnnnnnnnnnnnnnnnnnnnnnnnnnnnnnnnnnnnnnnnnnnnnnnnnnnnnnnnnnnnnnnnnnnnnnnnnnnnnnnnnncatggtagcaggcgcctgtaatcccagccacttagggagcttgagg

SEQ ID NO: 321943 - DNA, 882 bp, Homo Sapiens
ctggagtttgttcagatcatcatcatcgtggtggtgatgatggtgatggtggtggtgatcacgtgcctgctgagccactacaagctgtctgcacggtccttcatcagccggcacagccaggggcggaggagagaagatgccctgtcctcagaaggatgcctgtggccctcggagagcacagtgtcaggcaacggaatcccagagccgcaggtctacgccccgcctcggcccaccgaccgcctggccgtgccgcccttcgcccagcgggagcgcttccaccgcttccagcccacctatccgtacctgcagcacgagatcgacctgccgcccaccatctcgctgtcggacggggaggagcccccaccctaccagtgcccctgcaccctccagcttcgggagcccgagcagcagctggaactgaaccgggagtcggtgcgcgcacccccaaacagaaccatcttcgacagtgacctgatggatagtgccaggctgggcggcccctgcccccccagcagtaactcgggcatcagcgccacgtgctacggcagcggcgggcgcatggaggggccgccgcccacctacagcgaggtcatcggccactacccggggtcctccttccagcaccagcagagcagtgggccgcccctccttgctggaaggggacccggttccaccacacacaaatccggcccctaaagagcgcagccattctggagcaagcagaatgataaaccgaaaggaccccctctctagggtccccaggggggcccgggctgggggctgtctaggtgaaaaaggaaaacacttccccgcttccttaaaaaacgatgtataagaaagccgggggggccaacaacccctttgggtgggccctccccctca

SEQ ID NO: 321944 - DNA, 985 bp, Homo Sapiens
tgtgtcacaataggggctcctaaggctaaaaacccaaaagagggtggggagttgctaatttccaagcccactagtcagttttcccccattcgcgatagtccatgtaacaaacccaaggcagatgtccggtcttgagccagacttcaacagagtccccctggcccttggccctggcctcagtacagagtctctgcattgctgctccggggccgtttgatcttctcgatatttttcaggatcatgtcatgtagagtgacatattgattcctcagctctgatatgatgagccgaaggctgatatattctttctcatcaatctctgtcacggtgcggcgatagtcctccacatggggatatttagctattttagaaaccaatttggctcttgtaatataatatctagaaatctggtccagataagatgcagcttcactctcaacagttcttagctctgcaactgtttcctcctgaatggacaccccaaagttgtttccatcttctatcctgggaatcaggagctgtacccacattttgaccgtgttacatttctcaatcaacagccggatctcaggtttcactttctcaataatgtccaccagctgctggttgcttttcagcatcccattgggcatcacaaacaccttggttccttggaaggcttcttcacactcatccaaccttcgcttcttataagtgggctcacttgtgatccgctccctgaaagaatcaaccttgagcttcacttcctgatccaccttcagcaacgaggccatggccgggccgggccgtgtccgatcctctggacaccggaggcgctgtggactccagggagggggccggagggacctgagaaatctcggctgacctcgggacccgaccgcccttgctggcttactcactgctcgctcgctccctccctctgtgccgtccgcccgcccgccggcagcctgctgcctgcttgctctctcgctcgccctcccggctt

SEQ ID NO: 321945 - DNA, 903 bp, Homo Sapiens
  misc_feature (308)..(308): n is a, c, g, or t
ggggagcggatcacaagtgaggcagaagacttggtggcaaattttttcccaaagaagttattagaacttgatagttttctgaaggaaccaatcttaaacatccatgacctaactcagatccactctgacatgaatctcccagtccctgaccccattcttctcaccaatagccatgatggactggatggtcccacttataagaagcgaaggttggatgagtgtgaagaagccttccaaggaaccaaggtgtttgtgatgcccaatgggatgctgaaaagcaaccagcagctggtggtacattattgagnaaagtgaaacctgtagatccggctgttgattgagaaatgtaacacggtcaaaatgtgggtacagctcctgattcccaggatagaagatggaaacaactttggggtgtccattcaggaggaaacagttgcagagctaagaactgttgagcgtgaagctgcctcttatctggaccagatttctggatcttatattacaggagccaaattggtttctcaaatagctaaatatccccatgtggaggactatcgccgcacccgtgacagagattgatgagaaagatttatcatgccttcggctcatcatatcagagctgagggaatcaatatgtcactctacatgacatgatcctgaaaaatatcgagaagatcaaacggccccggagcagcaatgcagagactctgtactgaggccagggccagggccaggggactctgtgagtctggctcaagaccgacattgccttggtttgttacatgactatcgtgatggggaaactggctggaaatagtaatcacacctctctgtttttagttagagtctaatgaaactctcatctagccccggaacccagcacaaacccgagatcaaccgtgt

SEQ ID NO: 321946 - DNA, 775 bp, Homo Sapiens
  misc_feature (696)..(696): n is a, c, g, or t
  misc_feature (719)..(720): n is a, c, g, or t
gggtctcttgtttacgatttcactaggactcagaaacgagatcgggaagcagaaatatagtgcaatagtgcaacatctctgaatccttttaatctagagaaggcatttcatatttgggggctaaggtttccagtcagatgaggcaaacagcaagagtaagcagtgttacttgcaggtactttggttaatgttgatttaaattttcatgaatgtgctggtgaacactgtgaccaggcttttgtagatggcgatgtgttatagacggtgctcactcccaagggacagcaagtgagcagagatgtactgcaaagtcgccagtcactgctgcaaggtggcctctgcctggggcctccagaagctgctcctttaccctcttggtcccatggctgaagctggagcagcggattgctctggagcagccaaggccgccagcgtgtggagcagagctctcccctcctgctgggcgtgtgtgacactgatgagtttcactgtactgcatgtgacttctcccctgcccttcctcctgatggagtgtgcagacagccatgcgtggccacgggggcagtgtgaggacctccctgtctcccggctcccctcccaggggagccagctgcttgacctagctctttgggcctctcctgccctctgctctgcctgggagtgtcggatcctgtgagtaggctgggcctcccctgngcagggttctccaagggcccggnnttcccggcccttacctttcctgatgcccctgacatcatcattcttgggggagaca

SEQ ID NO: 321947 - DNA, 899 bp, Homo Sapiens
tttttgaaaaggaagtcaaaaactttattcagcttataaaattccatgttccaagaacatgctctaagcatgcagaaagcacaggacactgctcccgggtgggggctcaggtggggccacctctgaagctctgctgacccctgggccaaggccctgacagactagcaggcccagtggtcatgaaagcgtgacggccaccacatcacaagcgtgatggcacctgctggtgcagctgcagtccctggtgggccgggcactcactctggcagccgccgtcccccatgccagccatggttgtcccgccatacgcagtagttgagtgtggtcgcgaaggccagccaggccaggtaggggtagagcaggcgggcggccagcgggctcacctggtaccaggccacggtagtggctgccgccgccccactgaccagcaggagatccaccaaggcccagcccatttgtcgggcaccaaagaagatggggggccatgcccagttcagggccagctgcccagtgtagaggcccaggggaaccacagccttctctgtgaagcctcccagctctttccagaccaggtaggagccgtaccccatggctgagtagagcgtgccccagacagggcccagcacccagtggggcgggtgccacgagggcttctgcaggccggcgtaccagcggagaccctcgccgtggacaaagcgggagcccacgaagcaccccagctgggcgccagcgtgaagcccatggcgggcacccagggcggggccatggctgctgcagctgctgttcaggggagctcagcggcgagggcacgcttcgggcagggcactgcctggcaggagttagccaggccgctgtccgacgcgtgggtcgacgatatcccgaaattccggccgtaccac

SEQ ID NO: 321948 - DNA, 635 bp, Homo Sapiens
  misc_feature (151)..(159): n is a, c, g, or t
  misc_feature (161)..(177): n is a, c, g, or t
  misc_feature (181)..(195): n is a, c, g, or t
  misc_feature (197)..(214): n is a, c, g, or t
ggggggggattccaagcccctagtccttggcccgggtttcctttggaaacacggtattgcccaagtttcctttcctttttgggcgccgcgcgccaaaagagaatgtttatgaaaaatttttttaagggcgagagcgggccacacaattttnnnnnnnnntnnnnnnnnnnnnnnnnngcgnnnnnnnnnnnnnnntnnnnnnnnnnnnnnnnnnttcagaagacttcaatctcttttattctgcttttttcctaatgtcataatccatttgactcctaagcatgtaagtaggtaccacggaatgtaaacaagtaaggaaacagaaataaactgaataatacgtggaaacaaagctgtgactcacacagatgaaatagctgcacaaaagaaataacatgaaaacatttaaaaagagacttaatgtaggaataagttattttaatcaagcaaaaacaaatttatatccattatttctaaaaataaaattagacttttccaatccttaacatctgcatttaataatatcttctaaccaaaatacagatgctaaaacagcaagttacattatatcttgtacagcatacagtatgttcactgtttacacttactttaattctagttggtcatgtactccc

SEQ ID NO: 321949 - DNA, 623 bp, Homo Sapiens
  misc_feature (403)..(418): n is a, c, g, or t
ttggttgtgcgtccccgcgtgttgcgcgtgcggtgggcgtcgcggcgttgtcgcgggtggtactgtgttgatgctccctgttccactttgtctctcgtgggtgtttgctgttccgtgcgggatagtctgtccctgcccccatggcgtgatcttccctttgtggtctgggcttcttcttcgccccttatttatgttttccttgttgttctctcccgcactgtgtccgtctggttggtcgttgggggttctctagttttggttgtgttctcccctgctgctggtcttttccgggctctaggtcggccactctgtgtctgttgtcgggctgctgctgatgctatcgcatgtccgcgagtttctcgcagtagcaggaaaggggaagaagggggctaaagggcccgcnnnnnnnnnnnnnnnnaaatcgcgttgctctggggcgggttggggggcccccgcgtaagtgccgggcggccgggagcagaagtgtcagtctcagtcttcgtccttctccgcctccgactgcgcgcgagcagctgcaggagccctcggcccgcgcggcgcggcttcaggcgcggcgcagcggcagcaactgctgcaatcgctgctgcaagtttggcaatgtg

SEQ ID NO: 321950 - DNA, 611 bp, Homo Sapiens
cttgaatcatgactatccaggtggctggggccggcagaggaatatggagccattttccccccaagagggtcaaagacaatgataatggaaaccactgtggcagcgatgatgatccaactgaccacgacggttgcgatgatgccgtttacaactgtcctgtcgcactgaacaccatctgccacccaggcagcccccagagaggcccagaccatctctggaaaaaacagcgccaggcggatgtaaagcagcttagacatagacttccgcggtccagggttacaaatcgttcctctcatgctgacacacatgatggctgacacagtacatatgacaactgccaggagaatcatgaggacgatcaagtaactgctgagcaaggctccaccagcacagtccagctttcctcacagcactcgcacgaccagctcgaagaacactgggaagaccaagtcgtcgctggcgatggcccagcgccggccgaagagtaccatccccggcatggcgaaggtcccgtagctcgcactcaggagagaccccgcgcgccgttcaccgagaacaaaccagcaccctccggacgccgccaccaaattatcggcgctcaagcgcaaacg

SEQ ID NO: 321951 - DNA, 940 bp, Homo Sapiens
ccctggggcaaaggtttcttgggttggttccccgaataattgtcccctgttgctgaatgaaagcccagggtcgagggacccgcccgcaaatgttcggctgggccacccaggatctggggtccgaaaaaagtagggtggagaaaaagctctgcccgtactcggaaaaagcaacccggaagtatggtcgtctttccccaatgcaacagcacaagagcttgattctggtttccccacacgcttgtagctgctgtcttgaggccattaagtaactggcttgaatcatgactatccaggtggctggggccggcagaggaatatggagccattttccccccaagagggtcaaagacaatgataatggaaaccactgtggcagcgatgatgatccaactgaccacgacggttgcgatgatgccgtttacaactgtcctgtcgcactgaacaccatctgccacccaggcagcccccagagaggcccagaccatctctggaaaaaacagcgccaggcggatgtaaagcagcttagacatagacttccgcggtccagggttacaaatcgttcctctcatgctgacacacatgatggctgacacagtacatatgacaactgccaggagaatcatgaggacgatcaagtaactgctgagcaaggctccaccagcacagtccagctttcctctgtgcatgagatacaacgtcagaatgccaatccaccacagcactcgcacgaccagctcgaagaaccctgggaagaccaagtcgtcgctggcgatggcccagcgccggccgaagagtaccatccccggcatggcgaaggtcccgtagctcgcactcaggagagaccccgcgcgccgttcaccgagaacaaaccagcaccctccggacgccgccaccaaattatcggcgctcaagcgcaaacgcagcgagggcggggacctgc

SEQ ID NO: 321952 - DNA, 1031 bp, Homo Sapiens
  misc_feature (233)..(241): n is a, c, g, or t
acccattcttcatcctcggagtgagtgattcccaagtctttgtcttggcttaatccctaaagaacccagttctgctggtatcgaatagttcagcttggttgtcattgaaaggaatttctctcttctgtccatcagcctgtccctcccaactgtctaggacagtcttcggtcacctaaattcctaactgcagacttttgccctttttctctctcatcaccaaagtcccatccannnnnnnnnaataaaagatcctcagctacagtctttccattttccttgcttctcttattgcacacccccagcccatttggcttctctcttggattttgttttttcagatccacatttattgggtttcctgtccagcttcttggaaaggagctcactcttggaaagactgatctttccaaaatattttccctggtctgaagctttggtgtgaacttctcaaggcttagagaatccagttacagaccttttggggttcaggatgctatagattgacaccctcctgcctgtttttctctgcatcccaacctggccaaggcccctcctgtggggtgcccatctgtgcctttattccggctgtgccctcgactttccagcttcccatgtttctttggttaggtttctctcccttccttctttctccttccccaatccgcctgtttcgtcagggcccagtttgtttcctcatacaccttcctcactagcccagcccacatggtttgactctttccctcagctccaccagctcttcatcatgccactcatttcagaacttgagcaaaacagggccagtcaggatctgatgtctttctggtctccctaaagaaaactaagctcttgagggacagcccttgacaatgctttcctatctgctgagcatggtgaccttccttaggacttccagagttcagttccttctggcagagaggttttctttctccatgccatatggatgtgactcaaatgaggggtcccacagcttttcctggctaccacttgctgtgaccttatacatgttggg

SEQ ID NO: 321953 - DNA, 838 bp, Homo Sapiens
  misc_feature (150)..(178): n is a, c, g, or t
  misc_feature (182)..(237): n is a, c, g, or t
  misc_feature (239)..(239): n is a, c, g, or t
ggggaggaatcccaagccccttagttctggcccagggtttcccttggggaacaagctatgccccatgttcccctttccttcctggggccggggcgcccaacggaaaggttttagaaaatttcttcggggggccggggcgggccacaattnnnnnnnnnnnnnnnnnnnnnnnnnnnnnttcnnnnnnnnnnnnnnnnnnnnnnnnnnnnnnnnnnnnnnnnnnnnnnnnnnnnnnnntntgacaggagttgaagtttattcttggaaaaaacaaagtcccatcctccccccattgtctaagaaggttcttctaggaggccccgcccctccaaatggtcatttctcttttctgaccccagcttccaccaatgccgttaagatgccgccacttgggtgaggggctcctccaggtactgcaccaaagcctgggccttggccttgagcattccaaagcccacggtctccttggcatacatacacagcagaaggttggccactcgggtgatggctacacggccctccatgcagtccatgaggatgaatttgagattgtcttcattaaacgcttggttcccgttccggtcgtaggcggcccagatgttactggctatggcagcggtgacccgggcgtcagtgtccccgtaaccagagtaggccagcagtgatccctcgttattcagcagcagggtgctctggacgcctccagtgttggcttggcttagcacctgggtcaaagccttggggcgcagcatgcctacggttcctaaccctgggcttttgcacccagatctccgaggtgcctcccgcgggccgctgcccgctgcttcccgtagtcccc

SEQ ID NO: 321954 - DNA, 1166 bp, Homo Sapiens
ttattctcttctgttgttcctgagccaagcaagctgtgggttttgattaagacacactctcctccatcctgaggatccaaattgtacatataaaggtgtccactggatgacgcaactagcagccgtggcaacttctggatcgttgagagggtacagatgttcctctgtccggagaagttcaagcgtgcagtggcaaaagccctgtcctgatgcatcatgtctgacacctgggtagggaggtagttggtagcagccataaacatctttcccatgtagccactccaggtcgaaggctcttctggtcgactgttggtgacctgttccagcttgaagatgtgtaccgtctcggtgttactggaggcgcagaggaattgtgaatccatactgaacactagagagctgattgtcacataccttttcatccctctccggaactcatagagcttttgcccatcagggacagagaacacccggatgactgtgcctttttcagacgcacttgctagtttggagcctgaggcattgaaggtgatggcagctagtgttccctcatgggcagcaatagtgcagactgttttcagggagtttccatcataaagcacaatctcccctgaagtcaggcttccaggataggccaggtaagaattggaatggttgatagagagagcacatagacctgttgggtttgcaggaatatccaggagggtcttcaacagcttcatgtctttaatgttgtgaatataaatggactcttctaggcaaaccagcagcctttgccggttcagccttatggacaagatgttgctggagtagctgtaattacagatctctgtgcctttcttgaagtgatacacgttcatctgccgtggttttgtgtgactgactaccaccaccaggctgctggagaagaggcgctccacgatgtagacgtccgggatttcattgcttccgtggacttgatccagctgctccacagaactcagagaaaacagcttatacccggctttagttccaattgctagggatgtgcagtcctggttgaaagagaagcagctgagcgccgactcaaccccgcccgggggagcgtccgcggcctcggcctccatcgggggctcggcccgggaagccgcagctcggagccggcgacagccacatcagcagccctt

SEQ ID NO: 321955 - DNA, 1617 bp, Homo Sapiens
  misc_feature (140)..(140): n is a, c, g, or t
  misc_feature (162)..(170): n is a, c, g, or t
  misc_feature (600)..(614): n is a, c, g, or t
  misc_feature (630)..(631): n is a, c, g, or t
  misc_feature (691)..(766): n is a, c, g, or t
  misc_feature (1135)..(1135): n is a, c, g, or t
  misc_feature (1279)..(1279): n is a, c, g, or t
gcgagtaggtgttcgccccccgcgttaggggattttgaaaaagcgggggccaaaagtaagggagggacgtttgtgttgtcaaccgcgcgggtttaacctcgtgtggggagggattatttatttcgccggaagccgcgcanaggttggtttggtaggcgcctnnnnnnnnntgtagaggggtatcataaacacgcaggttttgtgggggggtttctcgcactctcggggcgagagaattgtttttgtagaatttctcacccacactcttctgcgggaaaagtgcacacgcgccgcggggggtgcgattatttataatattgggagggccccctcgtgaggacctccctttgtggaaggggtgccccgaaaaagagacctccgccgaaggggccctctattgggtgttttttgttaaggacaccccgcgggtgtcctcccgcgggggggtgttttttttgtggggagggatgccaccggccccttgttcttgttccccggggggtttgcttttggggaaacgagttgtagcccatgttgttccttttcttgtttgggggcgcgcggcgccccaaaggggaaggttttaagaaaatttttgcnnnnnnnnnnnnnnnccgcaaagaaaaatanngtttgaaaagggggttttaaggggcgttgttggggagggagtgatatggtgttgagtggnnnnnnnnnnnnnnnnnnnnnnnnnnnnnnnnnnnnnnnnnnnnnnnnnnnnnnnnnnnnnnnnnnnnnnnnnnnnccgcacatgacaggtttattgacaaaggctgaacgtcaccagcctcatcagcttttcttacattttatgggaaggtttttacatcatcaccgcagttgtccccagctgttatttctgtagaaacaaattcgtcagccacacgtgctggagtatttcattgtcctggcacccgactaacccacacggcagctcgcacggtcccagtccacatgagtgcaattgccatgttgatgtcaacaagcagtgactgaaccaccccggagcagacggcgggcgctccacagaggggccttcctgctgctccgggccgagcgctgctgctcctcgtgggcctggtgaggccgcacagcgccattgctgccatcctgngaagatggaggacgctcaggcgtgcaccagagcagcatgttttccttctcctctttaactcggcggtgcgctagctagctcagaccgtgggcacagaggacacaccgcgacgtccagctcagacccaccagcaccttgcatctnccagcgtcagttcccccacggtggcaagatttgctttagggttcctgtgtaactgaggcgcttcacccacagtggcctctccgtgtggctttcctggtcgacggtgtcagaaatgtttcctgcagcggcaggcaggtgcagcggcaggcagggttggcggggaggagctgggtgacaggctggtcaccgctggcctttggaccctgcggggcgagcgctttgggattgtagcaattctgtgtgaggagtgcaaggtgaccagtcgtgaggtttcctaagcagccccagggtgaccaggcaagcgtgaccctcgcgaggccccgaggagccagaagcca

SEQ ID NO: 321956 - DNA, 1720 bp, Homo Sapiens
gtgggaaaaatattttattgctgccatccccatggtgagccgctgggggtgaggggtgaagctgggtggtggatcacagcatcttctggaatagggcgatggcctcatccaccttcctgagctctgcttctgtctgttggagcttggcttcatctgcctcctggacttcgagcggcaccttgacaggatagcccgaggcagcacggcgttcccgcagacgctgggcctgccgctgggcctcaactcgcttggcttgcagcttgcccagctcccgtgcagggtccaccagcccctgaagctgcaggtggatggagcagcgatcagaagccagagccacagcgcaaccctggggggcgggagcccccagggccagaacagccaccacacctgcgctggccagggcctgcacgtagcccgacaccgccgatgccagggcgcccgtggcctcatccgccacttccaggaaacagtcaggccggatccgggtgaggttgtagtcggcccgcagggagcgcacggctcgcgtgatgcttagcgccagctcaagggcggcttctgcctcggggtccttccaggagcactctgagggctccgggtagggggtaacacagaggctagggggagcttgcggcatcctccggggcagcctctggaacagctcctccgtcacgaagggcatgaagggtgagagcagccgcaggccaacgtccaggcaagtgtacagggtctggcgggcacactcagctgccacctggtccaccccattcagtacaggtttcaggcactccaagtagacatcacagagctcatagagccagaagctgtactgggcagtggtgacggccgggaagtcgtaggcctggaagccttgattgctgagcctcacagcctctgtcaggcggctgcggatccagcggtccaccaggctctcatggcctccgggctgggaggtgggtgagggcacaaaacccttcccaaggccacgaagggcaaacttggtggcattccagagcttgttgcagaagtggcggtaacccagtatccggttcacatccaggttgatgtcacgaccctgggacatgtaggcacataatccaaaccggagagcatcggtgccacattcaggaatccccgctgggaagtcagctttctgcccttctttggccttctccacctcgctgggatccaggttgctgttcagcagctggttgtggaggccctgcagggagattccatagatgacgtccaggggatcgatgacattgcctagagacttgctcatcttccggccgtgagcatctcgcacgatggcatggaggtagacctctctaaagggcagcctgcccgtgagcttcaggcccagcatgaccatccgggccacccagaagaagaggatgtcatgaccggtctccagcagtgtcccggggtagaacacactcaggtcttctgactggttgggccagcccaaaatggataaggggaagaggccagaggagaaccaggtatccaatacatcctcatcttgctggagactgatcttgtcaggggacactccgaactccttggctgccttctcccgggcctccgcctcattgcgtccactcacccagtaccgcccatcagggtcctccccagggggcaccgctgggtcactgacagtgacaaagtaggctgggatgcgatggccccaccacagctgcctggaaatgcaccactcccg

SEQ ID NO: 321957 - DNA, 804 bp, Homo Sapiens
gcatgccaggctcccgcaccactgcaactcggctctgctgttttcaccgtctaccgtctcgagccaccgatggcgtgaatctgcaaggactcgacacttgccacaagtcttgacgtggtcctgaaacttctcccgggggatcttcttcttgccgcagccgtcacaagttaaggggaacttggggcagacctcgtggtgcgccttcacgtctgctccgcagcaggtgcccggcaatgccgcagctcaggcttctctccgggcactcgtgctccaggtggcgctccttttcaccaaggcggaccaggcctttgcacgcgggacattcggtcagcatgagcgggcagcggccttcgtggcagctctcgtattctttcagggtccccttccaggtgcatccatcactgggacagacggccggcaggctctccacctccctgcgggcagcattatctgggaaggccgaactgctttctaaaatagaaatgccttcttcatatatgccctcgtgaacacaggcagcacagttctgaggcccagagctgaggatgctggccaggcagaaggagcagtaccggtggccacactgcgcctggaagggcctgcggaggacgtttctgcaggcggagcacaggtacttggcttccagcttggtccccaggagggtcttggagaagccgggctgtagcaactccagggagccagggggggtcacgctagctgcagccatgagagctgtgacccccgcgaacaaagcccccggacgcgtgggtcgacgatatcccgtaattccggaccgtaccagcc

SEQ ID NO: 321958 - DNA, 761 bp, Homo Sapiens
  misc_feature (95)..(105): n is a, c, g, or t
  misc_feature (161)..(161): n is a, c, g, or t
  misc_feature (163)..(165): n is a, c, g, or t
  misc_feature (176)..(176): n is a, c, g, or t
  misc_feature (178)..(178): n is a, c, g, or t
  misc_feature (182)..(182): n is a, c, g, or t
  misc_feature (186)..(189): n is a, c, g, or t
attgggggaggaaacccaaaccccttagtcaatggccccaggatctccctaggaaaacaggctatgggcccatgtccactttacctaacgggggnnnnnnnnnnnaaacggaaatggtcttagaaaagtttctcgaagggccgagggcggcccgacagggntnnntttttcttttntnttgngctnnnntagaaagttgaatattttattatttacacatataaagtgagaatgaaaattgggcatggggcaagggcaggaagatgactccagctcagtcggtgatgatgagctcgtccaccccccagtcttcatagctcccatctggcaggtaacggcgaatgatgatggggatctttcgggccttgagttccttcatggcaatgagcagaggatctgtctccccctccagctccaccatcacaggggcacacatcgcaatctggagcgctcgggtgcccagcacgcgggctcgctcgtacttggtcatgtatggtgtggtgattcgcttctggttggcctgcggtcgctccccagaggggaggatctcgacattctcctggccttcctcttcggcattctccaagtcatctagcccttcatcctcctccacatcatcaaagtcgtcgccatcaaaattgtcctcgttgtctgacatgacaccctcgcctcagcgaccccgctgcgccccggtcccgcgcggagacccgcaaacagcgacactacgactcgcgcggctcctagcttatcttgcgcctccc

SEQ ID NO: 321959 - DNA, 228 bp, Homo Sapiens
cagcagaaatcacaaatttattaactcttaaatatatcaatcagtcctttaccattatggcaagaaatatatacagtgtcccatggtaaactgcagtgtttcaaaatgatagaagataataaatgtgtaattcatttgtggtggagagaacaaatcacaatttcctcacatcttagtgcggaagacaaacttgatctacagtaatacttcaacaccacatgctaaggt

SEQ ID NO: 321960 - DNA, 1043 bp, Homo Sapiens
tttcccggggtaactggttctttagcaggaggggagcactggggagtatcttcagggtggctggactttgcagcctctttaataacttccccctgtgcaggttgtatcctttatcaccccaccccgatgccccggtcttcaggaaatggcagcaggcccatatttctgtagggttcagagttctgtgaggtagagcattccttccaatgggatcttagaattcctagagttgcagaattttactgactagacccaggaggtctcaggagtccagacttgcttaaagcttggctcaaaattccaagggagctcataactccatggggcccagagttcctggctcgggaacattgggaggcctgggatacagtgccttagcctcaagcagaaaagtgaacacaatatctttatggcttgaaggtatatgaaataatgtcactacatcggagcagcgcctctgcttgcacacctatgggagtctgcagctgtgacacgtagaagttggccacatccaggtcggtggctccaaagtgggcggccacacgcacaccctcgtgcaacgtgaagctcacctgatgacccaccatggccagcaggctgcggaggtaacgctcccgaagggcggctcgtgcccgctgctcctgggattccagggattcttgagctatgggacactcctggatttcaggaacctctggcctcaagggggctctgcgtccatcaggggcaaagccacggctgaagccatcagggccccggggcagccggagcacaggcacgggaatgttcactggagtttgcattgtcttggctccctcctggtggccccggtgctccagagaggagatcagctcagtggacaaacatttggccaactcttcacaattgccagggtgtggaaccagctgagttgtcaacagagaagccgccagacctctttccgtcactcagggcgttgcactggggtgagcgtccagagctggggccggggagagggaacctgctggcgaccccccaccaccttgtactcaccgaggtccccc

SEQ ID NO: 321961 - DNA, 473 bp, Homo Sapiens
  misc_feature (452)..(452): n is a, c, g, or t
tcatttccttggtgcaagctggagggtggaggaagagggagcaaactcaggtcctcacccgtgcccccatgtagaaaggcagactgtggagcccaaggtgtgaccctgataagaaactggtttaagaaagattcacacagggtgtgccccaggagggtagaggcaggcgttatcccattgtcccctggtgaccctggccccagaggcctttatcctttcagtctccaaggcaaggatttccgaaggtttcagggaaaaatgcccaagcccatcccccacgacttgaaaaactagtctgttagattcaagagcccaacacttaggtcaatggcaggggcaggggtttcacagacctccctcctggtggccccggtgctccagagaggagatcagctcagtggacaaacatttggccaactcttcacaattgccagggtgtggaaccagctgangttgtcaacagagaagccgcc

SEQ ID NO: 321962 - DNA, 695 bp, Homo Sapiens
atctcttccagcagcgtctccaagggtgtgctgcgacaagggggcgtcgctggccgacttggcttgcggcgggggccggagggcgggcgcacgtccaggatgttgcgcttcgtgacccggagcgtcgcggtgcgttggggggcacatagccgtcccctcagcgaaaatgagcacgggttcggcgtccctggccggatagccattcgtccgcttctagggccggctccgggcctggcgtattccgggtacagatcgtcctggaagaggtctgacttgcggggcacagtcatgatgataggttcacactttctttcgtgtagcttgtagaaccgggcgatctcacacttgctgacatccagtccccttttggcatgaaacccatgcctcgctgcggctctttgctgctgaacgtgttcaggtagtgcacgaaaggcggctcgtcggtaatctcaaagtaccgaatgctgctgtcgccctggtcctgagcgggctgcggggcgctcacgctgcgaatcctctgcggaaggggcccgagtgcgtagggggccgaggaaggcttcagggcgaaggagccacctctccgggtgtctgtagtatctgggacccgggtgtccagctccgcactctggccgatcctgcggctctctagagcccggcgccgctgcagccccagctgccgctgccatcaacctaag

SEQ ID NO: 321963 - DNA, 156 bp, Homo Sapiens
ggtggtttgcagaagaattttctttataaaattgaagttttaagggacgtcagtgtttatgccatttttccagttccaaaatgattccattccattctagaaatttgaagtatgtaacctgaaatccttaataaaatttggatttaattttaaaaa

SEQ ID NO: 321964 - DNA, 931 bp, Homo Sapiens
gcgtttggcagctggcggaagctgagctacccaaggaggatgtttgtgcctctcccagcttcctggacttttttctgtaaattcttggttctgtgcagaacaggctgccaccctgctctccagccccatcaatgtactctttcttcccgccgccgactgtcctgagctgactgcttgttacggattttcctccctggcctttcttgaggaccctgtccttttgcccttggtgaggggcaggtgagagggccagggaaacccctttcttgcccccagcagacgcttctcttcatcggtcaggaacaggggtttgacagggcagcagggttgtacagggcactggggctacggtgcctgctctgggcaggatgtgggcatgagcatcaaagggcagctcactgaccatgcaggaatcaggcaccataaatgctgggctccactgatctagctggatggagataaggcctacatttggcccagtttccccctgcatcctctccagggcccctgcctcatagacaacctcatagagcataggagaactggttgccctgggggcagggggactgtctggatggcaggggtcctcagagatgccactgtcactgccaggagatgcttctgagcagtacacctcattgggatcaatgaaaagcttcaagaaatcttcaggctcactctcttgaaggccacagccacggtccccaccggacttccagccttgcagtccctgttcctgtagcctagttaccggaacctctggaggggggcagtggagtcccagctccaggacggatcctgtcgagaagatatcctctgggggctccagccacgcgtccagcaggtcagggattccgagatccatgcttctgttctgaagagcccagccctgtcaagccagcatagcccgttgaccgccccaaacactccc

SEQ ID NO: 321965 - DNA, 921 bp, Homo Sapiens
  misc_feature (146)..(146): n is a, c, g, or t
tgcaaaggccataagggaagccccaggattccttggtgatcaggaaagtgtgccaggaaagttctgttccagctccacattttcatttggcatgcagcacggaaccggatgcgcccactgggtcttggctttccctcccattcttntcaagcagtgtctttgttgagccatttgcatccttggctcccaggtggctccctcagtctggactctaccacttgggtctccagattttctgttacgtccttgtgggtcaggatatttctggaaagttactccgtgaggctggtaatcctcagacccagcttctggtcgactctggaatggactgaagctgggcaggatgatgagagccagggaaaaaagaagaatcaaaacacaagtgctggtctgggcagctttgttggaagtttgagcaattagcgtctgcagctggcggagctgagctaccaaggagatgttgtgcctctccagctcctggacttttttctgtaattcttggttctgtgcagaacaggctgccaccctgctctccagcccatcaatgtactccttcttccgccgccgactgtcctgagctgactgcttgttacggattttcctcctgaccttcttgaggaccctctcctctgccttggaggcccaggatgtgtgagtcctgggtccttcacctgcccccaactccccaatgcttctcctgggatattggcccctcagaggtcatggtgaggcccctgggttgggatacccttaggggaagcatgttaccttggtgaggggcaggtgagagggcagggaaaccccttcctgccccagcagacgcttctcctcatcggtcaggaacagggtttgacagggcagcagggttgtacagggcactggggctacggtgcctgctctgggcaggatgtgggcatgagc

SEQ ID NO: 321966 - DNA, 1158 bp, Homo Sapiens
gggactctttccgcctttgtttacaaccctgccatgatctccctcttgcaaaagcgagggctacagaacaggcattcaggagtcctgtgctccagtcacagccttttctgttcttcagctaggagacaccaaaccctcaggaagatttactatagctaagagaaaactgcagcagaaagggcgcggctacctacttcttaaattccgtttgtggaccctcagactcttagtcccctactcccagatacagcggccctaccgtggctcctggcaaggtggcatccacttttgtagtaagcatggatctcggaatccctgacctgctggacgcgtggctggagcccccagaggatatcttctcgacaggatccgtcctggagctgggactccactgcccccctccagaggttccgggccttcaagagagtgagcctgaagatttcttgaagcttttcattgatcccaatgaggtgtactgctcagaagcatctcctggcagtgacagtggcatctctgaggactcctgccatccagacagtccccctgcccccagggcaaccagttctcctatgctctatgaggttgtctatgaggcaggggccctggagaggatgcagggggaaactgggccaaatgtaggccttatctccatccagctagatcagtggagcccagcatttatggtgcctgattcctgcatggtcagtgagctgccctttgatgctcatgcccacatcctgcccagagcaggcaccgtagccccagtgccctgtacaaccctgctgccctgtcaaaccctgttcctgaccgatgaggagaagcgtctgctggggcaggaaggggtttccctgccctctcacctgcccctcaccaaggcagaggagagggtcctcaagaaggtcaggaggaaaatccgtaacaagcagtcagctcaggacagtcggcggcggaagaaggagtacattgatgggctggagagcagggtggcagcctgttctgcacagaaccaagaattacagaaaaaagttcagggagctggagaggcacaacattctccttggtagctcagcttcgccagctgcagacgctaattgctcaaacttccaacaaagctgcccagaccaacacttggggttttggaatcctcttttttccctg

SEQ ID NO: 321967 - DNA, 907 bp, Homo Sapiens
  misc_feature (288)..(288): n is a, c, g, or t
  misc_feature (299)..(299): n is a, c, g, or t
aggacttatagacccatggagaaattgtagacccggaatgcacataatgaaagcctccaaatctcgcatcaagttatgtcactctagctctccttagggaagcagctccccaactctgaatagtactcatccacagccctggtttaccggattcgcacgctctctagaaagattggatagatcaacgcactattgcatgaagatcagcacataatgctagccaactattagctgatagaataacgctacatttggccagtttcccctcgatcctctccaggccctgcntcatagcaacntcatagagcataggagaacttggttcccttggggcacggggactgtctcgatcgcaggggtcctcagagatgccactgtcactgccaggagatgcttctgagcagtacacctcattgcgatcaatgaaaagcttcaagaaatcttcaggctcactctcttgaagccacagccacggtccccaccggacttccagccttgcagtccctgttcctgtagcctagttaccggaacctctggaggggggcagtggagtcccagctccaggacggatcctgtcgagaagatatcctctgggggctccagccacgcgtccagcaggtcagggattccgagatccatgcttactacaaaagtggatgccaccttgccaggagccacggtagggcccgctgtatctgggagtaggggactaagagtctgagggtccacaaacggaatttaagaagtaggtagccgcgccctttctgctgcagttttctcttagctatagtaaatcttcctgagggtttggtgtctcctagctgaagaacagaaaaggctgtgactggagcacaggactcctgaatgcctgttctgtagccctcgcttttgcaagagggagatcatg

SEQ ID NO: 321968 - DNA, 575 bp, Homo Sapiens
tgcccggctcccggaagcttgctgtgaggggcgggagcgctgctggaacccgagccggagccggagccacagcggggagggtggcctggcggcctggagccggacgtgtccggggcgtccccgcagaccggggcagcaggtcgtccgggggcccaccatgctggtgactgcctaccttgcttttgtatggctcctggcctcctgcctggggctggaactgtctagatgccgggctagaccccctggaagggcctgcggcaatcccctccttccttcggtttcagctggacttctatcaggtctacttgctggccctggcagctgattggcttctggccccctacctctgtaaactctaccagcattactacttcctggaaggtcagattgccctcctctatgtctgtggtcttgcctctacagtcctctttggcctagtggcctcctcccttgtggattggctgggtcgcaagaattcttgtgtcctcttctccctgacttactcactatgctgcttaaccaaactctctcaagactactttgtgctgctagtggggcgagcacttggtgggctg

SEQ ID NO: 321969 - DNA, 685 bp, Homo Sapiens
  misc_feature (24)..(24): n is a, c, g, or t
  misc_feature (37)..(37): n is a, c, g, or t
  misc_feature (53)..(53): n is a, c, g, or t
  misc_feature (68)..(68): n is a, c, g, or t
gcaaagccccttgccaaaaccccngaaaaggaatggncaagccaacaaaaggncgcttacaggccccnagcccctatcccagctggctaacagcctcagctgcccacacctgcccactacagcccagcaacatggttcccagaaggcaagctcgagcaaaggtagctgggatcccactcagcagggaagtcatgccgttcccacgtgcctcatggatatacccaggcctcgaaggctgagaagagcagggctgtggacagcccaccaagtgctcgccccactagcagcacaaagtagtcttgagagagtttggttaagcagcatagtgagtaagtcagggagaagaggacacaagaattcttgcgacccagccaatccacaagggaggaggccactaggccaaagaggactgtagaggcaaggccacagacatagaggatggcaatttgaccttccaggaagtagtaatgctggtagagtttatagaggtagggggtttagcccggcatcttgacagttccagccccaggcaggaggccaggaggcctacaaaagcaaggtaggcagtcaccagcatggtgggcccccggacgacctgctgccccggtctgcggggacgccccggacacgtccggctccaggccgccaggccaccctccccgctgtggctccggctccggctccc

SEQ ID NO: 321970 - DNA, 1920 bp, Homo Sapiens
cgttttcaatcctcttaattcaggaaaaggagagcccagagaacctgggggacctagaaaaataccagatccctaaaatcaaaaaagttccctgcccccaggcgtgcagagcccagggtccctgggtttttgtgctgggcagggggctgccctgggaaaggggaatacagggggaggcactttaggacaccccttaggctgtggagggtgtcagctgggcctttgaagccactaaccactggttcccatcatggagagccctgtgtggggcacccaagggggtttcctcctgggaagggcccccaacccaagtgtcagagaagctggcaagagctgagggagtgaggtgccatgacagcagccacagcctccagggacccaaacaggcccagctaccagcctggcactgagcatgccatctgctttaggccctggctggcgggcatgtgggcaacttgctccctcagtgcagggggctgggaggcacagatgcaggctcagcactacaaactcaaaacccccatgagagggctcagtcttatgggaaatgcctccaaccgagcccctttgccccaacacactcttcgtctgcctactgaagaaacttctgtaaatagcagagacttgagggaccccttcctggggtacgtgtatttgtatttttctgtttgggtgtttgtgtgtcccagtgggaccacctccccagggaagacgaaggcaggtgggcgggaaggcccggcaggcgccgttacttcttcacgatctggatgacgtcctcatgctccatggtgtgggtcaggcccacccgctgcggactgtacttggtgctggtgccccacaccagggcgtacttgaactggctggcgagtgacccggtggatgcggtggcacacgtgctccactgaggcccctttccggagaatgatggcgtctgtgaagtctggcctctgtcctctcttcttggtgtagatgcaggtcagggccaagtactcccaaagcatctccagcagatagtccaggttcagcttcatgccgcagctgatgaccacactgttgggttttcgggccaggcggtccacctcttccatggagatctggtcgattttgttataaacatacaggcagggcatgtacacccggttgcccacgatcacatcgatgaactcgtccggggagcagtcttctcggaaaagcacttctgcattgaagatcttgtattcgtgcaggatgagctgcaccagcttttccgagcactgggtcagcgtgactgtcgagttaaaggagatgccaccacctttcttgggcttgaagtagatgttaggcttgtgcttgttgaggcggatgcccacagactccagctccttctccagcagagacctctgcacctctcccttggtggcatccagcatcatgatgatgacgtcagccgtgcgcgccacagcgatcacctgccggccacggccttttccttgggctgcgccttcaatgattccaggaaggtccaggagctggatgttggcacctttgtattcaatgaccccaggaatacacgtcagagtggtgaactcataggacgctgcctcgctggccgtggaggtcatcagactcaagaatgtggacttacccacagagggaaatccaatcagcgccacacgggcatcacccgacttcatgacatcaaagccctctcctttggacgaggccgatttggacggttccaggagctgggcccgatacttggcgagcttagctttcagcaggcccagatgatactcagtggccttgttcttctgtgtccgagcgatctccttctcgatctccgagatcttctctaagatccccatggtagcagcagaggtgggcgcacagacagcggtggcggcggcaccggcaattccggtctgacggcggcgacagagt

SEQ ID NO: 321971 - DNA, 624 bp, Homo Sapiens
ctgattggcaagagacaacgaccaatccattttgagttatgatattgatgcatttgaccctacacatgctccagcccacagaacatcctgttgtcggtgacataacctatcgagaagccatgtatattgctgagacatacacaatacagggttgctatcagcactggatcttgttgaagtcaatcctcagttggccacctcagaggaagaggcgaagactacagctaacctggcagtagatgtgattgcttcaagctttggtcagacaagagaaggagggcatattgtctatgaccaacttcctactcccagttcaccagatgaatcagaaaatcaagcacgtgtgagaatttaggagacactgtgcactgacatgtttcacaacaggcattccagaattatgaggcattgaggggatagatgaatactaaatggttgtctgggtcaatactgccttaatgagaacatttacacattctcacaattgtaaagtttcccctctattttggtgaccaatactactgtaaatgtatttggttttttgcagttcacagggtattaatatgctacagtactatgtaaatttaaagaagtcataaacagcatttattaccttggtatatc

SEQ ID NO: 321972 - DNA, 257 bp, Homo Sapiens
taaagtttaagacaggtttattttattagtttttcctaaacttgtctcatgtttactgaatgattttcttagtgtaagaacgtgacctggagctttaacaaatcagtttggataacgcaacctggataaatgcttgtctgtacacaagccatcaattaccactctctgtcctggcctccatgaaaatccaattggtcttaaagcctgtctaagcagagagcaagcagaccacatcatcgtgtttcaacttgaaatcc

SEQ ID NO: 321973 - DNA, 711 bp, Homo Sapiens
  misc_feature (699)..(699): n is a, c, g, or t
gtctgctttcagtcctgaaaagctgaacgagatggttcccctcatcagccaagcctgcgaccttctcctggctcatttaaaacgctatgcggaatctggggacgcatttgacatccagaggtgctactgcaattacaccacagatgtggttgccagcgtcgcctttggcaccccggtggactcctggcaggcccctgaggatccctttgtgaaacactgcaagcgtttcttcgaattctgcatccccagacctatcctggttttactcttatcatttccatccataatggtcccactggcccggattttgcccaataagaaccgagacgaactgaatggcttttttaacaaactcattaggaatgtgattgccttgcgggaccagcaagctgccgaagagaggcggagagacttcctccaaatggtcctggatgcccgacattctgcaagtcccatgggcgtgcaagactttgacatcgtcagagacgttttctcctctactgggtgcaagccgaacccttcccggcaacaccagcccagccctatggccaggcctttgactgtggatgagattgtgggccaggccttcatcttcctcatcgctggctatgaaatcatcaccaacacactttcttttgccacctacctactggccaccaaccctgactgccaaagagaagcttctgagagaggtagacngtttttaaggtg

SEQ ID NO: 321974 - DNA, 781 bp, Homo Sapiens
  misc_feature (73)..(81): n is a, c, g, or t
aggtggcggtaccgcttggtcccactgttctggcccatcgcggtcaggctctgctcgtgtgggtcatgtactnnnnnnnnnatgctgccccccccgagggtcagcaggggtttgcaatctgtagaagtgagccagatggagaggagacctttagaaatagttaaagccggactccagttgtcctttaagatgtccagacagatcaccaccttggctgttaatattacagtgatagattcttgttcggaaggtaaccttagggggtttaaacggatagtctggtgaaaaggtaatgtcaagaaagaacacccctccttcatagacagatcctgggggtcccaatatagttgacctccattcataaatgttgtctcctttgggtccagcactacagttgggaggagggtccaatgtgatttctgcaagttccttctgaattcttttagcactagttgacaatttagcagcggttttgctggatatttttccctcctttttcttgggctgaacttgttctctttctggttcttgctgaacactttcacgttgatctccatcggaacttcctccactagtgcttggactgtcatcaactctttgtgcctcagtggacattttagatccctcagcgccgccgctgccgccgcccccggccgttccagctccggctcctgaggctgctgcccgcggctgtcgctgtggctgcccctgagtcctggaaagtgaagccaccacctccgggagccgccgccgcccggccgtccgcgcgcgcacccgcccc

SEQ ID NO: 321975 - DNA, 415 bp, Homo Sapiens
  misc_feature (402)..(402): n is a, c, g, or t
ggcacgaggctcaagagggttctggtaccatttattcacagactgtatcctcgagagagctgctatatatgggagtgtaccagccaactccttttccagtgtctgtaagtcacctcattaaagtataattagctgtctcctctgggagatcctaccccatcagacaagggcagtgagcccaagcagtgccagaggccctcagaaagggattagggtagatgattgcaactgaaacacaatcttctttctttgccagggtattttgggggttttgccccaaaatataccctgggcatagcattactgcagtcttggatgtctaccccaaacttccacaccatccttcgacccacagctgcacctttatttatttattttgctccagcctgggggacagaagtnacttcgtctcgga

SEQ ID NO: 321976 - DNA, 719 bp, Homo Sapiens
gtgggagggccgggctcagggctagccctctccgctctaactgatgatctgccgaggtcgtccgtagcctgtcatgccggccttgggaggcccctctgttgctgccccatctgaaggccaatgacatgctttccctcctgcagctggctctctgtgaattccctcttatgctcctgcgctttcttcataaaccagttgggatctccacggtagtgcccatcattcttggtcactgccaagctgcccaaagccatcagggtcctctgcactgctgccatgtctttgccttcaaagaggtcaacagtctggaacatgtcagtcttgatgaccccatagtcctcagccgccttcaggaactgagccacctgctccatctgcttgaagaccatggagggtgggttctcgggcaccttcaccggcttggagccatcagggtacaggctgttcaccagcttgctcagaatcacgccattcttcagccagacctggaagcccaagcgcccacggtctgggcggcccacatcagggccacactgcactatgatccactccaccagccgctcctccagctcctcgtcatacttcttctcgattttggactgcacttcgcggctcatgccataggaaggacccttgttggccatgtctggggaaagaaggcttcctcagggctcgcaggaaggagtgaagacttgtgtctgggttcggacagacacgat

SEQ ID NO: 321977 - DNA, 879 bp, Homo Sapiens
ggtcaacacacttgtcttagggacttatattatggggaccggtgtctcacctgataatatcattcaggatcccatccaaatcatttacaagccaccattaggttattatttccataagacatttctctttaaccaggttaattgtttttcttaagaatggcatagactcctctggttagtagttttattatgcacctctttcaaaactgaggctcctcatggctgtgtgttggaacttttttaaaataatgtttttctacattattactgaaatgcatcaggattataaactgacaccactgcttttgtctcattcaagttagtaaaaagagtctccaccctcctttgtgatgtcgacccggttcgttaaccattatctgtggtgagatttccatacagactcatttcctaataagcacgtgcgcaaacatctcagaaacaggattttcatgtattcaaactgtaagcagcactggcgacttagaaaatgtgttagccggaacctggatagctttgcccgttgtatgggatgctggcacactgagaagaatcacagtatccaggaggacctgggggtcctcggatacctgagtttccaggacggccaggggggccagggggacctcttgaacctgtggaccctggtggacctgttctggattctccttgtggacctggggggccaggcagcccccgaggtcctgaagatccagtacccctttcacctttctctcctggcaaacctcgttccccagggggtccctgcatccctggtgtgcccgggaagcctggccgccccccaggcccaggttctcctctggctcctgcgctaccaggaggtcccggtggacccggcgggcctggctggttgcgactgga

SEQ ID NO: 321978 - DNA, 1372 bp, Homo Sapiens
  misc_feature (207)..(228): n is a, c, g, or t
ttaaaattcccccgggtattggccacccggattccattaattgcaggtttaacccgggctttattgaaaattaattcggactcccttattggggagaccgggcagatttccccctttggacaagaaagtggggtcaggaaacagttatgaccatgtggcatttcattacctctttcttcggcacccgacatagatgccttgagtttnnnnnnnnnnnnnnnnnnnnnnttttgagttccaaccccaaaaatattccaggacaagatagggggcaggctgggctggttcttcttcaatgggcttttgccgccaaggaggacagtggacttggcccacatccaggctacccccagcccgcttctcccctgcttagcccagggaggagacagtagaggtgatgggggcagccgggagggaggggccaaggcagtgatgctttcgggtaagaagttgggctgaggctgggggcacagggaggagctgcccaggtgcagttaccattgctcagtgacagagcctcaaagcttggccagggctgaaggtaccacacgggtgtgggtgaggcaggctaagcgggatggctgcagccaaggagctgggggagggccgggctcagggctagccctctccgctctaactgatgatctgccgaggtcgtccgtagcctgtcatgccggcctgggaggcccctctgttgctgcccatctgaaggccaatgacatgctttccctcctgcagctggctctctgtgaattccctcttatgctcctgcgctttcttcataaaccagttgggatctccacggtagtgcccatcattcttggtcactgccaagctgcccaaagccatcagggtcctctgcactgctgccatgtctttgccttcaaagaggtcaacagtctggaacatgtcagtcttgatgaccccatagtcctcagccgccttcaggaactgagccacctgctccatctgcttgaagaccatggagggtgggttctcgggcaccttcaccggcttggagccatcagggtacaggctgttcaccagcttgctcagaatcacgccattcttcagccagacctggaagcccaagcgcccacggtctgggcggcccacatcagggccacactgcactatgatccactccaccagccgctcctccagctcctcgtcatacttcttctcgattttggactgcacttcgcggctcatgccataggaaggacccttgttggccatgtctggggaaagctccttggaagttctcctggaggggcaacagacagtagagccttggcctaaccggccggcgcctgcacccttacacacaccttggcctcgtccgaattcgccacccaggcctcgctacctt

SEQ ID NO: 321979 - DNA, 469 bp, Homo Sapiens; identical to SEQ ID NO: 136856
  misc_feature (47)..(56): n is a, c, g, or t

SEQ ID NO: 321980 - DNA, 373 bp, Homo Sapiens
tttttttaaaagaaagtttttattaacaaaagttttccttaattcacatttcaactttattaaatagtccaagggtttcatttatgaacacttattccagtttagttctcttaaattcatttgcttgttgtgcatttatgtttaaaaaggtaactaactgcactggaaaatgaaaatttatagttttatcaataggtcagtttttaaaaaatcaaaggataaggatttaaaaatattagggcattacacctttttcagaacaaggataatttacagaaattatacaaagcagattttcatcaaatatcaattatttagcgatgttttatttagctgaaatgttatttcacttgtaaaaactatctccggttac

SEQ ID NO: 321981 - DNA, 596 bp, Homo Sapiens
tcacatgagttgcttcacatttttcatcatctttaaggacttcttataaggaaagatgtatcgtatcgcagtcatctgagttagtttctcctccatcacctcatgagtacttaaaaattagacatcaactttcaagagttccttagagagtgtgctctagctggctgcctgctaccccaaagctctgaaagagtaaggttgaagtgctggaacatgctcagattgttttttagttactcaaaagccccttcttgttctgaatgtgaaagctcttcccgttcctgcttactgcagccattctgtgtgtgtggttcagaccctggcctagggcggtcgatgtggatgagtgaagggagccaggtacacggcagcagggcagaggagactatggggagcccaccgcctacacagtaggggcagtagcccaagctccacgcctgttgccatgtggaaaagtgggcctagggtggccacagctttgatttttcaagagacaagaaacctagatgttttttggtgccatctctccatttataaatgttggcaaccaatttgaacactttcagagaccatgttgcaggtgagctgtgtcctct

SEQ ID NO: 321982 - DNA, 337 bp, Homo Sapiens
cttgggaaaaaaaacatttaatgtaaatgtttagccattagaacatacaaataaataaataagctcagaatagctgagaaaaaaaccacaaataagtgaattgtcaatttctcttcagtctcagatatgctatttccaaaatactaataaaatatacaaattaactaataagatatagaacattcaacataaaacacctaaaataaaaaagaccaaccctaattattttatttctgtatatcaagactacaatagcattaaacgctcggacgcgtggtcgacgaaatcccggcattccgaccgtaccacctgcttgtactcagcttaaccagatggc

SEQ ID NO: 321983 - DNA, 612 bp, Homo Sapiens
  misc_feature (184)..(209): n is a, c, g, or t
cacatttttaactatttattgaatgaggcagtcaaagacagaatgggatacaacacagaatccatgctctgctactggggttttgcttttttcttcgtcttggcaacttctcaaactatttggaggttatttcaccacaaaggaacatggactttaaagtccctggacaacttcacaatgacgnnnnnnnnnnnnnnnnnnnnnnnnnncaaattgtagaactaggactatttatatgtaaatttccctcccctccccccattacgtacagaaaagaacatataaagaacattagatagttttatataaaacaagcaaatacaagaatctgaaacttctctcaaaggttgagcaagacgtggagaatcttttaatgtcgcattaaaaaaacacattaaatacaccatcacacacatggggagagctgggaggagggatggaggagctgtccctgtactcaaggttcagagatttggcctgttgaaaagtcaggtgaattcagctactggagactcagggcttgcagctgagaaagacagagttaacggttaccaagaacacccagatagtcacacctctgaggaggcaagctgctcccggcctgggccacga

SEQ ID NO: 321984 - DNA, 407 bp, Homo Sapiens
  misc_feature (337)..(337): n is a, c, g, or t
  misc_feature (373)..(373): n is a, c, g, or t
  misc_feature (393)..(393): n is a, c, g, or t
ggaggcacaaacacaatttatttcaatgtaaaggtactaccaaatgaaacagtttaaatgcttgtaacaaacgtgttatccaaaacagcacaatatgatgatgctaagacttacaaaattaacctaatttacagtattgtcaaacatgatttcatacaaacttgaataaacaccacatctaactaggtcaaacaactaccgagttcaaataattgatatgggaagtattttgggtaaagtgcccatagtgagggtttaaaaagcagcccctgttttctataggaaaaagttgtggacaggtggattaactcatcacattctctggcaatactacttnggcacttcattatacactcggggggaggcaataccngggggggcacataggctttnttttcacattgggg

SEQ ID NO: 321985 - DNA, 1026 bp, Homo Sapiens
  misc_feature (348)..(349): n is a, c, g, or t
  misc_feature (352)..(354): n is a, c, g, or t
  misc_feature (356)..(364): n is a, c, g, or t
  misc_feature (366)..(370): n is a, c, g, or t
cccctttaaattttttgaattattcggaaggcctttcggcctttggggacttccccctgttttgaattaggattccccagttatattggacccttccaagaaacttcccattttgggaattttggtttcaagaacacgcctccgggtttggccgcccgggggcggtttttttaatttgggggaggaaatcccaaggcccttagttcattggcccagggatttcccttagggaaaacaggctattgacccatgtttcactttaccctaactgggccccgcggcgcccaaaacgaaatggttttaggaaagccttcttcgaggggcggagggcggccggacaattttttnnttnnntnnnnnnnnngnnnnnttgaaagtatcacaccagaagtttattatggaacaatcacatatgttgactctcctttgaccctcactgcagtgcactttcattacttatcaatctgggggcgggaaaaaggggtgcagccagacaagagaatatacaggaaagaagcattgtatataagcctatgtatttcagtaatgctgctacagggggatacaaaatcaggtgccagcctccagaaaaaaagagattttttttcttccctcagtctcatttggcccctcggcgcttcctgaagtagcgattataggcagcattgtatccataaaccatggcgtagcgttcgcaaagtctgtagtcatcacaggcttccctattgagctcgtggacaggcttagagcgttctcggatcctctcttggactttagctctccatctctgctgaggggatatgaaggtatttgcatttctcctgttaatgaagggattaagttcataagattccatgctttcatgtgattcataacacaaagttactaccgctaaggcggccaggatggcaagaaggatcaggctcttcatggtttcgtcctgcaggtcagtctcagggtcttgtgtagcagcagtagggagagaggctcctatgggatgttagtggaaggctgtgaggtttttat

SEQ ID NO: 321986 - DNA, 515 bp, Homo Sapiens
ggtgggataacatgaggtttttattttcttttaggtgtttatctatgttttccatattttctcagtgtaaaatgaagtgtctagcacataacagatggtcagtaaatgcgaatctcctttctcccccaactcctgctctcttctctgaaaggacaatgaggaaatagaaggccaagggcttcccgaggacttctccatcaggcaggaacctactgaagctttgctctttctgtggtctgtagctgtcagccctacaatagttcatgttcagccaacatctgacccagagccagggtcaggagcttagtagaagggcctgaagtagcccctgggatctgggtactccatgtagtaaccctgcctggggctgaactgagatctccacagggacttgtttctgcagaggtggcaagttgttcagggataaaagagatttttgatggaagaagtaagcaatacacctcagccctagcaaccatagttcccaccctggggaggggaagaacacaggattt

SEQ ID NO: 321987 - DNA, 955 bp, Homo Sapiens; identical to SEQ ID NO: 64882
  misc_feature (225)..(243): n is a, c, g, or t
  misc_feature (743)..(750): n is a, c, g, or t
  misc_feature (753)..(754): n is a, c, g, or t
  misc_feature (761)..(761): n is a, c, g, or t
  misc_feature (819)..(819): n is a, c, g, or t

SEQ ID NO: 321988 - DNA, 730 bp, Homo Sapiens
  misc_feature (225)..(273): n is a, c, g, or t
  misc_feature (499)..(550): n is a, c, g, or t
  misc_feature (552)..(553): n is a, c, g, or t
  misc_feature (558)..(560): n is a, c, g, or t
  misc_feature (564)..(566): n is a, c, g, or t
  misc_feature (568)..(568): n is a, c, g, or t
  misc_feature (571)..(573): n is a, c, g, or t
  misc_feature (576)..(576): n is a, c, g, or t
  misc_feature (579)..(585): n is a, c, g, or t
ttgggtttgagctacagtcatgaacttttggcgtctactgattcctccaactctccaccccacaaaataacggggaccaatatttttaactttgcctatttgtttttgggtgagtttcccccctccttattctgtcctgagaccacgggcaaagctcttcattttgagagagaagaaaaactgtttggaaccacaccaatgatatttttctttgtaatacttgannnnnnnnnnnnnnnnnnnnnnnnnnnnnnnnnnnnnnnnnnnnnnnnnatatgtataaggagcctaaacaatagaaagctgtagagattgggtttcattgttaattggtttgggagcctcctatgtgtgacttatgacttctctgtgttctgtgtatttgtctgaattaatgacctgggatataaagctatgctagctttcaaacaggagatgcctttcagaaatttgtatattttgcagttgccagaccaataaaatacctggttgaaatacnnnnnnnnnnnnnnnnnnnnnnnnnnnnnnnnnnnnnnnnnnnnnnnnnnnnannattgnnnaaannnanaannnaanaannnnnnnccttggcggccgccctcggcccctaaaaaacttttctaaacatttcttttgggggcgcggcccccaaagggaaagggaacagtgggcaaaaccttgttcccaaaggaaaccccggggaaagaaataaagggttggaattctcccc

SEQ ID NO: 321989 - DNA, 974 bp, Homo Sapiens
gcttgaattgtgttcgggaggttccatttaggcacatggatattaaaggggagcaaggcccattgattagggcccagagagggcccaatctggaggttactttgctggatttcccagctgagggccaaaagttgcccaatcacttaacatatctggggtcattcccaaccccctggttccagcaacatcaacaattctcttctggttaaaaagatgtccagtccaagatactctttatacttttccaggaatcatcaatgtcagcaaaatttcgccagtgattgcagtactgtcggatttctgtataattgggcttttgaaagggccacatataaagaggccactcacaggagtacacaatgcttctgccagtcctattcagggccaaggacatgtgcttataaccatctgccaaattttccaaactgtcacagtaacaaccatcaaattttagcagatctactccccagtcagcaaaggtctgggcatcaatgtcgtagtatccaaaactcccagggaagcctgcgcaggttttatttccaacatctgcataaatccctagcttcagtcctttgctgtgaacataattagctagctggcgaatcccatgaggaaagcgctgagggtctgcctgaagtctgccttctgaatctctttggggagccatccaacagtcatcaatgcagaggtactcataacctgcatccttccagccttctgagaccatgagctctgccatctccatgaagagcttctcactgatgcaggaatctggctcttcctggcagtcaaggttgcacatgaagcgctcccagtgcagccagcccatggtaggcgtccttgccaatccattgtccagtgctctagccccagggatgtcccaggaaacgagggccaggaagcgaagcgcaagcgcgcagcccagatgtagttctgggttcctcagctgcattgtcacggtaaccggacagcat

SEQ ID NO: 321990 - DNA, 1474 bp, Homo Sapiens
tttcacagccaattttcacactgttgtttcacattctcacagccctcagcacaggtcacgtcccagcccagctctgggactttggttcagggctcagagcctctggtctgggctgatcgaaaacctcctttgaccctgtggcagcaggcggaccttggctcttctcgtccttacccagagctcagggcagtgccccgtgcagtcgccccacttccacgaaggcctccacgcagcggtcaatgtcttcctcgctatgcactgctgagatctgtacccggatccgggccttgcccttggggaccacggggtagctgaacccgatgacaaagatgcctctcttcagcatgtcatccgccatgcgagaggccagccgggcatcacccagcatcacagggcagatggggtgactggctcccgagatagtgaagccagcagcttccatcttactacggaacctctgggtcttggcagccatagactggacaatggtgttacttccccatcagcaagatctagggctttggaggcgcagccaacgacagcaggtggcagactgttggagaagaggtatggccgggcgcgctgccgcagcagggacaccaggggcccaggccctgtcggtgtagccccctaatgctccacccagggccttccccagggtggagttgatgatggtgacctggtccatcacacccagcagctcatctgtgccccgtcctgtgggccccaggaagccagtggcatggcattcatccatgaagaccagggcaccatatctagaggcgaggcagcagatctcctgcaggggtgcgatgtcgccatccatggaaaaggccccatcagtggccaccaggcgcagccgatgcttctgggcctcctgcagcttggcttctaggtcggccatgtccaggtggcgatagcggtacttgtgggccttgcacagccggatgccgtcgatgatggaggcatggttcagctcgtccgacaggactgcgtcctctggggtcagcagggcctcaaagaggccggcgttggcgtcataacagctgggatagaggatggcatcctcccgctggtggaagcgggctatttttgcttctagattcttgtggatgctctgggttccacagataaagcggacagagctgaggccagctccaaactcctccagagcctgcagacctgcctggatcacctcagggtggctgctcaggcccaggtagttgttggcacagaagttaaggattcctccggagacgccgtccacgcggatgtgcggcccctgacgggacgtgatgacccgctcactcttccaagtgccagctccgcagatgccttccagctccccctccagaatgccacgcagctgggccagcgctgactgtgcgcggcggccgcggggcacccagaagagtgcggcgcgccaggcgttcccaggccacatcgctcctacctcgcccgagcgcgcctgcct

SEQ ID NO: 321991 - DNA, 607 bp, Homo Sapiens
ggtgtaaatccatagtaataagatgagttagaccagctttgcacatcatggaagccagcaatttagagacaatggagcctctttttctcatcttgcactgcttgctgtaaggaaagtagggtatcacgccaatgatgctcttggcacaagaggtcttacatgcatacaccatgatcaggagctccatgatggtggtgttcacgtccttcgaaacagtttggatgatgaaaacatcttttcccctcacagactcttgaatttgtactctcgttttctgcaattttctttgatagctccatacatgatgaattcgagtttgctgaaaacaacaccagaccacctttggttatgttcatcttggtttctaattcaggtggcgtcacacaaaacatcaaaaccttcttggttttccgattttcagagcaagaaaggcggagctgaagagctcaatgttttactgattgctgcttaaagtcaattatggacaacctccttttattctctgacaacaaaattcctcctggccccgaccccagccccggccccgccgcagcctcagctgcagaaggaagaaagcgccgggtcttctggcggcctctctaggagc

SEQ ID NO: 321992 - DNA, 990 bp, Homo Sapiens
  misc_feature (116)..(134): n is a, c, g, or t
  misc_feature (201)..(201): n is a, c, g, or t
gcttcccccatttttcgccaccccagattccccgccgggtgggtttagggtaaaatgttggatttcggaccaagtgttctggggacggatggttccccgctggggtgtaatacagnnnnnnnnnnnnnnnnnnngccccaagagactgcgcagggcccaggttgcccgacaaggagcttctcaatagaattccctttcccncccccaggcataggctgcagagagggaggccgtgcggcggtccagccaggacttccacggcattgagtgagagaatcctgggagaaggcgtaggccacaaagcctgccactgctgccaccaagctgaaggcagcccgtaaattcatggggcctgcatggagccccagggtgtacttggcacccacgcccagtgcccaggtccctgccaggcaagctggggccagcagggcgtgcacggcagtggtactgctttccaggtacaccacttccctggccaaggcgaacttctgggcttcacgggacaaggtcagggaagctctcagccgggcgcctgctgggctccgccagtccactgtatgcccatgtatgaccacgggatggttagtgttgatcactaggtctcccaagaaactggcagggatgcccaccacagccccagcagggagtcttgggaagcctgcactcacaggctggaaggtgaaggtggtgaagggcttgtagcaatggcctgaaggaacacctatgtcctgtagcacctcttggaagaggctctgcagctgtggagggagcggagctggctggccctgaggccagtactggtagagccattggaccacgggatccgggaagaggtggtacgagactggaactccaaacaggcctgcacaggaacccaccaagaggcctgtcctgtgtctctgcacaaatgctgcggtccgccacaggggacctgccatgagtgtagtcactgcggaccctcgtgccgaattcgccacccaggcctcgctc

SEQ ID NO: 321993 - DNA, 805 bp, Homo Sapiens
  misc_feature (13)..(13): n is a, c, g, or t
  misc_feature (219)..(219): n is a, c, g, or t
aattccaatccancccacaggccataggtctgcagagaggggaggcccgtgcgggcggtccagccaggactcccacgggcatgagtgagagaatctggggagaaggcgtaggccacaaagctgcccactgctgccaccaagctgaaggcagcccgtaaattcatggggcctgcatggagccccagggtgtacttggcacccacgcccagtgcccagatncctgccaggcaagctggggccagcagggcgtgcacggcagtggtactgctttccaggtacaccacttccctggccaaggcgaacttctgggcttcacgggacaaggtcagggaagctctcagccgggcgcctgctgggctccgccagtccactgtatgcccatgtatgaccacgggatggttagtgttgatcactaggtctcccaagaaactggcagggatgcccaccacagccccagcagggagtcttgggaagcctgcactcacaggctggaaggtgaaggtggtgaagggcttgtagcaatggcctgaaggaacacctatgtcctgtagcacctcttggaagaggctctgcagctgtggagggagcggagctggctggccctgaggccagtactggtagagccattggaccacgggatccgggaagaggtggtacgagactggaactccaaacaggcctgcacaggaacccaccaagaggcctgtcctgtgtctctgcacaaatgctgcggtccgccacaggggacctgccatgagtgtagtcactgcggacaatctccgccgccgctcggaacgcctacccc

SEQ ID NO: 321994 - DNA, 1877 bp, Homo Sapiens
  misc_feature (1653)..(1780): n is a, c, g, or t
  misc_feature (1805)..(1829): n is a, c, g, or t
gcacgcgcgttgtttccgcggtagtcagggcagtttctaccgcaggcttaaggaggcttcgggctcctgggatttctgtccgcgctcctggccctcgtccttcgcgccagagcaggttcgcaaactcctcagacccttctgctcccggccgccgctttccgccggggcgagacccccaggttcaaaatgagcctgtttggaacaacctcaggttttggaaccagtgggaccagcatgtttggcagtgcaactacagacaatcacaatcccatgaaggatattgaagtaacatcatctcctgatgatagcattggttgtctgtcttttagcccaccaaccttgccggggaactttcttattgcaggatcatgggctaatgatgttcgctgctgggaagttcaagacagtggacagaccattccaaaagcccagcagatgcacactgggcctgtgcttgatgtctgctggagtgacgatgggagcaaagtgtttacggcatcgtgtgataaaactgccaaaatgtgggacctcagcagtaaccaagcgatacagatcgcacagcatgatgctcctgttaaaaccatccattggatcaaagctccaaactacagctgtgtgatgactgggagctgggataagactttaaagttttgggatactcgatcgtcaaatcctatgatggttttgcaactccctgaaaggtgttactgtgctgacgtgatataccccatggctgtggtggcaactgcagagaggggcctgattgtctatcagctagagaatcaaccttctgaattcaggaggatagaatctccactgaaacatcagcatcggtgtgtggctatttttaaagacaaacagaacaagcctactggttttgccctgggaagtatcgaggggagagttgctattcactatatcaaccccccgaaccccgccaaagataacttcacctttaaatgtcatcgatctaatggaaccaacacttcagctcctcaggacatttatgcggtaaatggaatcgcgttccatcctgttcatggcacccttgcaactgtgggatctgatggtagattcagcttctgggacaaagatgccagaacaaaactaaaaacttcggaacagttagatcagcccatctcagcttgctgtttcaatcacaatggaaacatatttgcatacgcttccagctacgactggtcaaagggacatgaattttataatccccagaaaaaaaattacattttcctgcgtaatgcagccgaagagctaaagcccaggaataagaaagtagtggctggaagaactctggctcagccagagttgtttctctccactctgcctcatctctgtacgaatttgggtcccagccttgttgggttgtcagccatggacatggatttcaacccctggagaaaacgatgtcattgttcagcagctgagagcccaggcgtccgcggcgacttgccgtctctccattccactgcctgttgcagagtttttctgtaactaagggggttgaggttattgtagacgttagattgcgggcaccgccagggattttgcagcgcttcagtgtacgtgttagagaatattggaaaagcgtctgtgagccccgtgctgtattttgtaataaagtcttttgcagattgnnnnnnnnnnnnnnnnnnnnnnnnnnnnnnnnnnnnnnnnnnnnnnnnnnnnnnnnnnnnnnnnnnnnnnnnnnnnnnnnnnnnnnnnnnnnnnnnnnnnnnnnnnnnnnnnnnnnnnnnnnnnnnnncttgtggggcccccctcggcccccnnnnnnnnnnnnnnnnnnnnnnnnngggccccggcccccaaaaagaaaggaaacggggcaaaagttttttccc

SEQ ID NO: 321995 - DNA, 906 bp, Homo Sapiens
  misc_feature (792)..(792): n is a, c, g, or t
tacaaatgaagaattttctagcaaaacatgtttttaaccatcagtgctcaattgcattttcttcctttcgcagccagtcagtctttcaaactattgacagtaagataattctcacgttcacacctggtggcaggcttcactgtagggacggacattgcagttacaccacgattccttcctcttcactggctcgaggtaaacccttttcaaggaaaaacaactctaggatttcttttttctgtgtacgtagaccagtcccatcagtgtataatctctctctcacacgcctctctccaatagacagcttgtatttgcagtatttcatatttataaatatgcgtttatttaaaaggagaacaaaagcttgactctgattcacagttttgtatgtagctggtttgacgtagtcttttgtattttccctgccgaagtgaattgttggagaatgtaaaccgcctccacgtggcggcagacttcctaaggccccagctcgctggcctcgcgctgggcggctgggaattccacctgagaacaagtcccgcaaaccggggacggaaggacatttgacttttatttttgtatttaattgacatgaatgtaaaggggacagctcagggttgttttggagcctgttgactttgtatctctgcctgtgattttcttttctaaatgaaactccatgtagcaaccaggacgaagttgagaaggaaaacgccaaatgctttggttattagagtttaataggtaagctctgttacactaggtggttagagttccagaatgttcttttgnttgcctaaccttgaagaaacatgtgccttcagcctagatgtttttggcttcctcttttccgcaccttatacctgacagtatgacccgatctctgcgccctttcctgggggcggc

SEQ ID NO: 321996 - DNA, 1285 bp, Homo Sapiens
  misc_feature (952)..(969): n is a, c, g, or t
  misc_feature (1218)..(1218): n is a, c, g, or t
tatcgaggcctgggtggcgttctcggcacgaggggacagcatcagcttgctgctggaggccgtgcggaccagaaatgaggagctcgcccagacatggaagaggtctgagcagtgggccaccatcgagcagctgtgcagcacagttggcgggcagctcccaggtctccatgagtacggggccgtcgggggctccacacacacggccactgcagccatgtgggcctgtcagcactgcacgttcatgaaccagccaggcacaggccactgcgagatgtgcagcctccccaggacctagggcgcctgccctctgctggctaggaccgggcccagcccagcccttcctgaagccagaagcgttgctgagtgtgttccctgtaactgccccatagtgggcagccctggaggaacaaggggctggctgtcctgggctccctgacccactgaagcttctcagcacgttcctccctggagagcgggcgccacggctggtattctgcaggctgaatgcagtctccagactggaaacgcagagcggctcctcacgcctaatcctgttgacaagtcccccgccgtgttggaaagacctctcgcctctacgtggcacctggaattggggcgcacagggaggggcggatgctgccaccacccagccttctctttattttcagtgctttttgtttggcctccctgcccccatgtttttctggctgggagctcttggttacccccttgtctgactgcttggtggcaggcaccctgcctgtgagggccactttcctcttctagtagctgttgtctggtggggacgcagtggccctggacacggctcccctctgcaggtctgcaggtcggtttgctgcctgccctcctcctctcacccgatgtccaggtgggattttaaagtctgcattggttataataacagttatcagtaattcctgcccagaagacnnnnnnnnnnnnnnnnnnaagataaaaactgcacaaaaggggagtgagagagactagtttccacatccttccctcctttagtgaagcccccgaggttgtgtccagggtgatgagtgtggacgggggcaccagtcagttctcccttgaagtaaacctcagtgcctgagacttttctaccaagccacacagctgcagcaactgcagatactgcgggctgagcaggagcagtggtggcgcctgccctgaggctgccctgcgatggcctgngtgggagagctgggtcaccggtgccgatgctctggccctccccaatacgctgcttcgtcccactgca

SEQ ID NO: 321997 - DNA, 606 bp, Homo Sapiens
gaaaacacttggaagatggtttaatgatgttttacaacagaaatgaactgtacagttacagtaagtttaatatatatataaaaaattacagcagacaaatgcatctacacaaaatctaccacttcattctgattcactgtcacctacacaatctttcccaagcctacagcccctgcaggcagccctaggagggggaatcatctaaagggcacttttgagagagacagcaccgctcatattccccgccacctcctcaggcttcaggaggcatcagctaattccccaaaatgtaaagttgcctgtgtttcaggttttcaaaaccaagaaaacgtgtgtctcccaggggcacagataacaaggtccagcacgcaagttatcagctgattcttagaaaatattcctatcagaggggaaatatttggctaacaggcactctggggcagtaaggctacacaatagccacccagagtgcagagttatctaagagaaatgtagaaggactcccaataaaccacctcagaattgtcactgcctcattcaagctgctggacaattttggaaagaatcatttacaccacatcttaagtttccacaaagaagaactcc

SEQ ID NO: 321998 - DNA, 1203 bp, Homo Sapiens
  misc_feature (194)..(194): n is a, c, g, or t
cagtgccagcagctccctttgtagggggtcagtagctggcaggttcgtggcacagagcggaagcgcctcaggtggcagatgttcttgatattgtccaattgtgggcaccccaggagggaaaggcagctcaagacccgaggaaatatcaggctgatggctgggcaggcccggagctggtagtgtggctggggagnttcctcctggaagcaggagaaccgagcctcccccctgccgcgtgcagcaccagtggggtcgggtcttgaccgagaactcggcctcacagaatcggctcattgcttcctcccacacaagtttggcacactctaggcggtttgtgtggctgcggcagtggcagcagcgggaatatccaatctccaggaaattgagggtctcaccctggcgaagtgaggtgggagtagctggactgtggtaggttcccagggaccatataccacatgctgacggttaggaaggcagatttggttcagattgtctggagaaggccgcccaggggggaagccatccagccggtgccccagcccccttgggaccggtcctgttggcagtgctgggctgcattccaggactcaggttctggatggctctggtccccaaatggagctggcgttccttccttctgttcattggggtgctggagagagggcagctctttttggagggggacagcttcctgagggagagggggacccacttccttttcagcagggagttgggcaggtagcagcttttcctgttggagaggggtggcctcctgagagggagggggctgcacttgactctgtccctcaaagggagggccatgctgagaggagtcagggtgatccatggggaggcttcgggataggggtggggaggggggagctgcgtagccaacttcttgaaagtgctctggcctcagctgcctctgtcctgtagccgtgaagcctccctcagaggcagcagaagcaacagccaaataggtcaagaccaaggctgctctggctgtggtccccatcctggggcaactgaccactggacactcagaggtgggtcctctcaggcaagtctggatgtgaagggccggccactgaagcttgtctggtggctgttacggttgtgagcttcaggaccagctcttcttttataattgtctggtgtgatctcccgccctcctcagcttcctgccatgactcagtcccagct

SEQ ID NO: 321999 - DNA, 1513 bp, Homo Sapiens
  misc_feature (14)..(14): n is a, c, g, or t
  misc_feature (43)..(43): n is a, c, g, or t
agtccccaccgtgntggggccctttttcccatttcctctcctnttggggcacctggtgccagaaacttctcataaagtcactgccagatccccagatccaggatccatgtatgcagggtgggttctgtagctgagctttcaacagttttcgagctggtggagggatctaattgttgccatgcttctcttttccgagctgtactgacacctttctggaaagcactgggtactttcatccataaaggcctgcagctgtttcactgatccttgcagttcatccatcaccaactccatacagtcaaagactttgctctggttctgtaatattttctggtagtcaggttttgtattaagaacttcattctgagaagacccaagatatgtcataggttccactttgacctcagtaattttggcctcagttgatcctctggacaatatctctttagcctcctgctggtagtgaagcaagagctgatcccaagtctgacgttctaaagaaaactttgttatgtattccttcatctcagccacagatgcttccaaagaaaaatctgatgcttttccatttgaatcttcaaaacatttttgtagagttccatcagtttccagtccgtctgcaaaatgtttcaattcttcagaaagagaagatgctttggctctaaaactttcaagactgaagcccttagtgtcccttaggaaaggttcaagtttctgaatagagaactggaaactggaaagcaggagacagccaagccgtttgctttctgctaaatcgacactgatagaccggctgagctctgtgatgccctggtgaatgggatgcagcgacttccgccggttcgtttctttcatacttgctcgccgccaggattgcctcctgtcttgataactggcagattgttcttgaggagacaaatgaagggacttcgactgaagtctttcctggtggctgagatcacaatttcccccttttttagggctagagccaaggtgaattctttcctctgaaacgccttgattcatctccagggaggcagatgttttagcaaacacttccacaggactgagacttgattccaattgatgatcatgagtcttagacatcactggtcctttttcatctatgatctctgatctagtcactgaagtcatcctaggtggtaaactccctgtttctggagcctagacccctggcacggcagatacgtctctaatggggtcggtaagggggactgccctcgggtttcatttcacccgggaggaggtcgcagcgccctcggggacccccagtgtccacggtcggggccggggctgcggcgggtcgagctgggccgacgggtacgacgccgaagagattagtgcggcggcgggcggggccacatcagaggacaagtctgtgacttcctgacgcccgtccagtccggaacctccgtacctgaaacacaaggccacgggtcgctctccacagccccaggtcactcctggacgccttgggcacccgcagccgata

SEQ ID NO: 322000 - DNA, 1563 bp, Homo Sapiens
attccaccttttttcccttaaagtagtagtagaaattccggtaggcccctgagactggccctggtgagcgaggaaagggcccgttgggcggttcccattctgaggccggggggtgaaataaccgaagttccgttctcacagaaaaggtgcggctgccccttcttgacccagaggcgggatgggcaggtgtcttcgatggccaggcggtatcagggtacaaccgcagcagtgcaaggggcttcctcaaggacaaatggctaaaaatgtcacggtgaaaatgtcatccccaaagagttcgttctccctagacccgtgggggcaacccagccttcaccgtgacactggccatctgcaaagtgccaactgttcttcatcgagcacgtgattacgtcactttcttcctttttgtgcgttttgtgcagcccctgccaaaccagccccctaggatgggggccgagctaagcggtgcaccccggtccccaggcggggcctcctctctgcttctgcacagcgacttccgactgtggctgccttcttcaccagcacgcaggggagtcgccagtgagaaaatgggatcctgccacctgctataggcggggatctccaagcccagctcggccatgaggagccgcatgacgtcatcacacttcccatgtagcttcagggcagcccagtcatccttcggggtccactgcaggttcacgatgtaaagctttcggccgccggctagggggcttggtcatgcaccagaggcgtgggtacttctttagaaccttcaggctggaccctagacacaggatggtgtctgctctgctggcagcctcggtcgccgcttcccagttcagaggctgccccaacgtccccctctccccaaagtgcacaatggtgtcccgcagctgggtcccacacttgtggcaggtccggcctgtctggtgtctgtggagggcagtgcgctccgtcacatcgaacacccgcacgtactccctgttgggaacgcaggaggtacagacttcaatgtacatgttcccgtggagctcggagatggccgtgcgcggcagcccactcctcaggtggagcccgtcacagttctgagacaccacatgctgcaccagcttctgctcatgcagacgggtgatgctcatgtgggtgagggttggctcggcctcgctcaggtcggcagcactaacgcttctccctttctgaagcagtgtccacactccattagggccccggtagtctgggatagacgctgccgtgctgattcccgcgcctgtgtagacgaccaagtatttggcgttccggacggcgctggccagctcccggaccttcccccgcagctcctccgggtcgtcgcacacctggtggtggcgctgcttctggtgctcgtgccgccggctccggccctgctgctccgctttgcaggtcggcgcgtctcggcccgccggctgccctcgctcggtggtgcgctccgccgccgccttcctcaggatgcgcgacacctggcggaggcgctccctctgctcgctcctcccgcaacctccgacccgctccgccgctttgcgc

SEQ ID NO: 322001 - DNA, 865 bp, Homo Sapiens
agcatgagctaccacactgggcctatctggcctatacacggggaaataggaaaggaagtgactcagcaaagccccctgccagatagagtcctcccaagggtctcctatcactgtggcatcctccctcacagcagtcaaagtgactacacttgtacccacagactatcccaactgcagaaccaacttcccacttgtaaaaacacaatgacgtgcaggcttactgagcacatgcaggggcaccgttgacctcaatgagccacaccttcagctcctcatcgaccatgaagtcaaagccgaagagctggaagctctggtaagggaggtgcttggtgctaatggcaggctccacgctcaggaggcagttccttattatatgtttgatttgtagtaagatactactttctagggtaatgttcaaagcacttgttaggtactgattgaactccttgaagaacatttcatttccttcttcatacttcccgtagttctttgaatactctttttgaatgcagtgattggtcaaatggcaggttttgtcttggaaattatcaacatgatatggttctgaagcagtccgaagcacaccctctctatagaggtagatattatactgatgatccaccaagacccagcttcggatgtcaaacttgcgatgacctggctcaagcagcagagggtgctcaagatatttctggatcacgtgcacttggccctggttgtctatgaaatcgagaagctctgaagcctctgaggagatgagaatgccttcacctttggcaccggctgatgactttgcaatccaaacgttgccctctccatcctctttctttctgttataagaggcgagaaagaattctctttcatc

SEQ ID NO: 322002 - DNA, 799 bp, Homo Sapiens; identical to SEQ ID NO: 143477
  misc_feature (38)..(38): n is a, c, g, or t
  misc_feature (109)..(132): n is a, c, g, or t

SEQ ID NO: 322003 - DNA, 1747 bp, Homo Sapiens
ttttcagcgtggatttattttatttcattttttactctcaagagaaagaagagttactactgcaggaacagacatttttttaaaaagcgaaactcctgacacccttaaaacagaaaacattgttattcacataataatgtggggctctgtctctgccgacaggggctgggttcgggcattagctgtgccgtcgacaatagccccattcaccccattcataaatgctgctgctacaggaagggaacagcggctctcccagagagggatccacctggaacacgagtcacctccaaagagctgcaactgtttgagaatctgccaagaggaaaaccactcaatgggacctggataacccaggcccgggagtcatagcaggatgtggtacttcagggccctgggcaccctgttgatcacgagcctcccgtcatagctcagggaggcaaacagccacgggtcagccgaggaccagtccacggcatagacgctgtcctcgtgctcctcgtaggtggcgatcacgttgtcctgcaggggctccttgctcttctcttcagaacggtggtcctcctggtcactgatgtcatcgtcgtctaccaagtggccgaagggctccgacgagatggacaccatgttggaaaggatgactctgctgtcactgctgcccgtgaggaccagctggtcatgagagtggttgtagcggacgttccacacccagtgggagtgctcctccagggtcttcacgggttcggtgacatttcgggtgtcccagaacttcaccttacagtcgtctccgcagctggccaagtagtactgcttattgggattaaagtcaaggtcccgcaccagctgtccgtgggcattctctatgcagtagatctggctcatgctccgggtgtcccagccacggagggtggtgtcgttcgctgtggccacctgggtgcagttatgatgtgggctccaccgtcctgaggtgaacttcagttgtcccttcccttccagggacgctgagctggccagcacagcctggctcgagctttcctgtaaatcccacagcaggatatggttatcagccaaggaaatgattttcttcccatctcccattggctcccacacgacacaggccatgttgccatgggctgtgttgtcaaggtgacagagcagctccagggtctgtgcagtgctggatgaatcatcaggggactcgtggctgcctgattccaattccttcggcatcctccacacggctgcacatgtcaggactttgctgtctgaagttctgttgtagcaggtcgtcagcacacctctgtctgcagggctagcgctaatatgccagatttcacccgcttgatggaggaggacatttttatttataatgttgttttcatcgtcaaaatctatgatatggatctgattatcatatttaagagactgcgtcccaaccaaaaaccgaatggcatctgtttctgcagtttgaggtgttaaggcacgtgcctggaactccagcccgtagatcactggtgcatcgtcctccatgctgcggggaagcgacccgaccccggccactcacacgctaaggacctcgctacggccggcgcgtccccacctcgcgggcgtgttcccagcgcccattcattccctccccgcagctacgactccaactggaagtctttctggcccagaacagcttccgtagcccacgcgtccgcggacgcgtgggtcgacgatatcccgagatccggggaccggtaca

SEQ ID NO: 322004 - DNA, 788 bp, Homo Sapiens
cccttatgaatacatgatctttcttatgcacgacggaggagctggaattgattgtgctttcgtcatcgtgcatcatgacaagttcggaactgctctcgtccatgacttcctgcatgctgttcacactgctgctctggctgcctgtgctcacggacatgcttggaatggaatggttgctgcccaggctgtccatttccctgttcaggctggttccatgttcactgtcttcctcatcctcctgtgactcattcaagggtccattccgtgtctcttggaaaggtatttttttcatttttcggtactgtaggttatctagctcacgaactgcatcttttgtcctctgtatgaggtcaatgaggacacgtagtggccggtctcgtcgaacaaagtcatgccttaatagttctgctgatgttggcctttcctgaggtattttctgcaagcagtaatcaacaaatctcctaaaggagtctgtccattcattagactgtaacgttggggagtcattctgggcaatgtgatataaggcactcattgcattcatgttgaaaaggggcggcttccgttccgccaattcaatacaagtgacgccaagtgagcaaatatcaactttcccatcatactgtccttcatccatagctaagatcacctctggagccatccagtaaggtgtgcccacgaaggagttggcaggagaagccattgaagcagatccaaaatcagctagttttacctgacctggctctgttagaagaatatttcctgctttaatatccctatgaatcaat

SEQ ID NO: 322005 - DNA, 780 bp, Homo Sapiens
ccaggaaacccgctcggggtttgccccccgcggggcgttttgttttatttgggtgagggaatcgcgaggcccctaattcaaggacccagggttctccctatggaagcaggcttagggcccaggttccgctttacctagatgggcgcggcggcgccaagaggaaaggtttagaaagcgttttcggaagggccggaggcggccgacagggaggagtcaaggagcggggcatggaagttcgggaatccaactgactgttatttggcacagaatacaatatggctacagaaacagcaaactgaaaaagcaaagcagaaaaaaacacagttccatccaatttgtaattaggtaacagcagggaaagtcattaaatgaataacaaaacaattaagcttgatggaagaagtcttttcctagtgcccatacttttggaattcccactctctgttgtccaatggacacacctgtcgtgttttgagccagcgagagatgcagtggaagtgaaaagcatggttacagactccccatgcgacagtacactcttctgaagtagcggacgcctggttagcttgacattctatgcaaagatccataatgtggttcctgcagatggcacagttatcaaccacaatatcccaggcccagagggctactgcattccactttttcacttcaaagcgcttcttgcccgcgccgctgttggtgccgctcggggtatccacatccatcgctgccgccattttggaaacacacggtctgtcgtccgaccaccgcgcctgcccc

SEQ ID NO: 322006 - DNA, 754 bp, Homo Sapiens
  misc_feature (618)..(630): n is a, c, g, or t
  misc_feature (635)..(635): n is a, c, g, or t
ctcatttccataaagtgcagatttaattttcaattatttgccttagtaaacattgtcttatttcaggtactccctgccctcactcaaaaaaaagggagggtgtttaatttttattgaacaaatatgtaataccaagaaaaagatgaaagacccaataatgttttttgcaaacatgtttccaggtaagatttccaaggacatcagtactgagtgaaaaataatcctttacaatcaatatgaatgaatacactaacaagtacatcatttagatctccatgcttatttggcaattccagttatgaaaaaggtacataaatagtacaaacaattggcttgacatgtggccaaactactttcatcgaagttgctggaagcctttctctggttttggcccctgtaggaagttaatctcatattcccttagcaataatataaggcactgttcagtccttacactttatatcaatggcttctagttatccataggactgcactttttcaaagaatatgctacaggttaagagtgctatgctacgttgcaatgctactttgcatgataatatgatattagtgctctcagataaaattgcaactctaagccatgtcaggccgaaaacnnnnnnnnnnnnnacttncaaaagcacgcggtctgagatttaagccgcaaaatctggcaaagagcccggggatagtcagaacaaacttggtttgaacctcttctccccgaaacgcgaaagggagtgtgtggtttccc

SEQ ID NO: 322007 - DNA, 630 bp, Homo Sapiens
  misc_feature (94)..(103): n is a, c, g, or t
caaatgcctttcaagatatatttttgggggaaactattttttaaacactgtggaatacactggaaatcttcagggaaaaacacatttaaacacnnnnnnnnnnaaggaaagaattggtatatttattatgttctgtttttctaaataacctgtggacaagggaagccccactgatttactccctctcttccccactccctgtgaggctgggctgaggcacggatccctgggccacagagcaagtctccaaatcagacagctgcctcagcccctgggatgtgtgatttcagctcctgtcacctcatgcaagggcgtggagaccagtagaggtgtggaggccaggcagagagaggagcctgctctgcggggggcccagctcatgggcactgccccttcagctagcctgcctccgtcccctgagtccaacagtgggagccctagctgggaagttctgatccccaaagccacagcaggggactgatggctatagcagaatgaggtcgggtcaggaccctcaaacaccatctgggaacaccaagcaccctgaatcgagactgcaggagccctgcggggtgagactgtgtcagagatacactgctggccacaagtgtcccctctcagtcccacctt

SEQ ID NO: 322008 - DNA, 308 bp, Homo Sapiens
ccattttggcacataaagatttttgatgagccctgtttgcatagagccagatgttttcccctcccccaagagtatctacatcagggatgtgacttggtgcgaagagtcaggggaaagaggaaaaacccaatttctaaatgacctccttgcccagcttactaaaatggctgcagagcagacacaggatgaatttgaacctgacacaggatgaatttgaacctttggtctcatttatggaaaaacttgtgcaattttttttctgtgctacactacatacaaatcaccaaattacaaattacccttttgtg

SEQ ID NO: 322009 - DNA, 579 bp, Homo Sapiens
  misc_feature (490)..(516): n is a, c, g, or t
tttttaagtctggcaaggatttattaggaagcttattagtcacagtgaataaaagccatgaaaagaagaactcaaatctccaaattctggcatcggacttacaacactagttagaagctaataaacattaaggaatttccaaggggaatcttaactaagtctcaatcttactgaccagattacccacacacatagaaatgatccccatgctctccccagactgcttagctaggcagtggaaaagaccttctccccaagcttaagctatcacgcatcagcaggagactcctgtccttctagctataaccacaggacacatgtgcgtgacagacaactccaagctgggcaacttgacaagaatgctgaacaatgagaggggaaaggagcaagcaggaacaagtgttttagttggagaccctcctgatggctactactaacacaatccggaggcatcagaaagtttcctatagcccacaaatagtttcctttnnnnnnnnnnnnnnnnnnnnnnnnnnncaagtcacacaacaatcttgccacaaagcaacatgacacttggaatcacatggccacattaac

SEQ ID NO: 322010 - DNA, 842 bp, Homo Sapiens
  misc_feature (229)..(251): n is a, c, g, or t
ctaggcgccgggcggacacgaatgaaggagatggaaaaaaggggggggccgagaggggagatttatccccgcggagaacccgaccaccccacggggggagcgttttccccccaaattgaggttctaaacgcacacttttgtgggggtttggaacacgagaagccagaaaaacaggtggggtgcgcccacaaaccgagtggaaaaagggggttaaaatattcacgaaatnnnnnnnnnnnnnnnnnnnnnnngttaaggggcccctaaaaggtttgggggccccccaagctggagggcccccgagaaaatcccctttggtgcaaaatccccttccaatggcgggaaacttgaaaaggccaaagcgttgttggtttcccaagggggcccctcctccaatctggaaccgtttccttttcttcggttcccccaccccaggggaactggaaggaatttctgttggctcccaggccccggggcatccgcctggaaaccaggggtgggttgggtcgtgtcatctaaaggcgcagcttcaaccagaagactagaagtcagcccaggagctgggagtagtgtcacgcggggtgggggttcctatgagcatcactttacaaaaccaggagggacggaagtgcgagggggcagagtcttggaaacaggtcctgggccaactgcaacagaatatacccgccgcgtgtaggggaagcggcgccagggagagggcgcagtctctgaatctttccacggggtccatcctagggcccctccaggttcaacggtctcctaacctgtagtcacccacaagagcgtgccctttctgcccgcccttcctagcgttgctcccc

SEQ ID NO: 322011 - DNA, 799 bp, Homo Sapiens
ccccagccccagatcattctgccccatagagaaggcccatgccccggttatgggcacatcatgtgggacagcagcttgagggctgcggacactgaaatacgttctccatttcgcagatagtacagcctgctttccttggccagcaggcgcttccagtactgacagtctggtgcccagccagacatggtgccaagcaggtaagggttaatctcaatcaccttgttcacccgtaaggcactaatgtaggacccagctgaggcccgagaatccactgctgcaatcactccatgctggaacttgaaggcgagcgtggtggtgccatgggccatctcaatctgaacgttcctttctccgtccccacccagggactggaagaattctgtgggctccaggcccgggcatccgctggaaacaggggtgggtagggtcgtgtcatctaaaggcgcagcttcaaccagaagactagaagtcagccaggagctgggagtagtgtcacgcggggtgggggttcctatgagcatcgctttacaaaaccaggagggacggaagtgcgagggggcagagtcttggaaacaggtcctgggccaactgcaacagaatatacccgccgcgtgtaggggaaggcggcgccagggagagggcgcagtctctgaatctttccacggggtccatcctagggcccctccaggttcaacggtctcctaacctgtagtcacccacaagagcgtgccctttctgcccgcccttcctagcgttgctccctgcttggctgagcactgcggagtttcacgcctctccc

SEQ ID NO: 322012 - DNA, 1150 bp, Homo Sapiens
tataaccgtttttctttattctacttagtggggcacccagaaacttccctgggggaaatgcttgttcaaatagagaacacgcagaagatgcacttcaccggcctcctctggctgctgagcccgtactctctctttggctcaggctaggcctcttcttctccttggacttaacgtggcttaggtccctgagtcggccaagacctcccagaggagacctgcccagctgccaccaccaccattattgattggcttcccggtactggtgcagcaggtcactgacatctgtactttctactttcacccaaccatcttccttcatgtggtacatattgacaacgcctccagaatagctgtctctgtgagtggcataagcaatagccctgcggccaaggtcataggcctcttcagggctaagattaggccgatagccactgtccatgaccccgtaggcataagtgttcccactacccgtggagaacatatttcctgagagccgagtcccatgttcatccacgtagtagagtccaggacccttcttatcccagccacagatcatactgcccatagagaggcccatgccccggtactggcacatcatgttggacagcagcttggaggctgccgacactgaaatacgttctccatttcgcagatagtacagcctgcattccttggccagcaggcgctcccagtactgacagtctgctgcacagccagacatggtgccaagcaggtaagggttaatctcaatcaccttgttcacccgtaaggcactaatgtaggacccagctgaggcccgagaatccactgctgcaatcactccatgctggaacttgaaggcgagcgtggtggtgccatgggccatctcaatctgaacgttcctttctccgtccccacccagggactggaagaattctgtgggctgcattccccggggtaaagcgagctctggagatcgcatagagaaactgtagtgtcctgggtccgagcgacgcccgcttcccgcaaccgggagagccgattccggccgctgccctcggggggctccgcatacatctagtagcgccatgaccgcccagcacccagagatctgcggacgcgtggcgacgcgtggtcgacgatatcccgacattccgaccgtaccagcctg

SEQ ID NO: 322013 - DNA, 630 bp, Homo Sapiens
  misc_feature (357)..(366): n is a, c, g, or t
  misc_feature (474)..(520): n is a, c, g, or t
  misc_feature (590)..(590): n is a, c, g, or t
ctgtctggggaagacagttctcccagcactcccacccctgggcacagcaggctggtactgggaggctgaacccctcttagagcctgaccttttcatctgccttctggttgtgtgaccatcactcaacagccatttcacagcccctgtaattatggcggcggggggctggggtggtggtggtgggaagggcttgtggagaggacacagtctttgtttaaaaactttgtcccgatccatccagaaaagagtaggtagcttgcatcctgacagcctggcaaagtcaagaaagttgaaggagaaacatacctttggagagggggttttctttaaaactagtgttaagaaatgcttagggannnnnnnnnncttatttttcataactaaagctttcacccagagccggctctgtttgcactttgctgccgacattgcaaactttttggcagggtgggagactgagtctcattctgtcannnnnnnnnnnnnnnnnnnnnnnnnnnnnnnnnnnnnnnnnnnnnnnttgccctccagggttctgggcaattccgcctcagtctcctggagtaggctggggattacagggcatgcgncaccacacccggttaatttttgtatttttagtaggagaca

SEQ ID NO: 322014 - DNA, 989 bp, Homo Sapiens
  misc_feature (25)..(25): n is a, c, g, or t
  misc_feature (32)..(32): n is a, c, g, or t
  misc_feature (86)..(86): n is a, c, g, or t
  misc_feature (165)..(165): n is a, c, g, or t
  misc_feature (198)..(198): n is a, c, g, or t
atatgtctctgttaaaagcctcccnggcaacnacttaggaaatgcccaaactcctctggtgaggtcaactacccacatccctcaangccccacaatctccctgaaaacaaacaaaaactttgcctgccttccatggaggagcgtcaagtatgtcccacaccatangggtgtaagtccacttccctctgcccagggaanaatggtggaggaagaatggattccctaagtgtattttttctcttcagaactgacagcccatcaaggtacaatgaaatagaaaaaaaggctggccaggtgccaagtcccagctcaagcctggcagctcctcccactgagcctcatggtcaccccagaggacaggccttcctttcacacacatcagaaatagggaacccaagacctcgagagaggaaatgggcccagggacatgccttggcttggggtggcttaggaccagggcaagacgcttgaccccagagcagaccatgctgacactgggcaacacattccctgctctggacctcagttcctttggctactaaggaggcccaacgatcctcgcctgtgtgggacggggctacctgcagacatagagggcctttgagcacctcgtagcttgcttcccagccagcctgggtgtggaaatggccgtgctgacaggctctctgcgatagggcccagccatggccagtgggcctcccacaatctgcccctgggtgcagggccttgagcagggaggccatcgtgctgcctaagagaccaggagtgaccccacctcatttcatgtcatcatcactgccctgcaagggaaacaacagatgtgcaaggtctgagggtccatgtgtagaagcagaggccagagctgacaccacatgggcaaaggagtgggcgtgtggggctgggagctggggctcatgtgggaggctggtggctgccatggctgcagctcctggccctgcggacagccagggctggggtctacaagagct

SEQ ID NO: 322015 - DNA, 875 bp, Homo Sapiens
agcaatcatgtagtcaagaatctctgggtcctcagcatcaatctggtttaggtggatgtctcctgtcgtgagccactggaaaaacaacatcccatgattttgctgttttcttctttgtccaaatattgatcactgaacatgtgacatgaaccaagcactgccagcttcccaccttggttctttgagtgatagaaagccaaaatgggtctgttaagtgggaagcagacagaacctgtagacagaaccgccactgctggtttcatgacactcaatgtggcaccaaaaggatacacaaaggtgagagcctgggcattgtttccactgctttcctcatcaatgatcccaggcacagcctttcctgcagctcggctaatttccctgttcaagactccactggaaactagagcttctttaggatggaaatatttgtgatatacatttctaaccacagcatcattattaaccatgattccatattcttctagtaaaaagttaatattggtgtcaaatctggattctccaccttctcctagcatcacaaagacatctccaccagtgtcaagatatttcttcaggatttcaaactcagctgcagtaaatttttcccttggcccagctgtaatccacagttttactccatttaacttctcagatgtgatttcatcttttaagctctgaatcttccaattactccgaagttttttctgcatggatttgtagccattgttggtggtaaatatctcctttttgtaggcattgaaaagaatggtgctccgcagctctttctccatggttacctgacgccgcccagcatcccgcggccaggtatccaaggccgcttagtaaccggagaggcgcgtcggtgcgccgggccc

SEQ ID NO: 322016 - DNA, 906 bp, Homo Sapiens
  misc_feature (82)..(82): n is a, c, g, or t
  misc_feature (122)..(122): n is a, c, g, or t
ttattctggccccaaggtctgggtggtaggatgtctccccggcctgtccctttgaggtgacccccttccccattcaccgctnccatgggtctggagccaagtgggtgatgtccaggggctgncaaggagtgaaacgggacgctgggccaactgcagggctcggtgaatcaggggtatcttggagcttggtatcttccctctgggaggctgaagttgtgcaactggaaatcatccagggggtgtctgcataggtgtaggtgcggatggagaagtcacagctggccatgggtacccggatgatgttatatccgattccttcttcagagaagtacgatttaagtagcaaattttgggcagggggtgacagggcaaggatgttgagagcagcagcatctgtcatggcccctccaaatcccttcactttctggaacttctgttctggctgcagggtcagtagcaggcctgtgcccgtgtgattagcctggatgggccccatactcagctccatccgtcgcccactgcgtgtactctcatagcggctgaaggtaccaagggcaggaaaggtcggggggtcaaaggagtcacagtatgtggcattgcagacacacaccaccgagctgtagccgaagcttttagggatgcaggggcgggcacctgatgcccacgacactgcctgaagtagaagcaatcctgtgaggctgccagccatgatgcttaccctactcaaaggcttgggacattcctctctggaaggacttgaaaactccatcccctcagggtcattagatgaagagaagaccacaggggttccagagtctctgaaggatagaggatccactaaacaaaaacaaggatgcaggtacctgccttagctataggcactaggttagccctgcaagtaattcc

SEQ ID NO: 322017 - DNA, 1171 bp, Homo Sapiens
  misc_feature (141)..(141): n is a, c, g, or t
  misc_feature (149)..(149): n is a, c, g, or t
  misc_feature (334)..(334): n is a, c, g, or t
  misc_feature (470)..(470): n is a, c, g, or t
  misc_feature (624)..(633): n is a, c, g, or t
  misc_feature (825)..(837): n is a, c, g, or t
gaaatatagagcatggtgtccgacattcttccaacaacgcccaccttcccctcgtggggggcgagaggttgtctcgccaccccaggtccgtgtgggagtgatttaacaacccgctggcgccccccgaattatggtgagacnccacactnttgtgttgtgtggcacgccgcgccgtttttctttcccagcctcaacgtggcgcgcaaagaaattatcttatgttcccgacgccgaagcgcgcgggacccagagggggttgggctcgtgaaatctcccccgcgctgggggcgcgaattctccaggaggtttctccaatctcaacgcgcccggcgtnttgggcggagtgaggtgtttctcaccatggttggcggcgccagagaatgggcctctataaatgggaagctttctccacaccaccctttcctctccgcgcactgaaagcgtggccccaggggcgccgggggcgccgngtgatatgtcgtagagttaatcgcgcagggcctcgcgcggtctcggaccttcgcctcgtttgaattaagactcccccaagttaagtggaccccttccaggaaccctcccactcctggggatttttgttcccaagagaccgcctcccgcgtttgnnnnnnnnnngggcggttgtttttagttgggtgagggaatcccaaagcccgctaggtcatgggccccagggatcctccctaggaacaccaggctatggcgcccatgtttcaccttaccctacctgggcccgccgccccccaaacggaatgggtctaggaaaaccttctccgagggccggaggcgccccgacatgttccctgnnnnnnnnnnnnnccgctttttgaataacaaggaactgagtatatgtatatttcatcaggggaggggctaggactcccacttggaggcctcaggagttctgctgggcgtcgcgaaggagcttctcctcccgccgcttccgtaacctctctttgaattcctctatctcttgaagcttctcaggtggccacagctccctcttgcgctgtatgacatcgtcctcaaaccactcggcctgattggaaacccagaacatagccacagggaaagtgaggtagattatcatccgaaatatctccagcttcacccccatctcgtttctcccggtcaacaaagccagttccgcccc

SEQ ID NO: 322018 - DNA, 1008 bp, Homo Sapiens
  misc_feature (106)..(106): n is a, c, g, or t
ttctctccccattttctttcatcctttttacctgctctattacccactccaaacctagatgtcctgcaagatgttttgccatgtgaagcttctccgtcctgcccancaggatgcagtcctgttgctgccaagctggggatggcattcatgggtaggctgaacgtctcccagtgggcagattcccagaatgtcagacaccaacacacacgcagacttatctagccccacttcttgggggtgttcttgcaggtagcttaacaaagctggagaaatggattctaggagctcccgtctgcggacctctgtatctttcttactgtgtgcatttccatctcctttttgcagaacttcaatgatttctcgtactgtatgtgcaggatctctggggcttagtaagtacaataggaccttccttccatatttgtcatttactatgctaggcaatgaactgataatttctgatatgattatctgcttcacaagcttagtatcatcaatacaatcaaatgccgccagtaaaaccaaatgggagtattggccattagccaccttttcaacataagtcttcattgttttcacaatcactttcctgtccttgggcgtgccatgccacaggcagtgcatggccactctggcgccatcgtgtgtgtgtgccaggtagaccaccgcttcgcggatggcttcaatcatttctgatctgagtttggggggtgcataggtaaaaaagtccaagaatactttatgcaccaatgagtgcttaatcacagcttccttttgggccattggagttagaatctgtttcatttcatccataataagttctaatttttctggctgtacctctaacactttgtccagagttcggtgatctgctgacttgtaaagctgaaatgtgttcccatagagctcttccgtcagcatgttcctctgctccaaaatggctttgtcattgtatgcgtactccacgatggctgatgtttccgcgccacccaggcctcgctacctaga

SEQ ID NO: 322019 - DNA, 1107 bp, Homo Sapiens
cggctgctgggaaaggcggctggcggggaagcgcccggttcctccctggcaggccttgctcctgcctgcccacctggcacagcggggaccggccactcgccctttgctcccatgggctccacccgcctggcttcccgcctgcagctgactagaattccatccgtgagaaacacttgaacgtcactgaaaaagaaatccatgcgattttgtttaagcgccagtttcttctagaacctgatatttcagttacaaatcattgaagctcctttttaaaaagaaaatttgactccctcgtaatcaactactttatgtgaagaaaaaaggcattgttaacaatggctcaaaactgttcttgcaacacgtgaggcagcctcagtcccgcttctagctggcgaaggccttgccggcatcctccttgcctctgtaccttctcttcccatgtgtgaacgggatgtaccggtacttaatcatgtgcttgatttgcctcttcatcgtgatacagaagagcatgatgaagtacatcaccagaatcggccagaacaccgggacgttgaaagcgtcgaagaaagtacagaccatagccacaaggatgcccttggtagccgcatgccaaaatttaaactctgggagccttcgaatgaaggggcggaattcctcgttctgtttggtgggtagcgaaggaccgtcatctgagtcttccattaaggaaggatccactttgggagaaagaaaagctatgaaaagatttagatggtagatccccaaggcataggtcacaatgtaccaaccctgcagcaggtaaactcgaatcatgtagacaaagctcaggcccagtgtcacgacccatcgcacagccgtgtagggtgtggacttgtctagccaggactgataaatctgtccaagtcttgtgaaaaatctgtacaccaccgaaggtttcccatggacggattctcccacactgtccccttcagacattctgtaactcgcagctccgctacggccgagccgcggtctccctcacggccgcgggaaggaggacggcggggcacgggcggccgcaggcgctgcgctccggctccgggaagctgcagcgagcctgtgccgaac

SEQ ID NO: 322020 - DNA, 514 bp, Homo Sapiens
  misc_feature (30)..(30): n is a, c, g, or t
  misc_feature (37)..(37): n is a, c, g, or t
aaaaactgttccttgcaaaacacgtgaggnaaccctnaatccccgcctcctagctggcgaaagccttgcccggccaccctcccttgccctctgtaccttcctccttccccatgtgtgaaacgggatgtcaccggtaacttaaatcatgtgccttgaatttgccctcttccatcgtgatacagaagagcatgatgaagtacatcaccagaatcggccagaacaccgggacgttgaaagcgtcgaagaaagtacagaccatagccacaaggatgcccttggtagccgcatgccaaaatttaaactctgggagccttcgaatgaaggggcggaattcctcgttctgtttggtgggtagcgaaggaccgtcatctgagtcttccattaaggaaggatccactttgggagaaagaaaagctatgaaaagatttagatggtagatccccaaggcataggtcacaatgtaccaaccctgcagcaggtaaactcgaatcatgtagacaaagctcaggcccca

SEQ ID NO: 322021 - DNA, 451 bp, Homo Sapiens
  misc_feature (51)..(51): n is a, c, g, or t
cctgtttcgttaaagacagtcactgagatctttctgacatttggcgtttantgaaaattgattactagagaccacttcctgcaagacagactggatcaacaacatccccacaaacaccacgcccaggtaacgtggacagagccaagtctcgtcacttcagcccacacctacctgcagcaggtaaactccgaatcatgtagacaaagctcaggcccagtgtcacgacccatcgcacagccgtgtagggtgtggacttgtctagccaggactgataaatctagaaagacaagagtccaaaagcatgaagcaggtcctgtaacttctgtactgacccctgccacaaaatgtaccttctgctagggttggctttcaatttttaaaacagctaaaaagagtgagttaaaatagcaagagatcatctatgtatcagcaccaagaagtgactaccatt

SEQ ID NO: 322022 - DNA, 457 bp, Homo Sapiens
cattttcggaaggtagttttttttaaaacatcagcaatctgcatgagaaggtaaattacaatgagaaacttaaaaagcttacggtctaagtcaaccaatgtagaaggtagtggttgaagaaaacaagctttgacttttaaaatttcctaaccaggggatttatttagaaattctggcattcaaatgtacatgtaaaatccaatttaacagatcaaaattgttacactaagtttcacttagtatctaagtatccaatcacaattgtatctaagtttcacttttaagaaacattataaaggtaattaaaactctaggtgtatacttacatggaactagtttatttcctatttaactactgttcattgcgtaaagtatgttgtcccaattttcagctgttttaaggaattataaaacattgagatctactaggaagagggaaagcctacttctaagtgat

SEQ ID NO: 322023 - DNA, 845 bp, Homo Sapiens
aagttctcagcacccattgtaatttatttgtgaatgaatgggaaaagggtatcagtccaaggggagatcaggtggttcctcctcatcagagtcaaactcaacattttcatcttttacccatcgacctcgtccatctgggatccatccagagcttcgaagggtgagataatggtccagggctcgtcttcttgtggggctcatgggtgcaggggctgagacagttgctgactcctcggcctgtgggccagccgcaggttcaggttccctactgatcttcccactttggagtttgacctctgagggtggcataggggaaagggagacagagggaccaggggcttctggtctgtacttccggcggcagcaactgttatagtggggagctctgtgcagagcactctgggtgataagtcgtgtctgagttagcagaggagcctcagctttggtttcttcccttctcaattcattctgatgttttggattctgctttctttcctttcccggctgcttcttgccatagaaaagctgcaagctggacagatgtttcttgcctgcacggtgggcagtcagcatggccagggtgtccagtaccggtcgatgggggcagatggcacaagcaaagcgtccatcccgaagcatcagcgcctcatcctctggaatgtaactggctaggaggtccccgactcttctttttttgagcacattgagttgactccaatcgtctccttccctcttgaaagacatcacgactgtgagtcccagaagtgataaattctctgttccggtttcgccactcctccaggccaccgtagcaagagcgggacagcgccttctcttttttcctt

SEQ ID NO: 322024 - DNA, 942 bp, Homo Sapiens
caggggggccggttagagggtcttgcgtttggtgttgtctgcggtgtccgtgaggtgggtcgcagcgcgcgtcagtggtcctcatgcgtggtggcgggcgtggtggggcgctgctgaggctgctttcggtatggctgccggtgggtttttgcgtcgcgcgcctgcttttcggtgagcgtgtcgggtttgtacgtgtgttgtttatagtggggcgctggttctagctgtctggtttgtgttgctgtggtatgctttgttttttccattcgtaaaataacttttatacaggattagtagatctgtttacatataaaaaacagaaaggacctcattacagttagatttcacataaattacaaattgacttttaaaaactactattcaacttcatttaaagtcccttttaaaaatttcattttgaaggcacagtgcatgaaataaaccaaagactgaagcacttgagatgaatgggtgttgggcacctcacataaacagctgtagattgctctagaactgggagtatcacttggaaaaactggagaggtgaaaagctgatttttaatctgagcataaaaaaatactattgtcatacctccagaaaatctgtagcatggccagcatagaaggtagttagtacactcatgttatgccatttataaaaatcataatcatacatatttacataatttatatccaactgcctcaaaatggtaacctactttcaaatttcataatgtatgctgtcaaatcaaatcaaccaggacatattctgaaaatcaagtggaatcattaacgaattattgctaaaaataggataaatgggtattgggagagatttcttcatgaactagaaatccagttcagatgacattaatcaagacccaatcaaatcgacgcgtgggtcgacgatatcccggaaattccggaccggtaccgcctgcc

SEQ ID NO: 322025 - DNA, 372 bp, Homo Sapiens
agagaactcaggaaagctgctacttgttttcacgcccatctgtttaatgaatcctcccaccatcagcactgttctcccgttttccaacgaagacagtcttacaaaggggccgtgacgtgccttaggagacggagataaacggtggccgagtgcgctgggaaggtgggagagcagacccggcttcaggagaaacccacgcccaggccgtgattcccctgagtcacactagccgcgggccacaggccccgccatgaattcttccctcagaattctcgtatcacaccttggcccagctcccacccgagcaccgcactcttctccctccctgaaccaagccccaagcaaggcggcacctgcggcagttatcaaaaa

SEQ ID NO: 322026 - DNA, 959 bp, Homo Sapiens
tttccagggtttcacttacgatcccctgtttttgggaaagaggttttccccgggtgcggccaaaaaatggcctagaaagaagtttccccccccgttctcttccggatggatttggcccaggggcggggggcgtttatttgtgaatatcggagcttcggctgggggattccccggtggtaaggttccccgggaagggcccttcaaaaattcccattcgggattggtttcagaaacggttcggtttgccccccggggggtttttttattgggtgggggattccaaagcccttagttcatgacccggggttcttcctgggaaaacaagttatgacccaggtttcccttacctattgggggcccgcggcgccaaaagaaatggttttgaaaagttttttggagggccgaggccggcccgacaaggagtcaccttcaagtcctcctgaatttttgtaacatgttctttcaactttattcaaatcagatggccccctccagcatttatcattttaaaaaatgaatttaatgctataaaaaggtgatgttcactttaatcctgtttgccttcacgccactgtcgtgagccttcattccaggccacatacacaaagagggccagcaccacatggacggcgaccactgcaacaatagcagcgtaaaaatagctgtccctattggacatcccaagggcgccttcaaatatgtaagatttagttgtgaaatataacccaataggaacagtgatcattaaagctgtgaagaacaggagcgtcttcagtgtagatgctaatgagctttcatttctgaactcaggaggctgcagtgcgttcagcgccgccttatccgggcgctccatggtgtagccgtgccggcacaggcgctcggcggcggagctgggctcggcggccgcgctcagtaagctccgcgagggaacggccgaggcggttcgcaccggaagtagt

SEQ ID NO: 322027 - DNA, 432 bp, Homo Sapiens
aggtgtgaaccaacacacctggctccccaaggttcagtttttatcctcctcttggagaggtgagtgacttgaggtcatttcttcacaagctccggtaggcacccacagtattgtcaaagagttttgtgttagggaagtgtccagttttgtccaagaggaaatagaagcgtcggcctttgactttcagaggtagcatggcagggacttcaccccggtgggccatgcaagatacctgcttcaaaggaactgtgaaatgggcccccaagccaaagggggcatgagtggtgagggtcacctgctgccctccagctcgaagcaccactgagcgcacagaccggagagagaagagaagaccagcaccgagtacgagggctccgatggcgccgcagccgacggccagaccgtagcgccagagcgcggagcgcaggtcga

SEQ ID NO: 322028 - DNA, 1867 bp, Homo Sapiens
  misc_feature (306)..(363): n is a, c, g, or t
catggcgtggtttattacgattccatctcacaaggcgggtgggcgggtggcagcggcacacgaaatccaagcccctgacagacgtctgcctcggggcatgcaaacagtgcaacatggtcaagcgcaaacacggggcgaccgaggagacacgggacatgggacacagaatggggaatgaggctggggcgaggggtccctagagaggggcccggtcccccccaccctcacgggcaggacaggaaaaataagattcgtacttcttgtaaaatgcccatttgctgggtactttctttctccttatcttgnnnnnnnnnnnnnnnnnnnnnnnnnnnnnnnnnnnnnnnnnnnnnnnnnnnnnnnnnnctctaagaaggcgagtggcgggaggccagggaagcccgacgtggtggggcgctgcctcccgctccgtggcctccttcctccctggcccctcagtgggctccccaggccccacaggtgggtccaagagagacggggccggaggggtgcaggctgggacgcaggaaaaaggcccgccagcccgctggggctcagttcaggctcgggcccagtgagcaggggcaccaggtccatgatcttccaggttcagtccccacaggcccatgacccaggcggaggccagccgtcacaggtgcagctcgtgggttttgatgtgctcaagctgctctcggagctgtaggaaggagggccgcatggcggcgtccaggtgccagcagttcttcatgacttcatagactgcgggcgggcagccgtcgggggcatccatcttgtagcccttctccacccgagggacgacgtccttcaggggaattcttggataaggcactcgcccaaaggagtagatttcccagagaaggattccgaaactccacacgtcagacttagtggagaatttcttctctctcagggcctcaggggctgtccacttgactggcagcttgcccgtgtcctgggtgctggacgcctccttggtgagaccaaagtcgctgaccttggccacgttgtcctcagacaccagcacattgcgggcagccaggtctcgatgcacgaaattgttaccctccaggtattccatggcctcgcagacatctagcgagaacttgaggagacagtctccgcccagcactgaccgacccctagaccgcaggtagtccacaaggctccccttggccatgtactcagtgacgatgtagagcccgcccttctcctccacgatcacgcccaggagctgcaccaggttgctatgccgcagttgcgtcatgactgaggcttcagccaggaaggcctgggcagtggcgtcgttcttaatgcacttgacggcgactttgttccctcggtaatcgcccagcatcacgtctccgaactcccccttcccgatggtctgcagcagcttcagctccttcatgttcagggcccagccgctgcggtagaactcatcctgggccgccactgtgccctccatgacctttggtttaatgaggcgcgtacagagtccatctgcgtctgaggtgtagtgctccaccagctgcatgaggttctcaaagtacacctcctcgtcgatgctgagcttgctggcatggtacatgatgcggtagtgctccaccttgccgtcgcagctcacgcacagcgtgtagtctccggggtagttggtgctctcccgcaccaggaacaggcctgtctccggcgggtacagaagccgctcagcctgctcccgtgtgatcttgccgtggaaccaaggcatgaggctgagtttggtacccgccttcacgccctcccgcttctggacgtagttggctgggatgatgccctccctcgtgccgaattcgccactcaggcctcgctacct

SEQ ID NO: 322029 - DNA, 671 bp, Homo Sapiens
tttcattaggcaagagagtagttcgttcctcttctgtgctgaggatgttttgagatttagacctttttctccttgaatactccagtagataaaacaagcccatggctaatccacttatcagagcccatagaccttgtatagctgctgcccattcaaaaccaattttctcatacagaaatccacccagcgttggtcccataaaagcaccaattgaccacattgcactaaaaagacctgatacaagtcccaatgtacttaatccctcttcaaacccattttcatgtgcacaactgagaatttccgggaaagttggaattatactcattccagcagagaggccacttacaactaatatcagcaccagcagccagagctgacttttaatatgcaagattgggacaggccctaagagcatgtagcacccggctgtgattaagttgccaaacaccagaagccatttccttagaggtggccttttatcacttaggagaccaaatagtggtgaagagatggcataggacagtgccatacccaggaatactagtcccacatatccagctggtaaattgaacttctccaaaacaaagagagacagagtaggatcgaggaagccaaaacacgagctgagtgagttgatgacgaaggctataaggccaactttgggtaaagcg

SEQ ID NO: 322030 - DNA, 778 bp, Homo Sapiens
cacacacaaatctaaagcatatttatatatcactttaattctaattgaagatgcacgttacagtcatgtctgattgaaactcttagattacagtcttcaatcccaacaaaaatcccatttcatccctctatcactcacagccaaatgaggaagtatatactgcccactttgcctctccttcaccaggtgggtcagtatgagccttttggcccacacactgctgagaaggaagctcaaaagattaaccccttaaaaacaaaacgggagcgcggcctgatgacaaactgaaattcaatccatttatttacacgtacattgtacataagtttacaaattctcacttctgccactcagctagaacttttcggggaaagcctccatctcttccttgatcctgttttctacaagtaatgcgaagttactgtctgtgttctgaaggttatagctgacaaacacctgtttgttggtcttcctggctaggcgctgggcaaggccagtagaggtcgtgtcggaagtgtctccaaggagggaggtagacacggggatggagtcgtagcggctgcacatggccacggcgaggttgcgcaggtgcggcgtggcccccacccacaggaacagcgagtccgtcagccgcatgacgtggaagtggaccagctgctcccacagcctcgcgctgaagttgtgcagggagacgtccccgccggcggcgacaaccagcccctccatgccgccccacggctcccggcccacagcgccagacccgggtcctcgccgctgc

SEQ ID NO: 322031 - DNA, 975 bp, Homo Sapiens
agacccctacggttctaaaattgggtttccccaaggtttgaccgggaaagggaattttcggaacaccccaagggcccaccccccagggtcccccacaagttctgtggggtgggagtggtttttacagagcctttgtttaacccgagtttttttgggagagggggtcactggatcagagccaggccttttagaggaacaatacgtcaaacagaatccatcacggcagcccacaggccggccagtctcagtcaacagacttgaatgaactctttccaggggagcccaattcgacttcagtttccaagcaggaagcaagatcagagccagtgggacgcctcagacgctgatggtgcggaagatggtgaagcctgacagcgccgtgctgaccaggagccctgggcactgcgggtgccagtgcagctccttcagctcggtctcgccctggtgcacgaacagcagctgctgcgggaggtcggccagtccggggtcggcctccacgtcgcccgcctcagggtcccgctccactgccaggtcccactgtgtgatctggtggtctgcacccgaggctgcaaagaccccgctgtcctgggggtgccactcgacggaggtcacgggggccacgtgctgcttgaaggtggccactggggaaccagacttgaactgccgaaggtcccagatcttgagggccccatcatccccgccactgagcaggaagggctcccggcggctccagctgatgacattgacgtccccatcatgggcggtggctgtggtgagcatgcaggccttgctgggggctgcccggatgtcccagatgcggatggaggcgtcagctgagcaggaggcaaacaccgtgttctcagtcggtgaccactgcaggtcctccacagagcgtgtgtggcccacgaatggccgctggtccacgtgccaggagccgccgtccgtaggtgtccagaggtggatgttcttttgaca

SEQ ID NO: 322032 - DNA, 939 bp, Homo Sapiens
tcggggcaaggagcggtttatttcacaactgagtgaaggatgaggcccacagcctcggtagcagcagtagcagctcctccccgcccagccctctcttcttggtatggtagccaaaggccaggtcaggagccagagagacagccagggcacagccctcccgccatgggagccgggtggccacagagcagcagcgggcagcagtagcagcagcaggctggggtggaggagggggagtgttagtttggccggctgactcccaaccccccatgggtagtgtttggtgaaggttgagggacctggactgctaggtggggggcatctggagtggttcagtcagctgtgaaaatgcggctggaaatgtcatccaggagccagtcgatgcccggcagcaggttctccccggtgacggcgctgcagccctggatgcaccagtggtggctgcggatggagtccagctccagggcctcgcggatggcgttagaggacagtgctccaggcaggtcctgcttattagcaaagatgaggagggttgctccggccaggcgctcctccaccagcaggctctggagctcccgctggcagtcctgcatgcgctggcggtctgcgctgtccactacccagatgaggccatcggtgctctcaaagtagttccgccagtaggaccgcagggacttctggccacccacatcccagatgttcagcttgaatcctcggtgctccagggtcttgatgttgaagcccagcgttggggagatggtgtcgatgtcctccccattgaacttcttcaggatggttgtctttccagcattgtccaggccaagcatgagcagtcgcagctcccgctctttctgcttcatcttcttcagaatggtcaggagccccatggtccccggagccccctcccggccgccgtttcttcccagtcccgggacttttttt

SEQ ID NO: 322033 - DNA, 648 bp, Homo Sapiens
  misc_feature (25)..(25): n is a, c, g, or t
  misc_feature (39)..(39): n is a, c, g, or t
  misc_feature (71)..(71): n is a, c, g, or t
  misc_feature (135)..(135): n is a, c, g, or t
ttgtggaaaaatcttccctcttgantcttaaataacctnaaaatcccaaaccccagggtttctccaaaatnaaggaacccagggtgttgggatcctggaggtcaactggtcaacaaacaacaacctcccaggccnaaccctggcaacactcggggacctgggcctgtgcatcttaacccagttctcccaccgtccctgccctacgacttacgttctagcatgactggcctggcccaacagcctcagtggtgggacgggggaggcaggagcaggggctcccacgtgaatccagggtgtccctgagctaaggccaggcgggggtgacctccgcagcttccggggccctgggcgatcgggccgtctcgcctcaccctctcaccaggcccgacacatctgctggccacctttcccggtagacggtaagttcctcccaggcagggccgcggctgacttcactccgtgggtgtggggaagccctggggcgactgggcggggcgcgggtccgcgagggcccagattccgggtccgcggaggccacgggacccctcgggtggctcagcgggccggagtctgccgtcgactgttccggacgcccgggcggaggactcccgtgagggggaacggaccggaacgcgcgcggagcatccc

SEQ ID NO: 322034 - DNA, 562 bp, Homo Sapiens
accaaatcaaccataggtccaagaacaattgtctctggacggcagctatgcgactcaccgtgctgtgtgctgtgtgcctgctgcctggcagcctggccctgccgctgcctcaggaggcgggaggcatgagtgagctacagtgggaacaggctcaggactatctcaagagattttatctctatgactcagaaacaaaaaatgccaacagtttagaagccaaactcaaggagatgcaaaaattctttggcctacctataactggaatgttaaactcccgcgtcatagaaataatgcagaagcccagatgtggagtgccagatgttgcagaatactcactatttccaaatagcccaaaatggacttccaaagtggtcacctacaggatcgtatcatatactcgagacttaccgcatattacagtggatcgattagtgtcaaaggctttaaacatgtggggcaaagagatccccctgcatttcaggaaagttgtatggggaactgctgacatcatgattggctttgcgcgaggagctcatggggactcctacccatttgatgggcc

SEQ ID NO: 322035 - DNA, 1305 bp, Homo Sapiens
  misc_feature (13)..(13): n is a, c, g, or t
  misc_feature (52)..(52): n is a, c, g, or t
catgccattttancttgacattcatttgcacccatcatacatgcctcagaanctttgcgccacttcctcatagtccctctccagggctgccagatcttccctggcctccaagaactctgcttcttccatgccttctctgaggtaccagtgcagaaatgctctcttggcgtacatgaggtcaaacttgtggtccaggcgggcccaggcctccacaatcgccgtggtgttgctcagcatgcagatggaccggtggactttggccaggtccccacccggcatcaccgtgggcggccgattgttgatgcccaccttgaaaccagttggacaccaatctacaaactgaacagagtgcctcgacttcgtggctgcgattgctgcattcacttccttggggaccacatcccctctatagagtaggcagcaggccatgtacttcccaagccgaggatcacacttgaccagctggttggaggactcaaagcaagcagtggtgatgtctgacacagagaactgcctcatggtaggctttgtccagcagagacgatgggggcgaaggctgtcatggggaaatgtattctcggataaggtacccaggttggtctggaattcaattaggtctacattcaagggcccttcaaaccggagggaggcagtgatggaagataccacctgaaccaccaatctattgatgctggcatgagaggggcattcaacaccgagtttacgatggcatatatcatagacggcctcgttgtccaccatgaaggtacagtccgtgtgctctgtggtggagtgggtggtgaggacagagttataaggctctaccacggcagtggagatcctgggggctgggtagaccgagaactccagcttagtctttctgctatattctcctgtgagcctctccattaagagagacgtaaaccttgaaccagtgcctcctccaaagcttcggaaaatcaaaaatccttgaagtccaccacactgttctgccagcttccgggtcctctccagcacaaggtcgatgacctccgaccccacagagtaacggcctcgcgcgtaattgttggcagcatcctcctttccgctaaggagctgctcggggtggaagagtgaacggtgctggcccgtccggatcccatctataacagttggctccaagtccacgaagagtgctctaggcacatgcttcccagctcttgtctcacagaagaaggtatcgaaagatgcatttgtgtgctccatttttgcattttccagctgatccatgctgatgagaacgtgcccttcctgccctgtagtaat

SEQ ID NO: 322036 - DNA, 1564 bp, Homo Sapiens
gccaacggctctcagaatacagttttactagagggggcggagggcggcggcgcgaaaagagggcgcgacgtagcatgtatgcgtttgtagtttcgtccgcgcggcctaccccctttattgcgacccccttgagtggaaccactatagagaggtttgtgggttttaccggccaagtttcaattttggggtcccttccaggtccccacggaaagggccagcccatttaacccgacccagggtgttggtgtcggggcccgcccctctttcataaagcgggcactggaaaggccacatcctgtgaacccgagtgttcattattggttaaggaggggggccattccacctccccccccaggggccttggtgccaggggacttttggcaaaggggcccttcctggaggtaaaagaggtggcccacgcaaaggggcttgttaaggccaggccctctaccttttgggaatccaagcaaggggaaaaaagggcaaaattggaactggccgggaggctgtgtgtccctcccccccacagatggctgtggtgagccacaaagcaccaagattctgttcttcattcagcacccacccatgagcctcctgctttattccaatcgcatggcaccagcctgaaaacctctctcccttctgagaggaatgctggaatgacactccactctgcccctccctcccctccttccttgctcagggtccatgtgaacagcaggccattgttgggaagtgcctgttgcagtcattcttacacccccacagccactgccccacacacccactggtggctaccaaggcccgtcaatagatcttgtgtccaccgagccctggtgtccaggtccagcagccagacaggctgaaggttccctcctgccatcacagagtagccaagcactacaaagaggttttcatggccagattcctgacggctggccccttacagggcagatcctgtccttacaggtgtcaaggttggagggtcctgggtcctccatgaccctggggggttgctggtcccccatcttggttcttgagtctcatcctttcaagatgaccttgagagctttaagctcatcctggttgagggggttcaagttaaaacccttcagctccggtttgccttgggcctcaaaaaggcggttgaccttcactttaagttgcttccgcagtttttctatttctttatccagatgatcttgatctttttcaatcatttcctttgtctcagggtgaggcatcttgataaacatgttcccgaagcaaaccatcacatcttcagagaggctgagatccttctgcagggccctcaggccctctcgattctgattccttttagtgtccaggtccacaatctgccgcttgtccgccagcacctcctcggcgagctcctccacttctacaaggtaccgcagcactcgctctgcctcgggtgatagcatagcgcccaccaactccgcttgcggctctcgcgcgaccccgggatctccgcttcgactcccgctgcgcacgcgccgctctctaggtgcttccggcgcgcctgcgcagttaaaagaacggt

SEQ ID NO: 322037 - DNA, 1650 bp, Homo Sapiens
  misc_feature (1426)..(1443): n is a, c, g, or t
  misc_feature (1495)..(1495): n is a, c, g, or t
  misc_feature (1571)..(1571): n is a, c, g, or t
  misc_feature (1574)..(1574): n is a, c, g, or t
  misc_feature (1588)..(1588): n is a, c, g, or t
  misc_feature (1603)..(1603): n is a, c, g, or t
  misc_feature (1627)..(1628): n is a, c, g, or t
acttttggaagtaaaggctttgtaagggagccagacttgacttttaccaaaaccacatcttaacatttttttggctaagtacagaaaaattatatgtatatttacagaacttacatttgtggaatatgtcttttattcttttatcagccaaaactatcctgaggtctgtgttttgtatttgaggaattttgggttttaatttcttaaaatctcttgaattctagtgagttagagattccatagggttgtactgttttccagtctaggaaatgatttaaaatagctgcctggtgctaatgttggaatgttcctagaaagtaaatatgtttccttgcatcttaagtctagagcatgtttggaaaggattcaagaattagaggacttgcttgctaaagaaaaagacaactctcgtcgcatgctgacagacaaagagagagagatggcggaaataagggatcaaatgcagcaacagctgaatgactatgaacagcttcttgatgtaaagttagccctggacatggaaatcagtgcttacaggaaactcttagaaggcgaagaagagaggttgaagctgtctccaagcccttcttcccgtgtgacagtatcccgagcatcctcaagtcgtagtgtacgtacaactagaggaaagcggaagagggttgatgtggaataatcagaggcgagtagtagtgttagcatctctcattccgcctcagccactggaaatgtttgcatcgaagaaattgatgttgatgggaaatttatccgcttgaagaacacttctgaacaggatcaaccaatgggaggctgggagatgatcataaaaattggagacacatcagtcagttataaatatacctcaagatatgtgctgaaggcaggccagactgttacaatttgggctgcaaacgctggtgtcacagccagccccccaactgacctcatctggaagaaccagaactcgtggggcactggcgaagatgtgaaggttatattgaaaaattctcagggagaggaggttgctcaaagaagtacagtctttaaaacaaccatacctgaagaagaggaggaggacgaagaagcagctggagtggttgttgaggaagaacttttccaccagcagggaaccccaagagcatccaatagaagctgtgcaattatggaaaattttccactggcttcctcaaaataaagaagtatgggaatccttacctggatacagtgcagagccttctcagaagcacagaatattcttatatttcctttatgggaatttttaagctgccaatctgatggccttaatttcctttttgacactgaaagttttggcaaagagatcatggtccatacactttggttgcaggatgggaattattgacactggaacttaataactggggactggtccggaaggggttcctccaannnnnnnnnnnnnnnnnnggaatggggggggtgcgtcggcgcctgataagggtgcttagcgtacgacggngacgttcaaatgaacccacgggggccaccaggggccggacgtcggagagattggcccgtggtcaggagcgggcggngcngccgcaggggtgtngcggcgagtggcgtnaaacggggggccctcagggggggnngcgcggaagcggcagcgcttgc

SEQ ID NO: 322038 - DNA, 1019 bp, Homo Sapiens
gactctgcccaaggtttttttctcggagaaggccctttgcctttctataattcttccggggtaccccggatgaaaatctgggtgtggccccttaaccaaccaaggattttggcaggttttgagaggccaaccaaataatgaggtgtgtccctagctcccggttgggaattaatggaaaggtttgttcctggttctccagttctataagggggggatttcgtttaggaaccaggaataattccaattggccccacaactctggggaggttgctttggatattcggaattcgggttgtttaggtgtatcatctatacgggtatcgcaaagtcatcaatttggccctcttcgatgcccacgaggaataatttcttcaccacgcacccagtaaaaatgacctgggcatctataatcgagggcggcagcggccagggccgggttgtgtgggctgaggaggcccacgagggttgacaccagctgatccaggaagggcaaagatatgacctcgctctcctcgtaacggtgcacgcgccgcctgcgccgcaggtagaagtgctcctgcagcaggcagtcgcaggcgaccgcacgcagcgccgcgagatccagcgcaggttcaggttcgggttcgggctcgggctcgggctccgctgggggcggcggcagacccgacaggaacacggtcttggtgaagtactggtaccagcggtcggcattcagcgcgaaggtctgcgggtaaaccatgtacttcataaactgcatcttggtgaggattcgcagcttctcgtctaccgactccgcagcgtgcaccgtcgcctgccagcgctcgatccgccgcagccgtgcagctttgctgtcggctgtcatggaggccacaatcggcgggtaccgcgcgacgggggtcgccgcgacgtcttgggaggtcgtttctgtagccgtggcggcggcattagccgcggtgtgcaatgaaagcctcggaccgcgtagcaaaggcctccaacacctggccgccgccatctttttt

SEQ ID NO: 322039 - DNA, 182 bp, Homo Sapiens
tttttagggcagaacagttttaagctgaacttttatttcctctcttttgaaatattctgattcaggttttgactgtggagaaaagagtaacaagaatgtcagcagaggcatttcgtatcctaattttaacatgatacttaaaattctacctacatttgttaaatgctattatttcgtatgta

SEQ ID NO: 322040 - DNA, 1556 bp, Homo Sapiens
  misc_feature (515)..(701): n is a, c, g, or t
  misc_feature (1181)..(1195): n is a, c, g, or t
ggttgtataggttatgacagaggcgctagaggggggggagtgcgaggcgtctcctttctgtggcgggagtggtctcgtggtgacatgagagaagaagaccagatgtgggtggtaggaggagggagatatcggtgggacattcaggagggcggcggagggggtcaactcatcggggtgtgtcgccactcataatgacgcggtggtggccgggaggggtgtgcggtgtatggtatagaggcggaggagcggcgaggtacagggagagggagagagaggggggcgaaggtggagaggcataggtagggtgggcgagcggtgtagttatagggggtcggaataagaggagggtgggcgttgctgttgatgatgggggtgggtggggcgggacgaggggcgctgacgctctagttagtgttcactctagggttgtactgcgcggagacttttgcgggtgggtctgtttatgatgagggagtgcgcggtggctggagtgcggggtggataaaggtcaggtnnnnnnnnnnnnnnnnnnnnnnnnnnnnnnnnnnnnnnnnnnnnnnnnnnnnnnnnnnnnnnnnnnnnnnnnnnnnnnnnnnnnnnnnnnnnnnnnnnnnnnnnnnnnnnnnnnnnnnnnnnnnnnnnnnnnnnnnnnnnnnnnnnnnnnnnnnnnnnnnnnnnnnnnnnnnnnnnnnnnnnnnnnntgcccctcccccccaggcactgacacattgaaaggaagcagagcaacaatgacacagcacggatgtgggaaaggggatcccccacgcgggcaggatggtccatctcaccggggtctcaccaggactccccgctcccacccagggccagcacgagcacctcccgttttctccccagtgcagagcgtggagtgacaggagtgggactggagcaggggacatttggtgggaggcatgtcctcaggcctgggagaccaggctggccccagcctccctgtgcggtcaggggcctgtggaaccctagaggatggagcaggtggacagcaggggtgggcaaccctgccagctgggtactagggctattggggctggagggtccaccccactgtactctagccacaaggctgtggggtggctgctttgcccaccagctgtccccctgataggggatctgggctgcaatacttctgtatcctccctgtnnnnnnnnnnnnnnntacacacacctgggatggtgtctcgacttcctgattccatctggaggagtaccctgcacagctttgcagttaaggacaccttctgggagcttctggatttggaggggaggacgtccatgtttggagatcctgacctgtcactggtgcccagcccagggcgatccacagccgcctttttgcttctctctggcagctcctcccaggcatgggatcctgggcccttccctgagagcacacacgctcacctcacctggtgcacgctcccttgaacctcattcttttttcacccatctacaaatgattgctccttcctattttctcatctgggggttctctcccttgtgtgttgtgtgcgtgctga

SEQ ID NO: 322041 - DNA, 474 bp, Homo Sapiens
acaaagaaagtcatttaagcccctttacagaccagctctgctgggaggatgcagaaataaatgatcagcgtcccggcgtgagagagctgcccccagaagtggccgggggagaaaagggtgaagaggagctaaagcttaggaggcgatttccacggaaatggatgctccctaaggatgtgcggaaaggggatgggaatgtgcggattgggggcgggggcaccaacgcactccggcgggcaagcggtctcccgcaccacctgctgcaaggctcgggaaggaaggcgaagatagcaccggggcatccccgggagtccgcaaggctttgcgctgcaaatccagtgctaccagtgtgaagaattccagctgaacaacgactgctcctcccccgagttcattgtgaattgcacggtgaacgttcaagacatgtgtcagaaagaagtgatggagcaaagtgccgggtctcactgtgtcacg

SEQ ID NO: 322042 - DNA, 476 bp, Homo Sapiens
  misc_feature (268)..(268): n is a, c, g, or t
  misc_feature (273)..(273): n is a, c, g, or t
  misc_feature (299)..(339): n is a, c, g, or t
agaggtgtcatgtttactttttatttaggagtacaaactgagacaaaatcatccttccagttagtgaggttttgagggatcatactaaagagaagacaggaaaacaccagtaatggtgaaggtcttgagaaaaggacaggacccgcagatagcgagagatcagaggaggccctaatttctttcctcatttcctttccaaatatcccaaatgtgcaatgcatcacctgagacagaaggcagaaagcatcaagctctctgtttatcccanttcantgacaaccagaacttattttttttgnnnnnnnnnnnnnnnnnnnnnnnnnnnnnnnnnnnnnnnnngggcattcatggctcatcgcagcctccaactctcagtctcaaggcaaccctcctacggtcagtggtcctgaggtaggctgggaactacagggcatgcaccaccacacttgggctcatttttaaaaaatttcttgtag

SEQ ID NO: 322043 - DNA, 1043 bp, Homo Sapiens
  misc_feature (81)..(89): n is a, c, g, or t
gtcctgtccagggaagtttttgttttccagaagagcgggctacgggttttggcccgtccgcgggccggctttttttatttnnnnnnnnnaaattcccaaagccccctttttcgatggcccagggggtttttctagggaaaacaggcctattggcccatggttcacttaccttttgggggcccgggcggcccaaaagaatggttttagaaaggtttcttggggggccgaggccggccgacagggtatagttttgtttgacctgcgggcattttggcggcagccggagggcaggtttatttgacaacttcccggggccccaagcaggttggggacaggacgggcgacaggctccggcggctgcggcggcggcgctacctgcggtaccagatttgcagcctccgctcccgcttgatcttcctctgcagctgcaggatgccgtagagcagggcctcggcccgtaggtgggcagcctgggatgtagatgtccacgggcacgatgcggtcgcagcccctcaccaccgagtaggaatagtggtagtagcctcctccgttggcgcagctccccatggagaccacgtagcgcggctccggcatctggtcgtagaccttgcgaagcgctggggccatcttgttggtgagtgtgccggccacgatcatgacgtcggactggcgcgggctggcgcggaagaccacgccaaagcggtccatgtcgtagcggggtgctgccatgtgcatcatctccacggcgcagcaggccaggccgaaggtcatgggccacagagaactccggcgggcccagttgacgaggtcatccagcttggccaccacatactcgccccggctgctgggtttgggagccacggctctggcctttggcagggcaggctgggtgctgcttgggccatcggtggccacgctctgatggacacctcgtgcctgcacagccgggcccacgctggagcgcagaccaaggatccggaagccgcgcaggccaggagctgacagcaccgccatcttggcctcggccttcagacaacctcccc

SEQ ID NO: 322044 - DNA, 720 bp, Homo Sapiens
  misc_feature (44)..(59): n is a, c, g, or t
  misc_feature (72)..(79): n is a, c, g, or t
  misc_feature (81)..(93): n is a, c, g, or t
  misc_feature (96)..(154): n is a, c, g, or t
gggggggccccggcccccaaaaaaggttttttaaaaaatttttnnnnnnnnnnnnnnnnccacaattttttnnnnnnnntnnnnnnnnnnnnnggnnnnnnnnnnnnnnnnnnnnnnnnnnnnnnnnnnnnnnnnnnnnnnnnnnnnnnnnnnnttttttagctctgaggcattttattataaaaacttagtactcatatacataaactaatacgaacttaaaattcatcatacatttacttcattttttagcttgaccttctagtaaatctttagcttcattgattttggctgctatataaggagatcctcctttgtcaggatgatttaaaagcataattcgtcgatgagcatctcttattttccctttattggcagtagggcttacacctagtattaatgctgcttcccgttttgtcattttgggttcaaacccacctctataatagccaccactgaaggcagattttggtaggctttgaaaaacttgttttacttgaggctccatatgcttcatggcttgcaaaacgtaacggcctgcaaatcctgcagcagcaatggtcagtccaactgctaccactgtactggccatggctccggctgggctcccttgcttccaccgggagcacggctcatcccagctcagaggccgcggccaacacctgcacgcctttaccagagagcgacgcaacccccaacctcaagcacaggcgccctccc

SEQ ID NO: 322045 - DNA, 1264 bp, Homo Sapiens
  misc_feature (16)..(16): n is a, c, g, or t
  misc_feature (143)..(207): n is a, c, g, or t
  misc_feature (303)..(318): n is a, c, g, or t
  misc_feature (1203)..(1203): n is a, c, g, or t
ttttcagttttgctancagggtttaagcttaatcataccaattgcagaagtttgattatgtcaagaaatagccaactgaaggaataatttataaatggtcattacctttaaggggctagctgaatacaatgtaaatactcatnnnnnnnnnnnnnnnnnnnnnnnnnnnnnnnnnnnnnnnnnnnnnnnnnnnnnnnnnnnnnnnnntgcaatgaactgtgattgtacagacctgtactctgaaatctttatcatactatttttaatgcatgaaataaaaatggtttatatgtacatagaatnnnnnnnnnnnnnnnnccctaggtcaatttcttaggtctcagttgtggttaaattcacttttaaatacaaggttccaagtatccaagttgccaggccagttgcctgtacctggaacagcctttcccaccggaataagaagagtcccctacttaaacagcttaagctaatttcccatcatactatttatcacagtctaattaccagtttatcagtctcccattaaagtgggggctccctgagagcaaggactgtcatcttcactttgccttgaaaagtagacataggtcccaaattatctgctaaatgagtaatgaacaatatttctattcagaaggtgtgtgcttgcccataattaatacgcaaatattctaaactataatctgatttaaaatccccaaatttaaacaagaaaattataccaaggctttgagatttagcttgtgctaaatcattttttaaaattgtagctctgaggcattttattataaaaacttagtactcatatacataaactaatacgaacttaaaattcatcatacatttacttcattttttagcttgaccttctagtaaatctttagcttcattgattttggctgctatataaggagatcctcctttgtcaggatgatttaaaagcataattcgtcgatgagcatctcttattttccctttattggcagtagggcttacacctagtattaatgctgcttcccgttttgtcattttgggttcaaacccacctctataatagccaccactgaaggcagattttggtaggctttgaaaaacttgttttacttgaggctccatatgcttcatggcttgcaaaacgtagacggccatggctccggctgggctcccttgcttccaccgggagcacggctcatcccagctcangaggccgcggccaacacctgcacgcctttaccagagagcgacgcaacccccctgtgccgaa

SEQ ID NO: 322046 - DNA, 756 bp, Homo Sapiens
  misc_feature (220)..(323): n is a, c, g, or t
  misc_feature (386)..(401): n is a, c, g, or t
gcctttaaacatcatttaaatttattagtgtataaattctaaagagtccaaattaaatatgttgatattgagaacatttcagttttcagttttgctaacagggtttaagcttaatcataacaattgcagaagtttgattatgtcaagaaatagccaactgaaggaataatttataaatggtcattacctttaaggggctagctgaatacaatgtaaatannnnnnnnnnnnnnnnnnnnnnnnnnnnnnnnnnnnnnnnnnnnnnnnnnnnnnnnnnnnnnnnnnnnnnnnnnnnnnnnnnnnnnnnnnnnnnnnnnnnnnnntgaaatctttatcatactatttttaatgcatgaaataaaaatggtttatatgtacatagaatnnnnnnnnnnnnnnnnccctaggtcaatttcttaggtctcagttgtggttaaattcacttttaaatacaaggttccaagtatccaagttgccaggccagttgcctgtacctggaacagcctttccaccgaataagaagagtccctacttaaacagcttaagctaatttccatcatactatttatcacagtctaattaccagtttatcagtctcccattaaagtgggggctccctgagagcaaggactgtcatcttcactttgccttgaaaagtagacataggtcccaaattatctgctaaatgagtaatgaacaatatttctattcagaagtgtgtgcttgcccataattaatatgcaaatattctaaact

SEQ ID NO: 322047 - DNA, 914 bp, Homo Sapiens
  misc_feature (175)..(235): n is a, c, g, or t
  misc_feature (251)..(259): n is a, c, g, or t
tcggttgttcggtgattgcgtgcgcgactaggtacggggggcgctggaacacgggtggtgtgtggcgcggcggttgggagggggcggacgcggggatagagcggccacccgagatgagcgagggtgtgggagcctataccagcgagatttgagtggcagtcaccgccggtgccgnnnnnnnnnnnnnnnnnnnnnnnnnnnnnnnnnnnnnnnnnnnnnnnnnnnnnnnnnnnnncggttcccgggaggannnnnnnnntttaaggggtagatgttcccaagacctggggggctggtccaggcgcctaccagggccgcacggccgtgtcggttcactcggtggggggccgacccgccttcatcagggccttccgcggaggccgtccggtcgtcctcgggcaccagctccaacgtccaggtccagctgccccatgtagaggcccacggcgcacgcccagagcaggctggcggccagcacggcgcccgcgcccacggccgcgccccccagcgtcagctgcatgggtcctcgcagcgccgccaggcccacggcgtacgaggcgctgccccacaccacgcacaggccgcccagcaggaagaagccatatgctgcttcccgacccatgtcactctgcatgaaggagatgaccccgatgcccgatgccaggaggccattgcggaaccaggagaggaaggctgtctcgtgcgcttttcggaggagccaggcgtccgcacgatccagctcggacactgggggcggcgaagccccggcgcggggaccgtggccgggggcgaaggacccccgggcgcccccgctccggggccgctgaggcggcagtagcgacctccggaagcgaagacgggcaaggcgagcggcccgagcccaccaccagccgcctcccatgattcgcactccc

SEQ ID NO: 322048 - DNA, 1041 bp, Homo Sapiens
  misc_feature (765)..(903): n is a, c, g, or t
  misc_feature (907)..(907): n is a, c, g, or t
  misc_feature (915)..(985): n is a, c, g, or t
gggctctgccatgggtgtgggcagcccatcactggccgttgtatcagtgccatggggtacaagttccatcctgagcactttgtgtgtgctttctgcctgacacagttgtcgaagggcattttcagggagcagaatgacaagacctattgtcaaccttgcttcaataagctcttcccactgtaatgccaactgatccatagcctcttcagattccttataaaatttaaaccaagagaggagaggaaagggtaaattttctgttactgaccttctgcttaatagtcttatagaaaaaggaaaggtgatgagcaaataaaggaacttctagactttacatgactaggctgataatcttattttttaggcttctatacatttaattctataaattctctttctccctctcttctccaatcaagcacttggagttagatctaggtccttctatctcgtccctctacagatgtattttccacttgcataattcatgccaacactggttttcttaggtttctccattttcacctctagtgatggccctactcatatcttctctaatttggtcctgatacttgtttcttttcacgttttcccatttccctgtggctcactgtcttacaatcactgctgtggaatcatgataccacttttagctctttgcatcttccttcagtgtatttttgtttttcaagaggaagtagattttaactggacaactttgagtactgacatcattgataaataaactggcttgtggtttcaatnnnnnnnnnnnnnnnnnnnnnnnnnnnnnnnnnnnnnnnnnnnnnnnnnnnnnnnnnnnnnnnnnnnnnnnnnnnnnnnnnnnnnnnnnnnnnnnnnnnnnnnnnnnnnnnnnnnnnnnnnnnnnnnnnnnnnnnnnnncaanttgttggnnnnnnnnnnnnnnnnnnnnnnnnnnnnnnnnnnnnnnnnnnnnnnnnnnnnnnnnnnnnnnnnnnnnnnnggggcaacatgttttttcaaaaaaaccccggccaaaaaaaggggtgttttcccccc

SEQ ID NO: 322049 - DNA, 774 bp, Homo Sapiens
  misc_feature (298)..(342): n is a, c, g, or t
  misc_feature (554)..(729): n is a, c, g, or t
ttttttgcctagggacacaagggcattttgggcaggacaattatttcttttgtaggactgtcccaagctttgcaggacatggagtacaacccttaacctcctccacagaaatgccagtagcactccccctagtcatgacagccagaaatagccctgtttccagatacccccaggagagctgtttgacatttagttgaggaccccaaggctaaatcccaaaaaagactacctgctgaagagaggtaggagcagccaggttttgtactgctcagcagagtaaaaggaggaaataagggcnnnnnnnnnnnnnnnnnnnnnnnnnnnnnnnnnnnnnnnnnnnnnccaggagtggtagggtatacagaaacagagactgatggtaatacattatttcattttattctcttgataattttatggattagtaaaaatcttaccctataggtacagctgaggaagcagttaaggaaaatgtttgtatgcagtggattctggatcctcacctgtggttgtagtcatggcattccagcctgtgcctcaaaagcatctaaagnnnnnnnnnnnnnnnnnnnnnnnnnnnnnnnnnnnnnnnnnnnnnnnnnnnnnnnnnnnnnnnnnnnnnnnnnnnnnnnnnnnnnnnnnnnnnnnnnnnnnnnnnnnnnnnnnnnnnnnnnnnnnnnnnnnnnnnnnnnnnnnnnnnnnnnnnnnnnnnnnnnnnnnnnnnnnnnnacctagagagctttggaaagggtggccatctacatttttaacaag

SEQ ID NO: 322050 - DNA, 897 bp, Homo Sapiens
  misc_feature (750)..(750): n is a, c, g, or t
  misc_feature (790)..(790): n is a, c, g, or t
  misc_feature (813)..(813): n is a, c, g, or t
  misc_feature (859)..(859): n is a, c, g, or t
ctacatttttgtgcaagagacccccagaggaagattagtcataattcgagtccaaggaagacggctaattctagcgatcaatgtttgtttcccattcagaagaagtagatggctgccctgtcattctagtttgtggatcccaggatgttggaaagtcaacatttaatagatacctgattaaccatttgttaaatagtcttccctgcgttgactatttggaatgtgatctgggacagacagaatttacccctcctggttgcatttctttgcttaatattacagaaccagttctgggaccacctttcactcacctgaggactccacagaagatggtatattatgggaaaccttcttgtaaaaacaactatgagaattatattgacatagtgaaatatgtgttcagcgcttacaagagagagtcccctctcatcgtcaacactatgggatgggtttcagaccaggggctcctgcttctcattgatctgatccgattgctgtctcccagccacgtggttcagttccgctctgaccacagtaaatatatgccagaccttaccccgcagtatgtagatgacatggatggcttgtacacaaaaagcaagaccaagatgagaaatcgacgtttcagactcgcagcatttgcagatgctttggaatttgctgatgaagaaaaagagagtccagttgagttcactggacataaactgataggtgtttatacagactttgcattcagaataactccaaganatagagagtcacataacaaaattctttcgagatctgtccnttcttgagtttaccttagccagntgcagcccccgatggcccaaaccactttctcctttacatagtactnacaccctattcaggtccctttcaatgcagtcgcacttc

SEQ ID NO: 322051 - DNA, 500 bp, Homo Sapiens
aaactacatctgaaacactcacagaaattgtatgcttaaagcaacaatagttcagcattaggggaagaggttaaacagactgttgttgggatattcttctctttctaaacatgtttctgaagatcttggaatgggaagtgtaaacgttcaacttaaagtgtaaagtggagcaaaaagctgcaaaacttgaatgtatgtttttattaactacgtagagacatctattctaggaaaacctcgggggagacttgctaagatgttcatagtcctcctctgggcaatgagtctagggagccactgtttttcttcatttggaatgttcatagtcccccttggccagggttctctggtttgcagagatgagagctggttttattgagcactgaccctgccctgagcacatgcgacattcttgccatacacagtctcatcagctggagtttacttgcttcctttgactcatggggaaaccaaggctcagagaagtgacagcaccttgt

SEQ ID NO: 322052 - DNA, 645 bp, Homo Sapiens
gccatttattttagctttattatttaatcgtaaggccaaacaaagcccaagaaacatatgaaaagatagagaatttcatgagaaaattaaaatgacaaaatcacaatgaaatagatattcaaaatttgagaaatacaataccagaaattaagaaataaaaaatatccatacccatgctttctattgtttatccatttgtcttccagattaaaagttttgtattttgctatttacaatctgctgttaaatctaccattgatttcttaaataaaggggaagcccaggcacatgggtgcagggaggggtggggaataccacttccactttcttttgtctttttctctaaaaaggcaggggtgtgattggttggaagggtagagaacaaaccccagaacagtgtatgaagacaacctgtacatgtatctttattatttttggttcattctttaccttgaatcttttcattggtgtcatcatagataacttcaaccaacagaaaaagaagataagtatattaaaacttcatccttgctctgaaatatgaactaaatatttcatactctttcctttagcctccaaaatgcaatcaccaaaaaaagaatataaaattcagaaattattttgagacatttgataatcgataag

SEQ ID NO: 322053 - DNA, 1014 bp, Homo Sapiens
  misc_feature (303)..(320): n is a, c, g, or t
  misc_feature (522)..(522): n is a, c, g, or t
ggtacctcgatgcattctggcgtgactacatcaatggctctttattagaggcacttagaggtgtcttcatcacagactccctcaagcaagctgtgggccatgaagccatcaagctgctggtaaatgtagacgaggaggactatgagctgggccgacagaaactcctgaggaacttgatgctgcaagcattgccctgacctattccctcttctcactttggggactgttcccatcacccacctctggagcttacactgttctggggtttgttctctacccttccaaccaatcacacccctgccnnnnnnnnnnnnnnnnnnaaagaaaaagaccaaagaaagtggaagtggtattccccacccctccctgcacccatgtgcctgggcttcccctttatttcccttttccatttaccccgtaatgtgtctctacagctaccttaccactgagccgtaagacaaatgtataggaagaagcggagtctacatcacatagtctttgtaagggattgatgtgaacacnttttttttggatgcactaaggagttatcaatacttctggctttatgagagctcttaaattttgtctaaaaaaccaaagggctgtgagtaagggagctatgtggaaagtgggactctgaagtgtattttgaaaattaatcgccaccctcttccaaattatagaattttttaaaaacaagctgtggccctttccactctttcctggcctctggtggtgctcctttctgccgcctttcctccattccatggcttgaaacctctgcctgatgtggctccttcctttttcccatttgtcaaaccctcttcaaaggaggaacagataagactgggtcagcctagtcatgcctcccaactgtggtggtatatgtgtacacacatacacagggtggatggagaagaggttgctgattaaaatacactccccctataaaggggaagggggagtgtgacactttctttccatgttcaagtgaaaataaataatgtaccctgc

SEQ ID NO: 322054 - DNA, 493 bp, Homo Sapiens
  misc_feature (36)..(36): n is a, c, g, or t
  misc_feature (46)..(46): n is a, c, g, or t
  misc_feature (72)..(72): n is a, c, g, or t
  misc_feature (113)..(113): n is a, c, g, or t
  misc_feature (419)..(439): n is a, c, g, or t
aaaacggggtttccacctatattggtcaaggctggnccttgaaacnccctgacccttgtgaatcccgccccncctcggcctcccaaaagtgcctgggattaccaggtgtgagncccccacggccggccctatacaaagtttcttattgagaaaagtggttccaatcatgttttttgccccctttagctgctatctcttgaacagaaaagtttgttaggaaggtaaaagttgctgactaggaccttacccacagggtggcactctgtccttgggaaatataaatgcaagtaaaacaggtttgaacttcttaacttccagaagataggaggatgggacctgtgatactgtgctgctggtgggaggacccttccacatcaacatttgtgtgtatccttgcaataaacttccattgtgaattnnnnnnnnnnnnnnnnnnnnnctcgagactagttccctcgtgccgaattcgccacccaggcctcgctacctagga

SEQ ID NO: 322055 - DNA, 243 bp, Homo Sapiens
gagttagacaaaacagctttatttgaaagacgtgggacagccaagttcccccaaccccgcggtcctggcgacgtcggtgtcaggcgtgggaggaccagtgtcctaagtgaagaggagagcgcaatggaggcgcggacgtttatagccactcttcgggtggattcccgagccgcggctggggacggaggcgccggcgtttatagtcgcttttcgggtgacgtagattcccgggccgcggctccc

SEQ ID NO: 322056 - DNA, 991 bp, Homo Sapiens
  misc_feature (46)..(46): n is a, c, g, or t
  misc_feature (48)..(48): n is a, c, g, or t
  misc_feature (50)..(50): n is a, c, g, or t
  misc_feature (52)..(52): n is a, c, g, or t
  misc_feature (56)..(58): n is a, c, g, or t
  misc_feature (63)..(64): n is a, c, g, or t
ccttaccctctttctccgccacccggacatagaagccttgaaggtntntntntttnnnttttnntttttaaaataaaagccatttactcaatttattataaaacaaccatattaaaaaggatgaaccacacccaaaggtcatcaaaaccacctttttataaattagataattctacctgttttacaatatgggtttaagccttcaatggtgttcagttcaggtgtgagtcagctcctggtggtgtcagaagtttacatgattgcggatatcattgatttgcttcaccatttcccttatatgttcaccctcctctttcaggatggactgaatgcactttcgctggtaggcactgagaataatggtgggttttggaagactcaacaccttctccatcttttgctgttgataatcctttttcatagtaacctgtttgatggcattgcccaaatgtcgaagttgatcaggtatcagctgtaattctttcttcatgtctcgctcactatcagagagaactgggagctcagagtgaaaactgtgaagtagttttttcatcctgttcatgatatcctcttgtttttctttagcttcctcatatttgtcagctaaacgctcagccatttcccgcagacttttcctctcttctcgacaataactgagatcttctagttgtttctttttttggtcacataataatttgaccctccgctgaatctcctcctttgccaagtcctgtttgagaatgtactgctctctgaacacctgggtggctctgctgaggagctgaaggcattcttcaggaggaggggctatgtccttttcagaagctttcaaaaatgctggattggcaacactacgttgcaaaatgcttctaatatgcttttcaaaggaatctggggtttcagccagaacacggaggggagaccctcgtgccgaattcgccacgcaggagttgcgctgtagggacggatgggagggggtataagaatgggg

SEQ ID NO: 322057 - DNA, 730 bp, Homo Sapiens
tgcactttttggggtgggaaaggtgaatgccagtggggatgcggggggatgagggtaggagggacttatagaaggggatttgtggctgtgggggagaaggttctacagcataagccttatcctgccagccaaggggatttattctaagagaagtgcatgtgaagaatggttgccactgttattagattgacaagatgttaatttctctgtaggttgtaactttaaaaataaatgaaattatttaagggttatgctgcactagtattccttagaggaaacagttctttaaagttaggaaagggagtaggcaggcatgtgttggcaaaggctgttaatagtagttaagtgttaagactgcttttctttaacgttttcatggtaatgcatatttagagcactgtatttttgtcttgttaagaaaatttagcatttctaaaagaaaaaagcaaccctctttcaaactgttaattctgtcacagcctgtatattttagtcatttgtaaatctcttcatacaatagtgacttcttttttgactgatacagtatcttaattacaaggttattttgtacttgtcttaatacactaagtgtaataaaaacggcttgagaaaagtttctcctttctgtgacttcaaataagaactcccagtattgcctaaatcttctaggcaaccctttttccataaggaagagcatggagtgctgtggtcaccagtaatcattttcaat

SEQ ID NO: 322058 - DNA, 414 bp, Homo Sapiens
gctcttaatactggagttttggctttgtgtgtgggttttctttctttttcatttagatatcgtgggataaagtggagaggacatctcccattttccccatacaaactgagggtgagaagagaaagagaagcaagctgttgcccccattttggccttgcttcccagccatcttcccagctctggttctttcataggaactagttattgcttccacaatgccgttatacggaatgttccacaaaggctgtgaacctagtcacagtctacccacaacaagaactctgctctgaaaaaccagcccaagagctcttacccagaagaacaatctttagccctcaaggtcactgaaacttcattagagcagtttagagtagacgtgtaagatttggcatatattaaatgattattggcaca

SEQ ID NO: 322059 - DNA, 877 bp, Homo Sapiens
  misc_feature (74)..(85): n is a, c, g, or t
  misc_feature (87)..(100): n is a, c, g, or t
  misc_feature (121)..(121): n is a, c, g, or t
gattgggccccgcgcccccaaaacgaaatgttctagaaaagcttcttcgagggccggaggccggccgaacaggnnnnnnnnnnnntnnnnnnnnnnnnnntttactgaccatcctaaaatntcagaggaggggccagcgggacctctgggcttcagcggctgtgaaggagggacccgcaccacccgctaaggcaggtaattgcaagaaggcactcgcgagggggacttcaagcccctcttctatttcttcatataaaatcagggggatggggaaagctccaagggcgagggaagcagagagagtttctctcccagcctatgggaataaggaagaggtgaggaaggggcgggtgctgggagcaagaaactgccaagtccaggacctgccctcacacagacacacacagcccgcacctgccctccctctaaaatctgcatccggggctgtaaggaagccccgtgttcaagcccccatctcttctcccttctagctggtacgaagttggtaatcgccactctgggtgatgtagcgaacccagggcagggcctggtaaccacttttctcaatgatcttcatgtatcggacctggatcccagagacggtgaagtaggggatctcaaacttgaccccgatggggggccggccctccacctcttccttttccacactggggaggccaaagtgggctcgcatcaagtactccttgccccccgggaaagacttaatactccaaatcacgacgtttctctccggcacatacttggcgctgcccacactggtcttgaatctgggggagtcggcatcgctgggtacaggcacagatatctccacaccgttggccactgactgtttcttaaactgccccttggcctgtca

SEQ ID NO: 322060 - DNA, 1049 bp, Homo Sapiens
ggcctgggtggcgaattcggcacgagggcgggcgatggggcggcaggccctgctgcttctcgcgctgtgcgccacaggcgcccaggggctctacttccacatcggcgagaccgagaagcgctgtttcatcgaggaaatccccgacgagaccatggtcatcggcaactatcgtacccagatgtgggataagcagaaggaggtcttcctgccctcgacccctggcctgggcatgcacgtggaagtgaaggaccccgacggcaaggtggtgctgtcccggcagtacggctcggagggccgcttcacgttcacctcccacacgcccggtgaccatcaaatctgtctgcactccaattctaccaggatggctctcttcgctggtggcaaactgcgtgtgcatctcgacatccaggttggggagcatgccaacaactaccctgagattgctgcaaaagataagctgacggagctacagctccgcgcccgccagttgcttgatcaggtggaacagattcagaaggagcaggattaccaaaggtatcgtgaagagcgcttccgactgacgagcgagagcaccaaccagagggtcctatggtggtccattgctcagactgtcatcctcatcctcactggcatctggcagatgcgtcacctcaagagcttctttgaggccaagaagctggtgtagtgccctctttgtatgacccttcctttttacctcatttatttggtactttccccacacagtcctttatccacctggatttttagggaaaaaaatgaaaaagaataagtcccattggttccatggccaccaaccattcagatcagccacttgctgaccctggttcttaaggacacatgacattagtccaatctttcaaaatcttgtcttagggcttgtgaggaatccaaactaacccaggactcagtcctgcttcttttgcttcgagggaatttccttctggttttcccctaaattagccaatgaaaactctctccataacttctggttcctcttggcccccttaccccaaaggtggactggcatg

SEQ ID NO: 322061 - DNA, 493 bp, Homo Sapiens
tcagcccctccatgcttttgtcattcacggccacggcgaggaggactgctctgtttccagcttcttgagacacaaacgctaccaggttctttgcaaagacatggatgagaggctcatcttgccccagaaggacttttgtggtgagcacaggcttggtgacgtcactggccacgctgctgggctccagggagaccagggtgcccatcttcccaaactgggtcaccaccaccaggatgtgactgctgaaggccgtacacaccacctgggtggggaccccgcacaccacctccgtcttctgcttcgatatcaccaacggcgtgtcttccatggcggggctctgcagtggcagctttaatttaggttaaaaagaaaggggaaaaaaaggagtcaatcaaacagtacagccttggggctcccaaaaaagtagcacggggcattgaaacggaaacgcaaggaggcccattcaaaagaaggggccaggcgcggtgctcat

SEQ ID NO: 322062 - DNA, 615 bp, Homo Sapiens
  misc_feature (448)..(457): n is a, c, g, or t
tttttaaacatatgatcattttaattacagatgattgaaatacagtgcaacagatgagacaaatacaatactgtaccagtttttaaaaacctgaaccataacggcttcgcattctagtacacttacttacttaaaacaaaaattgcttagataacaaaactatacttcaagttgttttagaaacagttctgcgctaggaacatacaaaggaaaatgacccgttgtgcttctttaaaatcgaatgagagtctcctctagggtcctgctgacagagccccccccagcctccgccaggtgaggtgcacagggcccactccaggcaccagctccccccaacttggcttctctggtttgtcgaaggcatcatccagtccacactatgtttaacagtcctagtcagccaggggattacatatttctgggaagaaaatggcaaatgtccccattnnnnnnnnnntcagtatatcaataatccagtatatccattcataaataagctttcagatatgttaggaacataaaagctattgttgaacacgacttagcaacaaatcccacatatgataaaaaatggagaattgattttaagttatcaaattaccttgaataaatctc

SEQ ID NO: 322063 - DNA, 567 bp, Homo Sapiens
ttttgggcacttagtgatttatcctcttcttaaggctccatcagcaggtggaatggaagacacctcccaccctgaccccttgggcaaccaaggcattatactctttcactgcctgctctgtctggaggacccgcacatcaatgccatgtttcttgaggtactccacagttgatgaaggcaccttcaaggcctcactcatccctcggccaatcacaagagtctgtacacccttctcaacaacttccttcacatctgcaggctgcacaccaggagaatgctcagttcctgtttctctccaatcccaagtccgactgccccctggccatactttgcagtccttataggttgtattagagccttttactttcatttgcccccatgataaggaagcaatttcaggggaagtcataaggaacttcactgaagtcagatgcgagccaactggtcttggacttcccagcctccagaaccaccgcactgtctcctcaaagttgcgttcccaaacggcgcagtgctctgcccgcacttacgctcccagcgctgcttcgggatctgcgctccccaact

SEQ ID NO: 322064 - DNA, 1124 bp, Homo Sapiens
  misc_feature (111)..(166): n is a, c, g, or t
  misc_feature (360)..(579): n is a, c, g, or t
cttcctgtttttttcttgtcgttctgctttgtctcttcctgtctttcttcttctgtcgttgtcctctctgttctggccttgctgtctgcttctctttcgttttgctgttgnnnnnnnnnnnnnnnnnnnnnnnnnnnnnnnnnnnnnnnnnnnnnnnnnnnnnnnntctcgtgttggctcgtcgtccgttctctgtttcttcgtctgcccttgtgctgttgatgactaggtcgtggatgctctgcgcgggctctgtgtgttcggttgtattctttctctgggtggtgccacttgtgtctcctttttcttggttgtactgtgtcacgtgtgtgtttctgtcctgcgtggtttctcgctgtnnnnnnnnnnnnnnnnnnnnnnnnnnnnnnnnnnnnnnnnnnnnnnnnnnnnnnnnnnnnnnnnnnnnnnnnnnnnnnnnnnnnnnnnnnnnnnnnnnnnnnnnnnnnnnnnnnnnnnnnnnnnnnnnnnnnnnnnnnnnnnnnnnnnnnnnnnnnnnnnnnnnnnnnnnnnnnnnnnnnnnnnnnnnnnnnnnnnnnnnnnnnnnnnnnnnnnnnnnnnaggccacttagtgatttattctcctcttaaggctccatcagcaggtggaatggaagacacctcccaccctgaccccttgggcaaccaaggcattatactccttcactgcctgctctgtctggaggacccgcatatcaatgccatgtttcttgaggtactccacagttgatgaaggcaccttcaaggcctcactcatccctcggccaatcacaagagtctgtacacccttctcaacaacttccttcacatctgcaggctgcacaccaggagaatgctcagttcctgtttctctccaatcccaagtccgactgccccctggccatactttgcagtccttataggttgtattagagccttttactttcatttgcccccatgataaggaagcaatttcaggggaagtcataaggaacttcactgaagtccaccgcactgtctcctcaaagttgcgttcccaaacggcgcagtgctctgcccgcacttacgctcccagcgctgcttcgggatctgcggacgcgtgggtcgacgatatcccgtaaattccg

SEQ ID NO: 322065 - DNA, 716 bp, Homo Sapiens
gctagtggcaggttgaggaatgcctcaaataatagtctcatgctccaatcccatggatccacaggcccttgcagagttatctttcattgatttgtacatgacactgtgagcctgcagtaaagcagcagcagcccagttcatcacttgagttccattgatccagccactccaatgggctgtggctgtctccagtctaatctccagaggattatgggtttgtagtctcctatgaccttacacttggatttccagcagtcagtggcctcttgtttcattttactagaatgtgagctctgggtgagagagtgagactccatctgtctaactttctctttccacatccagcattctcctggtgtgcagcctgcagatgtgaaggaagttgttgagaagggtgtacagactcttgtgattggccgagggatgagtgaggccttgaaggtaggtgttggtatcacagcattcctgaggacaggtggggatctcttgggcctttgtcttacagacttgtccttcttgggaggtcatctttatatatcatgtaccctcattttgctgacccaggatagcagtggctgcacacattcctctgcctcatcagcgttgggctctccagtctacctaaccctgagacagtgtcatttcaactatttctcagaatccctcaagttctacaaggatcactatttggtcctttatattttaataatactttc

SEQ ID NO: 322066 - DNA, 412 bp, Homo Sapiens
agtagtatacaaaatatttcattttttattttcatgaataattgtcattaatacagcagaaaccgatatgattataaaagataccaaaaaatcagaagaatgttagcattcaatagaaattaaaacctgagctgagggctcattagagtctgacacttggcaccattctcatggaagtgaagaaacatgtttgccggactccttaaaacaattcatgtaacacagaaagagttaaatttcaaaggagctacaatgtactggcacattacgactcttgttgttgacaaacatttaagcagggctatccaaagctcacagtcttgaaggcagggaggtgtgtaaattgtaggtttttaattaagcagtaagcaagctgagatttttcttggtaaaatagtttgtttattcatcc

SEQ ID NO: 322067 - DNA, 771 bp, Homo Sapiens
tctttaccaaaaaatagtttattgcacaaaatttaaggaattcccaagcacacttacatttgtaaaaaatcaacgtgctttttaaagttacactttgtcagacacggtgacccctttcccaagaacagccacaacttgaggactctcttttgtgaggaaatttttaataaaaacaagtaactcaaaagcactgaattttccagaccctctaacacatttccctccggatcctgtgagagcctgagatcacttatgacgagattcacctggaccttccggtcagtgagctcagaacacctcacaccacagcgtcactcaactcaagtccctcctcacatcagagggctcctcgaagggaggccccaggacggttctctcagatttgctggtccctcccctcctagaatcttcacgtacaacattctgtttttgtttttaaagacctcagggaactagaactcggttgtgggaaccctgcaccgaaggagagttgagggccagctccttagcgcagcacagcacggactgtgttctggttggcagggcccctgctggacccacccgaggagagtccatttcacatcctatcagaaacactgcctgatccatattgcagagagtgggaacgggtgtgagtccgtaagacccgtagcatcaatctcacatataccacggaaaaacacatgaaaaccaagttacgttgtttttggaacatcagaaaaacaagtagtgacatcgtgaagtgccctagcctgttgtgacacacggtcc

SEQ ID NO: 322068 - DNA, 530 bp, Homo Sapiens
agcgcctttgtctgtctatctggtgacaagagagagacaagtaaatgggggccgttgggacggcgggtgcctggagggcagctctgggctcagcgggcagtgcttagagcacaggcccctctgttgggggatggggaggagagcagtctgcccttgggagcgtaggccccagggagacttctaaagccccccctgtcgtctgctcttcacccagcaccacagaggcacctgctgcacacacaagcatctcactcggcccacggagggggccaggcttcctttgcctgaagctgttttgggaagggtctccacacaggcactgatctcccaagctttggtcatgatgtcttttaccatttgataattttaaacattgtttttaaacccaaaacatttagtggtccgttgcctctgaagatgtaaacaaacaaatacactatttctgggaacatttatattgagattctttgtggctattggtgtgtctcacaggcaaaatttgatttggctaaaataggctcagatgtatt

SEQ ID NO: 322069 - DNA, 785 bp, Homo Sapiens
  misc_feature (17)..(17): n is a, c, g, or t
  misc_feature (188)..(188): n is a, c, g, or t
tacctctccggtcattnttcggaaaatgttttccctgtcttccctcctcgttctggggaaagacttttctttgacactttcccctttttcagaacagattaactttctttctttatcaggctgcttgggtcgcttttctgtctttaagggtttatcttctttgtctttcttcactttcactgttgctnttctctgttctttaaacttctctcgtttatcaggagatgatgaaagacttttgtgatctgtttctttaggcctgatctttggaaaaagctttgacatgaatatgtttgacagtctgaactactccatcataaaatttcacagtgtaagtaccatccttgttaacagcagtgactttggccgggtaaaaacgacaatcagaccagcaagcaaggacctgctcatttatttgaaattcagaagatccatcctcttcatgcaagccctctttcctcagctgtattttctctaaagggcgtaaataaggactgtcccagcagaaccactcatcataacgatggttccaacgcttgaaatggatgagtacttttccttcctcgtagtcaatgtcttctatgtgagctggataccagtttttttaaacggtcccgggcttccaactgggctcccacttcaaagctgattcctcgtctgttaggtggatgctttgtcattttcagtcatcaacggggctgcctttattctcctcacggccccactccggctgcgccgctccaggaccaaccgacagaaggactctgcgtgctctgcaccacccc

SEQ ID NO: 322070 - DNA, 528 bp, Homo Sapiens
ataaaactttgaattttttatttgtgaaattaaaaatatggtattatatatatataaacttctattcctctataaatatagatgattttgtgatagtgaacagaataaatgtataccaaattcaaagaccaatatcattttagcgtatgacagacatagataaatttaggtcttaagtaccggcattttgataaattcttaaagtttaaaacaatacaatcaggaggattgcttttctcctcttcttcacagagaactaaagtgaatatttttaaatggctttgaaagatttacatgtgacacatttctgtaaatccaaaagaggagcacacaggatttaatgcagtagacctgcacacattttccctttagcatgcatgcccatattttgtttatttcaggcgctatctccccgtcaattattccaccttctttacctcctgaaatcttaccaggttattattggtggtgtgaattgttcccccctcagaatgtgctgctgaataataatcgtaataaaatgttgcc

SEQ ID NO: 322071 - DNA, 390 bp, Homo Sapiens
  misc_feature (356)..(356): n is a, c, g, or t
aagtttaacctttaatcaattttattcttcatatgtgggtaagggtacagattctagaccatgtctgtgaagtcatggtgatatcactgtgctaaagatcatggctgtaggttggctgagaatttaaaatgcaagaaaaatcagaagcagcacatcattgcttcttattctaggacatacagagagtttcttcagtaagtaccactccagttgtcttcacaatttaatgctacagaaacctaaatgtttctacttcagctacggaaatcattcaattgggcagggcaaaacattttttattgcctatttattaaaaacatgaggaaggggaggggaaaataataggatgtattaanctccatggctatccataattcctaatgtcctggc

SEQ ID NO: 322072 - DNA, 582 bp, Homo Sapiens
ctcggggggttggcttgcgggccggctcatccgcggctctgattggcaagcgggctgcacgccctggtaaatagaggtctggccggaagggcgagcgggcacgaatgctccctcactcccgattggtgcgcgaagatgtcactcgagcctcgttattggccgagacctgccccagcaggtcgcaaccgccgccgattggcctccgccttccggacctcgcacctgtctgctccggattgggcggtggccaccgccctccgcaattggcgagttcgcggcccgggccggcgcgctctcaatccgattagtccccaggccctagaggcggggccttgggaaccgggacccaggggctgggctgccaggttcagcagccagaggggtcttcccgggcgcagggcagctaccctcgcgcctcactcgcagctgcttcagacgtctgctccgctctgccccagtttcggcccagcaggggttgctgtcgcagctgccgtcgccagctgccaccaggtgccttgcgcgcttctccgctctgggggccgaaggacgcagggctttgacgtcccgagccctgcgccccac

SEQ ID NO: 322073 - DNA, 619 bp, Homo Sapiens
ttttggaggagcaaacgcggctcatttattagaatatgcaaaagagaggactttcctccacaaatacagattgctgcttctcagtttctatcaagagcaagacaacagttgaaaactgtattcctgagaagaagcaaaaaagttatcagtttacaaacaaggataacaggtgatttcaacaaaagataaaaaacttttttttccaaaaatcaaaatttcaagtattattccagatgacatggcaaagctagcacaggcggaagccaaaggtgcccctcaggctctgtagggtcttggaggaagggcccgggcagcatgagggagcggcgcgtcctgggacctgcctccagccccgggcttggggccgtggtcactcacacaagggagcagcacgtcctgggacctgcgtccagccccaggctcggggccgtggtcactcacacaagggagcagcatgtcctgggacctgcgtccagccccaggttcggggccgcggtcactcaccgggttagcaaggagcgactaatttggcggccacgtcgagggttagcagttttggacattggaaggtttctttttttaataaacagaagcatatgcttattctttcaaataccaa

SEQ ID NO: 322074 - DNA, 1067 bp, Homo Sapiens
  misc_feature (941)..(941): n is a, c, g, or t
  misc_feature (957)..(993): n is a, c, g, or t
ggcctgggtggcgaattcggcacgaggggggtgatcatggacgcttgacacctgcgggcaggcgccgggaggccgagccagcgactaagaggaccgagaggtggcgtggacagatttcaaggccagagaatggcaggggaacagaaaccctcaagtaatctcctggagcagtttattttactagccaaaggtaccagtggctcagccctcactgctctcataagccaggtcttagaggctcccggagtgtatgtctttggagaacttctggagctggccaacgtgcaggagcttgcggaaggagctaatgctgcttatttgcagttgttgaacctgtttgcctatgggacatacccagattacatagccaacaaggagagcctgccagaactgagcacagctcagcagaacaagctgaagcatcttaccatcgtgagcttggcatcaagaatgaagtgtatcccctactccgtgttgctgaaagacctggagatgcggaatctccgggaactagaagaccttatcattgaggctgtctacactgacatcatccagggcaagctggaccagcgaaaccagctgctggaagtggatttctgcattggccgtgacatccgaaagaaggatatcaataatattgtcaagaccctgcatgaatggtgtgatggctgtgaagcagttctactgggcatcgagcagcaagttctgagagccaaccagtacaaagagaaccacaaccgaactcagcagcaggtagaagcagaggttaccaacatcaagaagacactcaaagccaccgcatcctcctcggctcaggagatggagcagcagctggctgaacgggagtgtcccccttccgctgagcagaggcagccccaccaagaagatgtccaaagtgaaaggtctggtctccagccgccactagggccggactggggcanctgcatcacagcagtnnnnnnnnnnnnnnnnnnnnnnnnnnnnnnnnnnnnncccttttccctccccttttttacttggaggggatttcaaaaactggcccgtccccttcacaagctttttcaaca

SEQ ID NO: 322075 - DNA, 572 bp, Homo Sapiens
  misc_feature (120)..(120): n is a, c, g, or t
  misc_feature (227)..(227): n is a, c, g, or t
aagggccaattttctttgggaaaattttattttcccccccatttttcttattggggaaattttccccaggaaagggacccatttcttttccatttagggccaatttttaccattttggancttctgttttccagtttttttgggttccattctgtttgagaaattcttatgatttctgtgttttctgatgctctccatcctctttatcttcctgtaagttaagtccnagagttctccaacgtagcttcatcttccgagtttgactcagcgtcactttcatttaggcccaggaggtagcagcccactccacatcttttcttagggtccaagattgcaagaggatgggtctagaaaggtacaccgttcctgcttggctgcacaacccggaattctgcaggctttctggcggcaatgccacactccaatcccaaaagagagatgagccgctcccgggcacagaactaagcgctgcacattccggcgaaggatgtctagcctgctggcagtcccattaactggagctgtcaggaagtggtcgcccagcagccatcttaggaccccgtcaacatccc

SEQ ID NO: 322076 - DNA, 1313 bp, Homo Sapiens
  misc_feature (1263)..(1263): n is a, c, g, or t
  misc_feature (1277)..(1277): n is a, c, g, or t
ggggttacgcgcgggcgcactgcgggggccaaggaaggaagaaatgtggtcgcggttggtgtggctgggccttcgggcccctctgggcgggcgccagggcttcacctccaaggcggatcctcagggcagtggccggatcacggctgcggtgatcgagcacctggagcgtctagcgcttgtggacttcggcagccgcgaggcagtggcgcgactggagaaagctatcgccttcgccgaccggctacgcgccgtggacacagacggggtggagcccatggaatcggtcctggaggacagatgtctatacctgagatccgacaatgtggtagaaggcaactgtgctgatgaattactacaaaactcccatcgcgtcgtggaggagtactttgtggcccccccaggtaatatctctttgccaaagctggatgaacaagagccattcccacacagctgagtagctcattctggaaagggggtactctgtgaacatgtggaagcataatgacagtatttttttactgtgaatactaatgttcctgcttttttcagtcccctgaaaaaatggatgctcgagcatttcttaataacagattcttctgaagacagaattgggaaagatctggccccaacaaggcagtgagttcctgatgctaactgaggtgaaagaaaagcaaaagtcagcttccaaggaattcacttaacaggcctgttcagtatggaagacattatttatctgcctttaactccccccaaaggaccataccaactgcatgaaagtgaacttttctatctacgtaactggtagacggagcatcttgatcactatgtgacaaccttggctgtcatttttagttgccatttgcattgatttgagcagccctatctttaccgaacatacctgaatttgttcctgggctcccactttcttcccagaagagggctaacttcctactaaggtctgaagagtgttgaaagtagactagagcttgggaactcctaacctagaactatctgccatcccacaaagtgattatatgccaaagggatactagtcatacctagtgtttctctttctgaaaagagaacttatcctaaaattagccctgggcctgggacaaaggagtcctctccgcccccaaaatgattattaaattgagatgagtccaggataaaactcagataccaaggataaatgaaacttatttagggataaaaagtgggctgggcgcagtgggcttcactccctgtgatccccagcacttntgggaaggctgaanaacgggcgggatcacaaagggtcagggaagatccag

SEQ ID NO: 322077 - DNA, 891 bp, Homo Sapiens
  misc_feature (103)..(113): n is a, c, g, or t
caaggaaaggcgcgttttcaaaaatcccccctttaggttaaaaaagccaaggaggaaaacccccttattttgcaaaaggccaagaaacttgggccaaggaggnnnnnnnnnnnttttggttcatttttttccccaggcaagtttcccttcccccccattttaggggggaaagggggaagccatgataggggaggttccccttttgggggactcaaaccttgattgggatgttgagcagtcacaacgctttctcagaaaaggcacaagcacccccagacattcaggcccggagaacaggctggctcagcaggtcttcacgatcgggtgtctcgagcccttcttcgggaacgagggccacagctggagctgggcatggaacccaggccagggggtgctcctgggggttggtaaccacactcattggggtccagggggtcccggctgagcagcacccacactgcaggcacatggcggcgcactgtgagggggtctagccctgtgtcaggtgaggctgggacccagctgtcctcagtctgaaggaaacgtagcttggtgagctggtgcaggcctgggacccgccgcttgacaatctcagcgcagctgacagcctttcctgcagccctgccagaacctgagaacactacatgccgagcactgccgccctccaaccgacccagagccaaccccagcaggttgcgaattttgctgccatctcggacccgcatctcaagggtatcaggaggtagctggggcattggggaaggcgctgggagctctacagagccagctttccggtagtgctccatcctgcttgctgtcttgtctgtgactctcgctgcccacgaagccgcctcacgcacgatccggagccaagatggcgcgcgggcccgg

SEQ ID NO: 322078 - DNA, 474 bp, Homo Sapiens
taaggagcgccccccttttcctcggtggctttcagtttcctcacctcccgcggagaccacggccatggtcatttatccacttgacaaacatttcacgagcccctgccggtccaagctgtggggacgccgtactcccgggcctatggtgcagcaggggaggcaggcgcgtcaccgggaggtcccgagacactaggatccctgccaggccagaggcgaccaaccgtcctggatacgggagctcccggccagcctgacttccaggaggaagcggtgtggggattacctccgcccgcctttagtgccccttgagacctggttctggcctctacgtttcagcccgctactggctcgcacgacccagcgccgccgtggtcccttctcagcgccttctgctccagcgaccatcatgttcccgggtccgagcagccagggccgcggtcaccgcttctctcgcacctcaggccgagaacccac

SEQ ID NO: 322079 - DNA, 379 bp, Homo Sapiens
  misc_feature (188)..(188): n is a, c, g, or t
  misc_feature (197)..(197): n is a, c, g, or t
  misc_feature (205)..(205): n is a, c, g, or t
  misc_feature (207)..(207): n is a, c, g, or t
  misc_feature (212)..(212): n is a, c, g, or t
  misc_feature (219)..(219): n is a, c, g, or t
  misc_feature (222)..(222): n is a, c, g, or t
  misc_feature (247)..(247): n is a, c, g, or t
  misc_feature (259)..(259): n is a, c, g, or t
  misc_feature (269)..(269): n is a, c, g, or t
  misc_feature (272)..(272): n is a, c, g, or t
  misc_feature (277)..(277): n is a, c, g, or t
  misc_feature (282)..(282): n is a, c, g, or t
  misc_feature (291)..(291): n is a, c, g, or t
  misc_feature (295)..(295): n is a, c, g, or t
  misc_feature (358)..(358): n is a, c, g, or t
caaagagaataaatgctttttattcatttgtagttatcaataaaatgaaagaaagacctagcatttttaaaactccactgtaaaacataggttaccataaaaatgtatttaatgggttaatatttcaatatttattttttaacagaaaacactcatcacatgcaaaacctgtcacttcacatcttcangtttcatangttgatantncctantcaaaangtncatgtgaaaggaaagctttttcatngttgacctttangtcattaaanttnttcantaaantgggttgtnggtnctgggccgggtgcggtgggttcacgcctgtattcccgggcactttaggggggctaaggccggnccgagggtccggggttccagg

SEQ ID NO: 322080 - DNA, 310 bp, Homo Sapiens
tatttcccattggaggctatttctttttttgtcttttaaaaattttattacacaaatatcacccattcccacgtgtcagaggaaagatgtccttgctctctctaaaaccaatagtggagaacttttggaaaacaaaacaaagtccaactagcttcctccttctctggcccaaaataacctcaatgtgtcaactgagatagcataagacttatgcctttaatgcttacatttaatttaaactttttagcacaacattggagattgactctaaatcagcaacaaaaaaatatatatttacaatatttctccg

SEQ ID NO: 322081 - DNA, 706 bp, Homo Sapiens
ttttccactattaatctttcttttgataaatcctctattgactgggtagaggtatgtttgtgaaagacatgtaacttggggatttgttactttaggtttgttcccttgaatttcatctcatcaggcaaattgtactagttgtagttacgagttttccctcagtgaagtagcaataggctgtaatcaagaaaatatgccatttatagagataagataaatgaaataatacttcagccaccaggtttttctgtctcacatacataagcagcatttcattgcagatatgggactgattctgtggcttaccttgattaacatcttttggaagttttgctagtgtgctttcctttctttactatgtttctcagattcctttgtatcagggttttgggtgtcacttaggttttgtccatcagattctgtgagacaccaggcatcgttttgaggatgtgggttatacacatggagtgcttctggaactatcagcccacttgaccacccagtttgtggaagcacaggcaagagtgttcttttctggtgattctccaggccatttaataccctgcaatgtaattgtccctctgtggctcacatttcattagtgagccatgaaatcaactcagtgggacatagccagcatttttgcataccaggttgggctataaaatatttctgttgtcaataaattttaaatgttttcctgcat

SEQ ID NO: 322082 - DNA, 422 bp, Homo Sapiens
  misc_feature (16)..(16): n is a, c, g, or t
gaggaacaagatccgnaagcttccctctcgaacaagaggaaaacaagccctggcctccgcacggccaataatcaacagctccattttttttcccatagctcctttgctttgaaagtccttggttccttctccagtgttttcaggtctatatcctcccaggtactcccagggccgctttgtggggcttggacagaaacacgtctgtgttggcaagcagcaaatgccaagggaggcagcccccagggctcttgcaccaatggaccacatccccatggtgaagaaacttgggtcctcaagtgcctcccttctgccggccttttaccgccccgacgcccgggcgctaaggggccaaaccgcccggcccggagggtcccaggggcgggccccgcgcttgcgcagcctctagcctgtgctgcatcgcg

SEQ ID NO: 322083 - DNA, 1025 bp, Homo Sapiens
  misc_feature (74)..(89): n is a, c, g, or t
  misc_feature (98)..(202): n is a, c, g, or t
  misc_feature (204)..(212): n is a, c, g, or t
ggaaaaacgaattggcccgtttccctttcttttgggggccgcccgcccaaagaaaggttttaaaaaatttttannnnnnnnnnnnnnnnccccaaggnnnnnnnnnnnnnnnnnnnnnnnnnnnnnnnnnnnnnnnnnnnnnnnnnnnnnnnnnnnnnnnnnnnnnnnnnnnnnnnnnnnnnnnnnnnnnnnnnnnnnnnnntnnnnnnnnngcactatgaggtttaattggaaacattaaaatggttaactcataatgaattataaaactttgatagttacattgtactatcatttatgaggcatttatttttcattatttacacctgaaagaaacttcatacttgtgtgttctgttccccatctcagagcaagattatgaagagaaggtctaaactacttatataaatcaaaacccaactgggctagaaatgaagtataaagagaactaaatctatacacagctgtgccataagagcattaggtggttttagctcttatctggggtatgaaagcaatttagctcatctcacagaaacaaaagcaggtgctgaatcatgaaaacctcaattatttttagcatgcctcttaatttttctttcccctggtttcttgtcgtctgtgcttgattcttgaacaggtaaccacttgagaggatgccggcgatagatgggccatggaggaagtgtcagcaaacatgaaaaagcaaatccggccataactatatagacagtccacccgaactgttcagccacgtacccgtagataaatccaactattgcagaaaaaagaataattccctgaaacatctgttcagctagcttctggcccttgtaatccatctgcgtgggcagcgagctcagatgctccagcatggctggctgaggaggcgggcagctgagcgcgggtggcaggctgcgaggcgagggcgaccgagacttaaggaccgtgagggctaaggtctggcactgcgcgtcagtagccgggccttctaagcccgggagagcgatggcggcggccccccc

SEQ ID NO: 322084 - DNA, 831 bp, Homo Sapiens
  misc_feature (325)..(325): n is a, c, g, or t
gggttttaaatggggaaaaccattaaaaaatgggttaacttccataatggaatttattaaaacctttgaatagttaccattggtactatccatttatggaggccatttatttttcattaatttccacctggaaggaaacttccataccttgggtgttcggtcccccatctcagagcaagattatgaggagaaagtctaaacttacttatataaatcaaaacccaactgggctagaaatgaagtataaagagaactaaatctatacacagctgtgccataagagcattaggtggttttagctcttatctggggtatgaaagcaatntagctcatctcacagaaacaaaagcaggtgctgaatcatgaaaacctcaattatttttagcatgcctcttaatttttctttcccctggtttcttgtcgtctgtgcttgattcttgaacaggtaaccacttgagaggatgccggcgatagattgggccatggaggaagtgtcagcacacatgaaaaagcaaatccggccataactatatagacagtccacctgagctgttcagccacgtggctgtagataaatccaactattgcagaaaaaagaataattccctgaaacatctgttcagctagcttctggcccttgtaatccatctgcgtgggcagcgagctcagatgctccagcatggctggctgaggaggcgggcagctgagcgcgggtggcaggctgcgaggcgagggcgaccgagacttaaggaccgtgaggggtaaggtctggcactgcgcgtcagtagccgggccttctaagcccgggagagcgatggcggcggccccccc

SEQ ID NO: 322085 - DNA, 495 bp, Homo Sapiens
aaaatcaggtcactacagtaaggttttaagtattgccaattgaaaagctagaaatggtattactgttgcaaagtgttgtcaataattgactccaatagcattgtaaatacttgtatcccacaactattttaaacccaagcaataaaatggattttctaattcacttcaattctttatttctcttacctatctatgtcttggtacataagaaaagtgtttccatcactgcattggtagaattatttcagtgttattatttttgtgatttcgtatgtctacacaaaaatgaattagtttaatttatattgtgatacagttgtttgagaaatatttttaattctgtttcaactttatttctccaagtgtataatataaaaattacttctgttattgttctctaccaataggggaaaaaattaaaacattagatccattgagaaagagatgatgtaataaataattaagattagtaataatattatcaggggtgattat

SEQ ID NO: 322086 - DNA, 464 bp, Homo Sapiens
tcgtgacttcccaggagggaaaaaatgtgtttatttatttaaattaaaaaatattgtgaaaattacaaagtgttaaatacaaaagacaattctatacaactcaacagaataagaaggaagtatatacatcactttttaataggtgcagagagacttgcaccaaacttcaggattaagcaatggaaaatgtgacaaggcacatgtccgtcgcagtgaaatttcagaattcaagtgattccaggcaagaggccaaacttaacttggcttctttcaacttaaacagccccctttggcataagtccacactgaattttaaagtgaacagagggcctttttcccccaaacataaatttcctttagctgtatgtcaaagcggactgataaaccagctcctacactgttaacccttccatggcaacagtagttattgctgtgtctccaatccatgcagagcatttttcttt

SEQ ID NO: 322087 - DNA, 398 bp, Homo Sapiens
gccatgttaaagttttattaagtttcaatacaaaacattccaaaaagtgaaaagtgatctataatacccaagttctatgttcaactaccagttaaacaaggaaaacattttctgtatcattctgttttacaaccagtataaacccagaagaatcaagatctgattccttttccacacatctgctaggtcagtaaactatcaaacaggtatctggtcattttaacatactccttatattcctatttggtacaatctctatatcctatactatcttcaagatatctaaatatcttaaatatttagggtatctcaagggcccgaaggtcctcacagaagcgttaacccaagtaatcgtaagagtatagaaagattgggctaagacaactatgagtgcaaaa

SEQ ID NO: 322088 - DNA, 1055 bp, Homo Sapiens
  misc_feature (313)..(313): n is a, c, g, or t
catggcccagagctcacttatctgagcttaaacctcccggtctcaagcatagagagcagaaatgccagatgcagaggttctctgggtagcggtggtggaggcagtcttcttgagaacacagggttcttcttcaccccctcaactgcaggcagggcagggtgaagaggatgttgagttgcaggaggcaaaaggcagcagctcagagagcagggaggattcagctgggagactgatgggaagcttccatggcatggccccagcaagcagtgacctgggatcagctgggatgggagggtgaacagacagctctacnttaactggtgtgggactagcacgtctgaattcctgaattcccttagaggaacatgggctccttgctctggaacttcacactcaaacaataagcctgaagggaagaagtctcttcagggtcccagaagtgccccattaaaagtccatcctgtcaactttggtgtctcatttgtgggtccgtatgctgctgcagatttgggcgagacggttggagagcttcttaatgtttcccaaggcctctggatccagctgggcaatactgtgcctctgcaagtcactggccaataatcgcaggctctctccgccgcccactggcacagtgaggaagatctctttgctgtcagcaagagggctgccattccctgagatgttgtaaatccgctctcctgctgctggagtacgcaggccaggggtcttgaagacccttgagtcaaacctgggtgtcaggcctggagttggtttgaccatggacacctccaatcggcccacggctggggtaacagtgttagcacggcttgaccttttcccttttccttttccttgtatggactgagttctcttcttggatggaggacaccttttgactcttgcagtttgaagattcttacgttcattttcttcttcttcttcctcttccactatcatttcatctacctgtattacctttcgtgttttggcagatttcagcgaacgcgtgggtcgacgatatcccggaattccggaccggttaccagcctgctttt

SEQ ID NO: 322089 - DNA, 273 bp, Homo Sapiens
gcctggaaaagcgcgcccttctcgtcgcgcagggacgcgcgcagcgtgaccggctgctccggggctaggccgcgcacggcgattcgcaccggttcgtcccagcagcagcggcccgcaggctccaggatcagcgtcgccgccatccgagcaggaaccttaatgatctgaccaacctgcctcagctgtggagaccccaggaactgcgccgaactcttcaggctccattgtacagccgggacgctcgaaggacagcaggagatgaggccatttttt

SEQ ID NO: 322090 - DNA, 425 bp, Homo Sapiens
aatttagtggccagcttttagatgacagtgatcttcacctcatctgcacctgtctacccccgttagacaggggtctatgcttgctactgtaagggtaaagggttgactgagaagggatggtagggatatggtgggggcagggtatccagccccacttcttcaggctttgctgacagtagccggcttttagatgacagtgatcttcacctcatcattctcgtcagcccggtaaaaaaaaggaatgcaggggttgctgcccaagcctgggcgctcccgggggttctgcatctcacgaagcagctgcatgatctgctgtgcagtggggttgtcacggggagaaccctccctggcctctccttgggcaggctccacactgccggcgaggctcacctcgcaaagatcaccgtgctggttggcagccccaa

SEQ ID NO: 322091 - DNA, 1845 bp, Homo Sapiens
  misc_feature (33)..(33): n is a, c, g, or t
  misc_feature (160)..(197): n is a, c, g, or t
  misc_feature (268)..(268): n is a, c, g, or t
  misc_feature (273)..(273): n is a, c, g, or t
  misc_feature (275)..(275): n is a, c, g, or t
  misc_feature (281)..(281): n is a, c, g, or t
  misc_feature (389)..(410): n is a, c, g, or t
tttaacctttgcaaacacgatggtgatgagganatgcttgccaggctctcccagacacatctgtggttctgggctgtgaatgttaaacacacactgggatagacgaccagggatgagtgttccctatcttctccccgcccaccactgtcaatgtggcctnnnnnnnnnnnnnnnnnnnnnnnnnnnnnnnnnnnnnncattgagtttccctgcatttagctgaaacaggatctcgtctgaagggctggaggagcagccggatcagcanctccntncgcccnacggccgagcctccgctcaggctggcagccccagctctgcacgaggaaggcaatgttctgtccttcagcagaagtcatacaaaataaggatccaaagtgaactcaagnnnnnnnnnnnnnnnnnnnnnntaaaccccaaccccttacagtggcccattctgcagatacggattcgcgaaaggaaaaatcagagggaagaggctaaaatccctcagtctaccccacttaatgtattaaaaaggaggctttgccccaaccccaccccatgagaagaagcatgagaaatgcgggagcgcaacagagagcttgaagcgggctccaggtgggtctggtggacagaagggccacagtgcctgcctgctgggccatccacttgcccagggatgttctaggctctctgattggtgtggcaacgttcctgaaacgctgtgatccccgtgggctgtgctctgccagtgacagcatctgcgtaggagggctggacgatggtcggtatggctcagaggagctgggtcccctccggagccccacggcgggggtggcggaggagaggggagcggtagttacgttgcatagtggtcaaagctgccgaggtactccagggccgcacggtagcacagctgatactggtcctctgtctgcaccatggcaggacgctgtgtacgcagggtcttcacggtctgaaacatgtcgaccacgccctcatagcgcatgcgctccaggacgatgctcagagtgatgaacaccccggtgcggcccacgccagcactgcagtgcaccgtgataggcccatcctgtccaaactgctccttggtcttatgcacctgcccgatgaagtcaatgaatccctcgcctgtcttgggcacgccctgctctggccagtctgtgaactggaactgccggattgtccttgactgcccatcccgggcatccgtgaccttgaactcacgcaggatatactggggcatgttgtactcagccatcgggtcaacaacaaagtactggtagcgagcagagcgctctgctggccagtactggtggcatttctccctgcccatctcccgaagcttggtcagcatgacgatgatggtggaattgtgctcccatagcatgcgccagaagtcctcggtgctctctgccagaggcccctgtgtagctatgtaggccttctgctgtctataaccatccaggaagctggcattgatgtagtcagagccctccacaccacggatgggctgcagacacacacgggtcaattcgtagggcatgatgttcaccagccggttcttgaacttgttgcagggcaggttggcgctgatgaagcgggacgtgtgggccttggagctggccagcaacttgaactcgagctccatggcggtcacactctcccctggaggcacttggcccagcttctggatgtgggcatacaggttgcgggcaggcacctctgtgtggccgcacgtggcagcctccagcagcgcctcatggatgaacacgtactggtcctccgtctgcaccatgtagttcctctgtggaaacatgcaggtcacgtggccaatcttcg

SEQ ID NO: 322092 - DNA, 1048 bp, Homo Sapiens
  misc_feature (742)..(800): n is a, c, g, or t
  misc_feature (838)..(901): n is a, c, g, or t
  misc_feature (948)..(1001): n is a, c, g, or t
acctcatctttttgaggcctgggtggcgaattcggcacgaggagacctggccctcccctgctgccctgaagaccaccccagtctacctcggtgctggccaggaaacctttcggctacctctcccaccatcccagactgtgggcagggggatggggagggagtgttccttgtctctgtaccccacccgcctggtccccagatctctcaccttgggtgaagattcatatatgccctgtaatgattttgcccactgggcaactcagaaatacttcgatctcccaagatataagaggcagcagcaaacgtgcctattgacgtctgtttcatagttaccacttacgcgagtagacagaactcggcttttcagaaaataggtgtcaagtccactttataagaacctttttttctaaaataagataaaaggtggctttgcattttctgattaaacgactgtgtctttgtcacctctgcttaactttaggagtatccattcctgtgattgtacacttttgttgatattcttcctggaacaatatcattcttttcttgaacggttggtttactacaatattcaacatcaatcatgaaggcagttactattttgagtctcaaggttttctaaaaattcgcctcccctccccttcttgtaacgcccttttccaactatctttttatacacccgaatacattttccctcccttctcttttccctacatgaatctttggcgctctcaccgcgacnnnnnnnnnnnnnnnnnnnnnnnnnnnnnnnnnnnnnnnnnnnnnnnnnnnnnnnnnnntttttctcctctatcacgtcataaaccagatgcctccnnnnnnnnnnnnnnnnnnnnnnnnnnnnnnnnnnnnnnnnnnnnnnnnnnnnnnnnnnnnnnnnacccttccctctacctcctcctgtccccaatgtcttttactttacannnnnnnnnnnnnnnnnnnnnnnnnnnnnnnnnnnnnnnnnnnnnnnnnnnnnncctgactctatccgccctcctctgacgcgctgtgtcccccgcctcac

SEQ ID NO: 322093 - DNA, 859 bp, Homo Sapiens
  misc_feature (291)..(303): n is a, c, g, or t
  misc_feature (619)..(631): n is a, c, g, or t
ggcctgggtggcgaattcggcacgaggctggatctgggacctccctccagaatttcctccagatgggggcagtgcccagggaggggttatttgtcttccctgccatggagtgggaatccccagccgaggccctaggcccctcagcagggaagggatccccggggaggcaggtcccaggagcagaccctgcccccagcccccacagacacaccccaatctgaaagccatgcgtgtcggtgtatataggaaccatgtacagagcccagagaagccccctacatccccccgggnnnnnnnnnnnnnctagacagaaactcatctatatattctgtatctggagttccgttttgaatattaactgtgttatttttatacactttttaagccttaactcgccattgatttaccagtttaacgtttcctggggtttctttgcccatggggttctctgcccccacccccggccctttgtttgacttgcgtcgtctgatactcagtattgtagctttttgtccgcatgttactccctgtaaatacgctgttatacatactgttaacacccctttgctttttctatgggacctccaggccaccatatttagaactagttaccttattnnnnnnnnnnnnncagtctgttggcttctcagtctgcatcttggaggcagggaggtgaaggcaggtgcccctcagacacttcaggaaggtagtttgcattctatttaaaaaagggagtggggagcaaatgaaaatcaaatgtggggggaaaacactaaagggggcaagaaacaaaggaattacaaaccctctgctctttgtatttctctgttgtgaagaataaactgtacctgcacccgga

SEQ ID NO: 322094 - DNA, 1752 bp, Homo Sapiens
  misc_feature (105)..(113): n is a, c, g, or t
tcgaatgatcattatctttattcatacacacttgcttccaaactacaattaatgtttctaacaaagcgtatcatgcaaacggagattagaggttatacaaactgnnnnnnnnngcaatgcagtaatttacacatccgtctcctctgcgatataaccaaatgttgtttgaccggttgaatggcctctacattttgtcagtaggtgcttatccagaaaggaaaaacctcaaccttccgtctctttcctccaaacaaagttgggggcttatatgatgtttttcaattaatgatttaaacgtggtatgtccttccacacacacaaatcatgtagcaaaagcaatgacttcaaatgcttctgtttataaaagatattctgaaagaccctaacagaagggatgtgaggttaatttttagaaaacctttagactcaaaatagtaactgccttcatgattgattttgaatattctagtaaaccaacccttcaagaaaagaatgatattcttccaggaagaatatcaacaaaagtctacaatcacaggaatggatactcctaaagttaagcagaggtgacaaagacacagtcgtttaatcagaaaatgcaaagccaccttttatcttattttagaaaaaaaggttcttataaagtggacttgacacctattttctgaaaagccgagttctgtctactcgcgtaagtggtaactatgaaacagacgtcaataggcacgtttgctgctgcctcttatatcttgggagatcgaagtatttctgagttgcccagtgggcaaaatccttacagggcatctctgaatcttcacccaaggtgagagacctggggaccaggcgggtctgggcacagagccaaggaagcatcctcctcctgccaaaagatggccacagagcctcacggagcaaggaaaggggtcccagaaacccctgggaatcctattccagggctgcctctggatgggggacactaaaaatgtcttttcctgtggtttggaagtttctaaaccttaagcagttgtccccagtgtctattaaaaacttcgcagagcatcagtcggccaagttccccctgaactgtgcagtcatttcccacgtggactccataccctaggagcatgggaaaatctggcagtgggagatcaggtcgggggtgctccagctgacccaggctaagtcttcctacaagctccagggcattggaatcttaggaaatcgtcagttgctttgttctaaaaactcatttttaaagaattattattaaagttctctataaaaaagtacaaatagcccagtatattcagttgctctactggaattaacaaataatttcttcctttaggttaagaaaaagtctttggaatttgggggcttttgtgtagggtcactgtaaggctgttggatggctgagtgtgacctccacggttattaactgtcacctgatcacataaatgggaggcacaggggtcagaatccttcatactgttgaccttcccgaagaatccctgacactacggaattaacacaattgtggttgaccccatttctagatgatggccttcatccatgtgtgcgtcaggtaaccttcccaatttcctggatcttctagcagcagaaacaggtaacattccctggatctgctgcatcagcccaaatgggaggagacaggaatgttgaccgtccagtgtatttcacatgtagcccaagcagcttaaggaaaatgactttaaaaaaatattttggctg

SEQ ID NO: 322095 - DNA, 847 bp, Homo Sapiens
atggacgctcaggacttaagtaattcactgggcttactctcaaattttctctccccatgggaaaatctttgctttatgtgtttaagaccagtttgccagttttacagtatacataaatttcaaacttttgaatatttaccctacaactatgataaatatttatactttattgatctactttaatcccaacatagttttttatatcagaaggttggtcccacaatataatgggacttttctttctgcatccaccttagcagagggcaagttctttcatcgtggaagatctgaactttgacgctagcttgacaggctgaatggaccttgacagatggccaagtcaaaacccctcattttacagatgagtttatgctagctgtgcctttgctcagagatcataaatttatgtgtgatctttgactttcatcacagtatccttgtaaatgagagagaattcttgttttttctatgccaggtctccctcagatgaaacaacaatcctgaattggcgtggtcgtctagcttttatattcaaacctagttttgcatttgttactcagaaacacttcaagtaacaaaaggggggcaggggagaggggtggggagtggacacttgcttcttcagttctttgctcagctagggtatagctggcctgagaaggcagtgcaagccccagagactgttgtaggttgctttttcttcctcctgggcaactatttgtggaaaggttttaccttagtcattatgtaaatataatgtgtagaaaaacctagtcaacacattttaaattttagctttcttaatatttaagtattatcttaaaacaacattaaatttctattagtt

SEQ ID NO: 322096 - DNA, 817 bp, Homo Sapiens
  misc_feature (39)..(39): n is a, c, g, or t
  misc_feature (42)..(42): n is a, c, g, or t
  misc_feature (111)..(119): n is a, c, g, or t
  misc_feature (433)..(446): n is a, c, g, or t
  misc_feature (466)..(527): n is a, c, g, or t
gagatcttgtttttggttggccagttgttcttatgcccnccntaagggttaagggtaggaccttttttatttgggttccaatccaaaattttcaggttaacattttccccnnnnnnnnnttagtttttcatcttaacaaatttatgaaaaccaaatttgaaagggcagggatgattccccaattatagaccccaagtagagggtttatactttcatataaaatgaaaaatattcagttctaccaatttaaatgtttacttttggatttattatagaagaaaatatcattgtaattataaaagccataaaaatgggaactgtattgtgaaattacatcaaggtatcagattttatataaatgaacaataaaattcaatttttatttatttaaacgtagttaaacattggaagacaatctcccccatggggaagnnnnnnnnnnnnnnccttgaataataaagcaacnnnnnnnnnnnnnnnnnnnnnnnnnnnnnnnnnnnnnnnnnnnnnnnnnnnnnnnnnnnnnntggggtttaacaattaagtcaaatgttcaatatgtgctaattaaatttcattttaaaaatgatctttggatgattacatttccaactatgttttcctataattgacatttaatgttagtttttgaaaagttagaaaagaaaccaatttatatgaagattgccaaattttgcaatttgaacactattttaaactttgaatgtccttaaagtctttaaacttactttctaaaataaataattgttggaataaaccaaaagacatttcacatatttgcactgcatacgatacc

SEQ ID NO: 322097 - DNA, 1002 bp, Homo Sapiens
  misc_feature (109)..(109): n is a, c, g, or t
  misc_feature (721)..(721): n is a, c, g, or t
gaactcaccatggaaacccatgtcagcaaacagtgaccagcaaatcctcttcccttattttaactgctgccccctaggagactccagggggcaggcattgcttcctccntagtgtgaactctctggtattccatccaccatcctggcagcccagagctgcttctgggttaggacaacaaatagggggccttacagtcagagcagctcttacccaaagtggtgagcgtcaacttcctgtccagattgcaagttaatggcctttacagctgactcgggctcctatgtcgtcattaataaatattaaagctgataaggaccaagaaagtgggcctgcagcctgagtgtgggaggcccaatgtctttctggttgctctgttgatgttagaagtcccaccatcacccctctcgtgggtcatagttggagagctctggcaagggttagggcagaggtggctttgtgaacactgggccctttgagcaattaaccccaggccctagtgggtcatcagttgtagagagacggtctctggcaggatcgttgcccttcacagagtgtccaaagatgctgtccaagaaccaggatgctgcttggctcttttctttctcacggtcgccagtttcctttctcagcatcctgaggctgcacctccaaacactgaccttcttctcctctgaactgcagccacaggccccttggggcccaggactcatgccccttttngcctggagctggaaggggggcccctaacactgaaggtcttgcaggggcaatgctctgctgagtgcctgtgctcctgccaatcctgacgcccagtagacgctggggaaatgggccaaagagaggaacaaaggcacgtggagggagtgggtggtgaatccacttcttataccaaacggggataagaacccttctgttgggctttgtgcagaagatgctgcttcagcaaccactggaatggggtttaggagcaccagaacgctgctcagaccttcagcagtggt

SEQ ID NO: 322098 - DNA, 2432 bp, Homo Sapiens
  misc_feature (53)..(63): n is a, c, g, or t
  misc_feature (423)..(423): n is a, c, g, or t
caacttttggctcctttttattcaggaagcatacactaattctttttatacannnnnnnnnnnaacattccagaaataagcgaaaatagcagttttaaatatgttacaaagttggcttttcaggcttaataagctttttgagagagggaccagccaactgaccttttcatcaaagcaccaatgtatcttcagtcttttaccaagctctaccacagctgtggttgccttggatgtgctgcacatccaaaccgtgtgaaagctataatggagagttgctgtgagtctctctgcaaggcaccaagaacaaacagttcaagcttcctttcttcagattgaaccaaagtttttgaaactttcaactgctctctcaagtagtgctctctcaggcgtgaaggactaggaatttgttaaaacccatatatncacaaggtacagtaaatcacttccaatagtctggaaatcacatggtagaagttataaataaatggaacactaaaaattactttaagaaaagttttacatcatttagttggtaaggccatttacgtgtacagcacaatttattgtcaaacattctataactggcttcacacaaagatgaaaatagattaatacaaaatgatctgacattttcagtaaatctggaattaagactggatttttattgtagtcaatatcaactttacatattgttgcagattgctgtgctatgccctttaaaatgataatttctcagggtaaaattccatttggatatgtgttcttgcttgtcaaactactaaaatctgagggacacagcaatatcaaagacacaaacagtaactgcacaatatcatctgctggattaagctaatacaagtggacagaattctttaggttccaatatctaataaaccactatgtgaaatgaacaaggtgagacatcttatgaatatactctgcaaccggaacatgtagcatttctttaattcaaaaatctgcctcattaggcatttacaaaataaattagtaagatctcaatttgcttgaggcataacaagctcgtaatggcccacttggccttcctgtttgagctgatctagtaggtcttccttccgtctttttctacctaccactaggtacctatcatggcccaccccatgagacttactcttaagaccatacttctgggcaatctgatgtatttgcttccgttcatcattagtcagctctctagagaaagtcaaatctgtgtggctctcggagcgggcgtagtttctgatgatctgttcaatatctctcttggcaattttattcaccctctctacatccagaccaagcccttcccgcttatgctgctctttcactgagataggctcccgtatgccctcaccagatttacctaaaccaccaccagtccaacccatctttctcagcagctgatttccaatattatcttctttgatttgctgtttgtaagcctcctctgctgagcggccctgaatttcatttcttgaaatcacatcttcaacagctcctttcttcaagttgttaatgacagttggctgggtctttttgagggttttcacagcttccccggcagcttcatatttggacagttttcttcaccccaaactgcttctgcaattacttcactctctagaatcactttgcatttccagcggaggcctgtcatcttttcatagacatactcaactgtcattcggttaaactgagctgtgtcgttcagcgtgcacacgggatttgaagaattctcataaactacaagatcctttatatctttcttctttccagatcctctgggtgaagagcctgtatggcattgtgaacttttgacagatggataagtgggctgtgttttttgaagaattttcaaagcctcgtcggcagctgcatgtttacttgttttcttggttccataaccttcagctaagcagtgatcttgtaaaaacactcgacaacgccatgtgcgatttggcatcatctcatatttgtattcaattgacatcttgttgaatgaggcagaattgttaaggataccaattgcatcatttgcattttctgtaatgacaaaattggtccagtgtttggcagaagcattaaaaattggctgcccggaagcatctttacccagcaccaccaggtcttctggtggcttcagagctggaggaaattcataggaggacatgccaatctgacacaccacgaggtcctctccaaatgtatgcttgaatttccgccggacaactctaacttcaatacgtttctgcaagagttttacagctagctctgtagctcgatccctggacccattcttgctgccagcataacctgtagttaagtagatattttggcatctaacttcacaagcatagccatcagttagaagttttttatttttggggatgtcggcaggaggaatttcctttaaa

SEQ ID NO: 322099 - DNA, 920 bp, Homo Sapiens
  misc_feature (639)..(639): n is a, c, g, or t
  misc_feature (689)..(689): n is a, c, g, or t
aggggcccaggattattttcttttgcacaagttggtgccccagccccccccggaaccaggggggatttaggtaaaccataatgggtggcagggacatccagcctggttaatttaattccccgggggtcatcaaaggagtgacaatttgtacaaggttccattaaatgctaatttagaggataaccatagttgatgacacagaaaaaagccaaccccagaatgcaagaatcgtagcccaggcagagcacgtggaaacaacgtccaagttgccaggtagcagcttgcaggataaccacagttggcgacgctttcaggcagctgggagaattctcagttgtccattttatggttaactggttttactaaggtctaaaaaattcatttctaactcctagacttatgtttccattactatataaagaatgagccaaacaaataaataacaaaatattcactatggaccccaaaatttcaaggcatgaagagagccccaaattctctgtgaactgcaaagagaaaccattagtacaggaatagatgaagaaattgtttttgagtataatataaacataaacaaatctcttaacagcacgagtgtcaacaaatgcttttgttgttgcaaaaaacagtctcaaaaangagtggtgacaaggagactgacaaggagaaatgagctattttttcatctnccaaaattgcactttctggtccacgggttcttagcactgcagatgttgcagaactgtgcagcagagttcatgctgggcatgggcaggcactccttgtggaacatgtgccggcaatggaagaccaccacgctgaagggcttagctgcatctgatggaagaataggggaaaggcacgactcacagatgttctcctcatcaacaagaacacctttcatttgagttcggtgcacc

SEQ ID NO: 322100 - DNA, 713 bp, Homo Sapiens
agaagagacagtttatcttctgagccgaatgggtaatagccgaagtgccctgaagatgattatggaggaattacatgatgttgataaagcaatcgaatttgccaaggagcaagatgatggagagctgtgggaagatttgattttatattccattgacaaaccaccatttattactgggcttgttaaacaacattgggcacacatgttgacccaattctactgattcaccgtattaaggaaggaatggagatccccaatttgagagattccttggttaaaattctgcaagactacaatttgcaaattctgcttcgtgaaggctgcaagaagattctcgtagctgactctttgtccttactgaagaaaatgcaccgaactcaaatgaaaggtgttcttgttgatgaggagaacatctgtgagtcgtgcctttcccctattcttccatcagaataacccagtggagagaagtgttgtggcttccatcctgctcagtggaatgctggtgctgccattgcttagagctgaggttctcaagctctaggatgcagctaagcccttcagcgtggtggtcttccattgccggcacatgttccacaaggagtgcctgcccatgcccagcatgaactctgctgcacagttctgcaacatctgcagtgctaagaaccgtggaccaggaagtgcaattttggagatgaaaaaatagctcatttctc

SEQ ID NO: 322101 - DNA, 581 bp, Homo Sapiens
gttttctctcttgggtacttcgtttttccaaaaacacctttattttcatctgcaaagaagaagctcttttcttctttttccaggataatcatgattaacttacaaaaatgggtacacatcttcaaagcacttccctttaacgggaaacttagctttatgggatttaaacattagaaagtgggaaaaaaaattccattttcttgtcattataagccaaaacaaaatctagtgtaagtcaaggaaactcattcacacttcaggtccttctcctccaggaaccagcattgttatattatttccatttagcaaaatctgatctaatttagtaatccttcttccttctggtgtgatttcaaactcagtgacatcttccagtaccatattgacaaagtcatcaaatcctagaagagtaccaacaatttccttatcactcttcatcacgatgtgaattcttgatcctatacatttgtccacaagctctaacggcagcagctgcgacgggttggtagtagcgttagccgccatggctacgccggaagtggcctgccttcattgatggtgggacgactttgaaaagcccc

SEQ ID NO: 322102 - DNA, 702 bp, Homo Sapiens
  misc_feature (381)..(381): n is a, c, g, or t
  misc_feature (544)..(544): n is a, c, g, or t
  misc_feature (549)..(549): n is a, c, g, or t
  misc_feature (558)..(600): n is a, c, g, or t
ttttttgatattctaagacaaaaaaatggttaatcttcagattaataaattaggtcattataataataaattaattttttttaaagttcagcaacctctgtccaagtatttacaacaatacttgaaagttcctttacaaaacagaacacattttcttttcacgttaagcatactgggtatctgtgtctttcacaacaagcatttttaaaagaaaactcaatgcacaaatgggttaattagtataaaagtgctaagggctgtttgaaaagttaccactatagtatacagtcagttatatttgggggcatactacaacaaacttccagcttattgtggacaatattccagtagttgtttcaaaccattgtttgaaaacaaaanaaaaaatccaggagctgattagtgatgcagataagaactgccatcaatgtctctggccagtgagcaaattgaaaaccaactgaaagcaaatcccaaatgaggaagattttaataaaggaatacccttctcccatagcaggtgcaatgctgactgctcaaaggncgtgncgcgcgcgnnnnnnnnnnnnnnnnnnnnnnnnnnnnnnnnnnnnnnnnnnnctttccaattaaactgcaggtagaatgagattttgtgttattcaaaaaatttgtaagtgatcaaaagcactgctatggaatgcctgtttatctgcctttgtt

SEQ ID NO: 322103 - DNA, 1628 bp, Homo Sapiens
  misc_feature (54)..(54): n is a, c, g, or t
  misc_feature (75)..(75): n is a, c, g, or t
  misc_feature (89)..(89): n is a, c, g, or t
  misc_feature (171)..(171): n is a, c, g, or t
  misc_feature (208)..(208): n is a, c, g, or t
  misc_feature (276)..(276): n is a, c, g, or t
  misc_feature (284)..(284): n is a, c, g, or t
  misc_feature (462)..(462): n is a, c, g, or t
  misc_feature (464)..(464): n is a, c, g, or t
  misc_feature (618)..(652): n is a, c, g, or t
  misc_feature (834)..(842): n is a, c, g, or t
ggcaggtcgggcgagtagagtcacacggtggcagggcgaactacaatagagatncgaagcgggcagtgaggtcanagtggggtgggctnggactactgtacgtcacagtcgtgcagcaacgagctgcgaagtacactcacgcgaggacggccgagaggcagagagacacgngggcggacgtggcagcgatatgagtggataagcaacnatggcgagcgacacgcgtgagtgtgtgggtaccgcgatgccgacgcgccagcgacagctcagcgcgcnaggaggtnattgtgggcgggacaaggagtccggcggaaaataagacagaggcggtcggacagcggaagtctgtaaggtgtgacagggatggcgcgcgagcgggtgcgtcaacgagagtggatagcggggataggacgcgctaggtggagaagcggtgcggtacgcaagttataggggtaaagtggngngcacggaagtgagcatgcgatctctatgggggtgtgtgcggagtgaagaaagggggtacgcaaaatcgaggcgcgagggagggtggagtgcgcgtaggagagcgtaccagaaacgcgcgggatactgcgcgcgggaccggaacgcacgaattgnnnnnnnnnnnnnnnnnnnnnnnnnnnnnnnnnnncattgacagcgcgcggagggcgcgcgaggtgcaccagcgggcggagcgggaagggtgtatggccggggatgaggaggggggggaggcgcgccagcacgtgggccatctcgtcggggcggggagttttgtggccggggtgctagcggagaggatgggtagagggaggggctagcttacaagcnnnnnnnnnagagacatggggtgtaagggtagaaaaagcgggccgtcggtgcggggctctggtcttctaaaggaaaagcgcgggaagcggggcggggtgggcggggggcagtttgtggccctgtgggaccttcggtgagtgatgatgtaagtttccggaggtttctcagagcctctctggttctttcaatcggggatgtctgagggaccttccgcggcatctatgcgggcatggttactgcctctggtgccccccgcagccgcgcgcaggtaccgtgcgacatcgcgatggcccagctcctcagccaggtccacgggcagacggccccaggcatcgcgcacgtccagccgcgcccccggcccggtgcagcaccaccagcgtgtccaggaagccctcccgggcagcgtcgtgcacgggtcggttgagagtggggggggtcggcgcagttgggctccgctccgtggagcagcagcagctccgccactcgggcgctgcccatcatcatgacctggtcttctaggaagcggctgctgccctagacgctggctcctcagtagcatcagcacgagggccacagcggcgggcgcccctggcgctgcccactcccccgtgagccgcgggatgtgaaccacgaaaaccctcactcgcggcgggccgcacgcgcgccgaatccggagggtcaccaagaacctgcgcaccatgttctcgccgcctccagggccgagctcggcagccgctgcgccgccctttggcaccagaggtgagcagcgccactcctgcccccttaactgcccc

SEQ ID NO: 322104 - DNA, 810 bp, Homo Sapiens
  misc_feature (454)..(495): n is a, c, g, or t
actggaagaaaatatagttactgcctgcaaagaattaacatccgtctagtgggagaaacaaacacaccccactcactaagtatggaaaactgattctgggaggaagcagaaatgtccctagataacagcatgtattgcagatacccaaatgtttattgttttctcagcccttcaattttgcttttctctctcaaatgctacagactcaatttaaatcttacctttgattgttgaaaaaagtcactaagatgtgaatacagaatagacattgagaggttatatatgtccaaaacttcatctgtccagcagtcaccgtcctctttcagagtgggtcacgttgggcagatgggcacaggtgctggtgatgcccctcctgggcaaaacgccccatttgtggcacttccagatactatttatttactttttaagagagagacaggctcactctgtcacnnnnnnnnnnnnnnnnnnnnnnnnnnnnnnnnnnnnnnnnnngcagaaacaaaaacccaacatatatgggctgttagatagtaattgtaatttcgtataaatagtaaatgagtacatcttgattaaaagctatgaattcagaattgcttttaaatatatagggggttttttgaaatttattacagtgcaattgaaaatacacttaaaatactgcaggatgcttagtgctcagtgttatgtatgaacttgtggactttacaatgcaggttgagaactgctaatgtatagaatgactaaacagctgtctttcagggtatctcatttttaaaggtataaggaacaaactttaatgtattg

SEQ ID NO: 322105 - DNA, 531 bp, Homo Sapiens
  misc_feature (455)..(455): n is a, c, g, or t
  misc_feature (503)..(503): n is a, c, g, or t
ttttcaaaatataaaaaataaattttatttatgcatttcaatacattaaagtttgttccttatacctttaaaaatgagataccctgaaagacagctgtttagtcattctatacattagcagttctcaacctgcattgtaaagtccacaagttcatacataacactgagcactaagcatcctgcagtattttaagtgtattttcaattgcactgtaataaatttcaaaaaaccccctatatatttaaaagcaattctgaattcatagcttttaatcaagatgtactcatttactatttatacgaaattacaattactatctaacagcccatatatgttgggttttgtttctgcttttgagagtttcactcttgttcccaggctggagtgcaatgggtgacagagtgagcctgtctctctcttaaaagtaaataaatagtatcctgaagtgccacanatgtgggcgtttgccccagagggcatcaccagcacctgtgccatctgnccacgtgacactctgaagagacgtgact

SEQ ID NO: 322106 - DNA, 910 bp, Homo Sapiens
  misc_feature (748)..(748): n is a, c, g, or t
caaccaatagtgccgacgcctccagcaacaaatttggtatttggccagaacatgagcgagcgagttttgagccccccaaaattaaacgaggtcagttcagatgccaacagggaaaatgcagctgccgagtcagggtctgagtcctcgtcccaggaggccacccctgagaaagagtccctggctgagtcggcagccgcctacaccaaggcaacagcgcggaagtgtttgttggaaaaagtggaagtcatcaccggggaggaggcggatagcaatgtgttacagatgcagtgcaagctgtttgtctttgacaagacctcacagtcctgggtggagagaggccgggggctgctcagactcaatgacatggcgtccaccgatgacggcacactacagtcccgactagtgatgcggacccaggggagcctgcgactgatcctcaacaccaagctgtgggcccagatgcagatcgacaaggccagcgagaagagcattcgcatcacagccatggacaccgaggaccagggcgtgaaggtcttccttgatcttcggccagcttcaaggacacaggtcagttgtatgcagccctgcaccaccgcatcctggccctgcgcagccgcgtggagcaggagcaggaggccaagatgcccgcgcctgagcctggggcagccccatccaacgaggaggacgacagcgacgatgacgatgtcctggctccttcaggggccaccgcagctggtgctggtgaccnaaggggacgggcagacgaccgggagcacataccggcccggggaacccggttgcacaccaggctgctgcctttgttccgtctatccacccggcccaaccggccccacccccaaccggaagcggtccagggggcgggggccccggaaaacaaaaaccccccacg

SEQ ID NO: 322107 - DNA, 744 bp, Homo Sapiens
gactcactatagggaatcactgttggcctactggtatagatgtatttttatccaagtgccactccaatttgtgtatgtaataaaattatttatattaaaagtgggaaataattgtcaacattttttttgagtatagatttattaggggtggcaaagaagagtgctagttagcagttttccatgtaaagttgtccttgactgatttgtccacatgtcagttgtaactcccccattccctgcaaaaggaattatttctaacccagatgtatcacttgaaactttttagaagcaaaataatcagggaagttcctagaaaggtgtttggctttttggtttttgagggttggggtaaagaagacttcccccacaactgtcagcacaaaacagggtattgatttttaactctgatgtttctattggagttgaatactaaataaataactataatgagggaaatacatttctaataaaattccctacattctagaaacatccctgttttaatttttttatctaaatctttttgtgctttatgtgtaaagaaaaaaatgtactgagttacaatgcattttattaacactatgtacataatagctgctttgtgttcagaatggtagcagttgctttgtatattaaagtgatccttgtgaatttgtgaaatattgtcataaagtgctttttcttactgtaatctttgtggtatcaactgtcataatgctctttttacacaaacatttatgtgca

SEQ ID NO: 322108 - DNA, 854 bp, Homo Sapiens
ggatcaggtggccgtattcggcgaatgcggtcgccgggcaggctgcttgtgaggacgtcaggggacgagggggggcaaagcacatcagctcgaagtggggagtggtgtctgcgacggtgctagggatgcctggggcttcaatccttcgaacgcgcaagcggtgtaaggagggagccgggtgagcaggcttgataggtgcggttactgggccgaaagcgctgcgccagggcacgtgtggtgaaaggccgggccgtcaatagggctggatgcgcagcgcgatggagaggcgcagcgagggcccggcagggtcccccatgtctggggcgaagggtctggccaccggcggctcccgggggccggaaggaccaagcgccgtctgcggccgagtggctggagcgcgaggggcggagaggaagcgcggggagggtgagggaggtggtggagctgaggctgccgctaggaacccgcggctgtcgccgccgtccgcccgggcttttgaggagcagctctttaggctgtggcccccctccccactcggcgaggaagcgggcccaagagacggctccaaggccgcgcgcttccccatcccccgctccagtgctgcgccctccacgcacccgaaggctcgctctggcccgcaggccgccgcgcagatccgcgcagctgggggcgagggagttaatcctgtttacgcaccacaatccccttcagctggggaagcggacatttaggctcctcctagaacagccccgggcaggaggaggagaggtttgggaggcactgggaaggcgctggagttaagcgaccactatgccaaggagcgagacccccggaatctggataccgcctcggcc

SEQ ID NO: 322109 - DNA, 542 bp, Homo Sapiens
  misc_feature (101)..(113): n is a, c, g, or t
  misc_feature (522)..(522): n is a, c, g, or t
aaaaaggtagagtttaggaatctacattttaacaagcatccccgataattctgatggcctgtgagaagccctcccctagaatgcaaagcaaataatttggnnnnnnnnnnnnngaacatttgttcctcatgatggcacacattgaagaatgtgcttattcttcacattcatatgtaagagagatctcttggggtcgttgttccaggcactccggcaatggtgaatctggatgggttgcccgttctcccactcttcgttggggtcaacaccttctgtgtcatatgtacccgtataaacaactctgtccccatcaggctctttagacttcagttccagtgggacaagcacaccaccaatggaaatattctcgacctgcagcgtgctgggtttaatcttcacctcaaccttgtaggaggagccggtgagcagcttgatggtgcggttctggccgaagcgctgcccgtccaccttgtaaaagaccgggccgtcattaggctggactgcgcagcgcgatggagaggncgcacgaggcccggcaggtc

SEQ ID NO: 322110 - DNA, 520 bp, Homo Sapiens
ccgctaaactctaccctgatcagtgaaaagaatttagctgaaagatgcagtttcttcttggcagattcagacaagaagtgcggcggaagcttacacctgcacgtggtgggacagaggcaagaacggatggtctggctgaggctgagagaaccaagctggattaggatcggcttgagggcccggcgtcgtcagtggtgacctctctgacctgaggcaagtgagtcaggctggactgagcgtgttaacgtcggtgtttgtcaatgtgacgcgctagaataatccctttatctttcccaacttttgtttgttgagtgtaggcaactataatgaatggaaaggaaaccggattgtactttaaatccgagaacattctctactctccagaacaagtcatctgcaggcgcaggcagtggaatccgtgaggccagctgtacggcgggccgccccggacccaggcttggctcctcactttccgctgtttttagtgcggtcctacaagtgccctggtgcagcccgagat

SEQ ID NO: 322111 - DNA, 490 bp, Homo Sapiens
  misc_feature (469)..(469): n is a, c, g, or t
  misc_feature (477)..(477): n is a, c, g, or t
tcattcttaaagagatttaattatttgaagtgcataaaaggggagggtacatttaaacctctgctatatcacaaactgctgtttttgttgttgttttattaaagacccaccagttttactcatcttcaggtttatggctatagaatgtggggaaaacaaaaattggcaacagaataggaaaaggtaagcaaaagtctggtcaccagaatgtcttctccactgcagaacagacccctttaaaaaagaaaagcaaggaaaatagctatgggctatccacagccagtaatgatagctacagttagaaagaaatgagaaaggaaaccaggaggcagagtctgggaattcacaagtctcctctcaagacatatactaaacccggacctctgtgaggattaattttccttagatttccttccaacgtcttaaccctaaaccaagttcccctgtcaattcaaatataataaaggcngcattccncaaggaagactga

SEQ ID NO: 322112 - DNA, 510 bp, Homo Sapiens
cccccaacccctaaaaaaattctatatcctaagtgataaactcttcttgtacattcagcaaactttatactggaaaagaaaaagaataattgagataggtatttactttcgtgcacagtaataaatctagctgagctgctacaccttgctttgcaaagatgtttacataaaataaatcatctcttatcaagttacaatggtaatttcttgaaatgtagatatgaaagctatacacttaatccactgaaatttccttctaattttttaatctgtaattaaaccatcaccataaggacaagcttcatcccaagatgttcccccttttcccctcagctatttctatcaacttgaatcctctctcagatcatgtaaagagatacattaaaagcacaggaaaaaaaatgttttagcttgctgacataatgcccttaagtttgctgacataatgcccacattttaactttaaaatgtaaaatcaaagttaaagcatcacttaattcatacagtaca

SEQ ID NO: 322113 - DNA, 664 bp, Homo Sapiens
  misc_feature (414)..(432): n is a, c, g, or t
  misc_feature (492)..(527): n is a, c, g, or t
catacgtgtacgtttctacttcagtttttattatccattacataacatacatgcttgattatttgcttcaaggaaatacacctttataagtaatactcaataactactgggtttgagaatgaaggtgtcagaacgaatgagattgtcctatgaaagaagaggcaggagccagggaggaggatcccacccggccggggctcagccaggaggcagggccattggggcagggtggcagtccaaggaaccgctctgggaaggtttgcaaaggtcggggtcccccctgccaggtgatcgaattatcgtggagtgtctggaaggcgggggaagttttgttgagttcaccaaataactcagaccaactggaaaccaagtggagtttctacaggaccaactagaatagggatcagctacatnnnnnnnnnnnnnnnnnnncagggaacggtgtctgtcttcattgcagctctgtctgcagagccagcactgtgatacctnnnnnnnnnnnnnnnnnnnnnnnnnnnnnnnnnnnntactatctagacaaggatgagactggtatgactctccaaagctttcccacctccaaaacctcggcttgtggggaatctccagtagggggcactgtggacacggttcgcatctgcctcccaaggctgggctccgcgac

SEQ ID NO: 322114 - DNA, 622 bp, Homo Sapiens
  misc_feature (104)..(104): n is a, c, g, or t
tgacatcgtagctctaccacagttccactcagagcagaagagggtacttcacatgatggaactgctggagccactaatacttccagagtgactgtatcctcttncaggttttggccttgctcagatggggcactaacttcacaacgatatttccccgcatcacttcttgtcacatttttgatccggatattgaaatctatcatctcagctcgatttttaaaatcaccttgaagagtctgttgatagtagacaaaggagacactccgacccagtttcttccactctaatctggaggaaacagtcttctttggggttttgcaggctaaaatagcctcttggtactctactgctgtgactacttgttggtcttttggggcagaaaacccataggccttatgatagcccagggcgaccaccaggtagcgcagcagcagcaggaggaggcggtggcggctcctcctcgccatcttcccggggcggcagccggctgctctgaggaggtcgagggtcccggcggcaggagcgcaggaggccgggggcccttgaacttctggggcgggaaaggagcagagagtcgggaggggaggaagaggagggacggctctagatgggatgtcagttt

SEQ ID NO: 322115 - DNA, 682 bp, Homo Sapiens
tttttttaagactggaaaaatgtttttattaaacacttacatttacttattttgtgctagacataaagcactcatgacaattatacctgatttgtcccccaacaaccctctgaggtaggtttattctgtctcctttaacagatgaatctggggcatagaggggcagtcacttgcccaaggttccccagtggtagagctggggtttgaccctgggcagcctggcctgagttcttggcttgtcaccactcatcttcctctgtcagtgccatgatgagtctaggtgagaggagatgaagcagaccagggaaaggacatgagcatggagtggggtgtggttagttgctgttcaggaagcttggtgattgggctcgccaagcaggacgacattggattatgcccacgttcatggcttgggggcctgagtggggggcgttcctattcactgaaatgggagatgcaggaggaagaacagagaagtgggcttagattgggacgtgtttgctgtgaagcagccatgggcatctggtggggatgggacatctgggtctgggcattgccactatgaggagctattaggagaagccaggggagtggactgaaaggaaggcccaggtcaagtgctttccttggtacctctgaaaaatcagagagatgggctgcttgacctcatctgcttgtagta

SEQ ID NO: 322116 - DNA, 589 bp, Homo Sapiens
atctccctacagcagaagattgaatcctcatctctccatgagtctgagcatctaaagatgttagagcagttccgccgagcatcctggggcctccaagcctccgataagctcctccagtatgacatcacgcatcttgctacgccagcaactcatgcgtgagcagatgcaggagcaggagcgcagggagcagcagcagaagctgcaggcggcccagttcatgcaacagagagtgcccgtgagtcagacaccagccataaacgtcagtgtgcccaccacccttccctctgccacgcaggtgccgatggaagtccttaaggtgcagacccacctcgaaaaccccaccaagtaccacatacagcaagcccaacggcagcagggattttataagtttgaagagcaaaacagggcagagagcgagtgcccaggcatgaacacacattcacgagcgtcctgtatgcagatggatgatgtaatcgatgacatcattagcctagaatcaagttataatgaggaaatcttgggcttgatggatcctgctttgcaaatggcaaatacgttgcctgtctcgggaaacttgattgatctttat

SEQ ID NO: 322117 - DNA, 619 bp, Homo Sapiens
  misc_feature (333)..(409): n is a, c, g, or t
tttatagttttttaaaatccagaatccagttaattgggatgatatgaggccttgtgaaaatcttcatcctcaacatttcacgtgttagttgatgatgattcttcttgaatgaattattacgtttttcgattgtaccaatttttctacatctgttagctgacattcttccagctttcacatccactgcacctttctctctctgagtaccactatggactcacgaattgttatattcaaagtggtatgatccctaatgtatttttaaagcttaaatcaccccaaattttgccgatggaaaccactccaaggtggtccctattttcttttcacggnnnnnnnnnnnnnnnnnnnnnnnnnnnnnnnnnnnnnnnnnnnnnnnnnnnnnnnnnnnnnnnnnnnnnnnnnnnnncttacttatacgacgaataggtcatacatccatctagtgcaagtctccagatattcacagctatacatgccccctccaatcccacccctttcttcatagtcagccaatgttcgttatccttccagagatagtttatatcatggagtaatataaaaatttatgatttatatgtactgtataatagagcaattatattcttacctaccccca

SEQ ID NO: 322118 - DNA, 606 bp, Homo Sapiens
  misc_feature (320)..(396): n is a, c, g, or t
aaaatccagaatccagttaattgggatgatatgaggctttgtgaaaatcctcatcctcaacatttcacgtgttagttgatgatgattcttcttgaatgaattattacgtttttcgattgtaccaatttttctacatctgttagctgacattcttccagctttcacatccactgcacctttctctctctgagtaccactatggactcacgaattgttatattcaaagtggtatgatccctaatgtatttttaaagcttaaatcaccccaaattttgccgatggaaaccactccaaggtggtccctattttcttttcacggnnnnnnnnnnnnnnnnnnnnnnnnnnnnnnnnnnnnnnnnnnnnnnnnnnnnnnnnnnnnnnnnnnnnnnnnnnnnncttacttatacgacgaataggtcatacatccatctagtgcaagtctccagatattcacagctatacatgccccctccaatcccacccctttcttcatagtcagccaatgttcgttatccttccagagatagtttatatcatggagtaatataaaaatttatgatttatatgtactgtataatagagcaattatattcttacctaccccca

SEQ ID NO: 322119 - DNA, 537 bp, Homo Sapiens
gctagttccttcccttatttgccagatggggaccctgtggggaggtgacccagtgtgaggccgaagctctttcccagagccccacaggccagtggagggtcgtgtttgtgctctgggcatcaccgtcttgggtctcggtcccctgcgactgcagctgctacatccctccctgctctgagataaatgttcttcccatgaagcagacggttcacttttgggatggcgctgtctccaggtttggctgtctcagtccagatgatgtttggttagtttccattcccagaaccacaagcctttgagttctgaaagtttgtgacagaatcaagaggctaatttgggagatgtgagattcccagcccacctggtattgccctcgagttagtggtaaattttgctatggaaaatatctcttgtcaagaccaagctccggcgcattgcctccctcttttggatggccatggcatctcatgaaccacttggaaatgtgttttatgttgttctccaaatattaataaaaatatcccggagaggaggttc

SEQ ID NO: 322120 - DNA, 1250 bp, Homo Sapiens
tgggtggcgaattcggcacgaggattttttcgaaaaacttctgactcctgtcccttccccttctgcttttggtcagtccctgttcttgagcctcttttctcctctccccaggatgcagaaagtggtgaacccaggaactgaggaaggaggtttccagttcatttacattaagggccctgggggagaataaagctcagagcaggagggagtaaggaaacatttcctttttgtttttatttggttggagtttctcatatttgaaaacattgcggtatccatgatttggccttgtggagggtgttcctaggtagaggtgagaatggggaggcaagatctcaggcaccaggcaggaggtgccttgtaagctaactgggcggaggtggaggtgcagtgtcaactgtggctctgtaactcttcaaaggcccagtttcccctcacgcagcctcttaggtagcgtttcccctaatcgtgggggttggaccccagagtcttccaaagaattttcactggttgcctgcatctttggctctgctgtgatctgattggaggagggacagtttctggtacccatcctctgatttatacatatgcattttttcccctctggcctttagatggcctcagccccagccaccatatacccctgcagtttgcactttaattgatggtagttcagttggggtacttgttttatggaagttttgattgatttacttgccctcccaccttctttttaattcaatgaaatctgaggttaatgcgaggttcgaggagaggttatagataaaactaccagtggcagctactcaagtcctatctccactgttagcttcctccaactctaattattaacctatattcttgccaagctaactattgactataggtttgcctttcctggagaattaattgagcaattgaggagtgtctcaggatagcacaggccaaggtaggggagtaaaaaggaggtcaggcaaaagggaggagttttctgtcctttcccaggtttcacactcaatttgatatccattaccatgtcttttctacttcctttgtaaatacggtatgatctttattcccactgtacagtctgttctatcctcttgcctcccatcagtgcccctgttttctttgttccttttgttaatatcttgaacttttagtccctccatcctttaatccccccattcctccccatcatggcaccaagtggtttaagtccattgtacccattagggggctagtaccac

SEQ ID NO: 322121 - DNA, 802 bp, Homo Sapiens
  misc_feature (777)..(777): n is a, c, g, or t
ctggggaagtggtttccaggcccaagataatgaaacatcttcactcctgctccaagggggaaagctgcacagagaaagaacttcatttctaagaagactttggaaagccatcctagttcttccacttgtaaaaaggatgcactgggtgctatggggggccagtggcttctgggaaaggaagggggaaatgtgtgtgtttcagggccatgggaactaaggctgcccctggaaaaggaagggaattgaggcctaagtggaagaacctaagctgggtccttcagaatctcagcttcatagatttctcagctgttctgggatagaaggcagtctgcaagccaaaagggcaggaaggttccaatcctaggtcactgtgacctttcctttctttctttcccaaaactccgggctggaacaaggaacttaaagttctcttttgccttgatggcttctcagagacatcttaaaacacctgatgaaggatatgaagagagactagagatttagaaaggaccaaggtcctctgataatatgagccagttgtaaggtaccttcagtgccggtcattccctctccacaggaacaggtggtatgatacgagggcaccacaggaggcctctgtggtactagcccctattggtacatggattaaaccactggttgcatgatggggagggatggggggattaaggatggagggactaaattcaagatattaacaaaggaacaaagaaacagggcctgatgggaggcagaggatagaacagactgtacagtggnaataaagatcatacctatttacaag

SEQ ID NO: 322122 - DNA, 427 bp, Homo Sapiens
tgtatgctggaggggatacaggatgattttgaaaaggtacaaagtcctcagtgggcttagaaaattcactgtatgatccttatattatcctacttggcttgcacgtcttcgggtgcatgtatataccgctactgtgtcctcgccatcacctaaatgtgactcagtctgttccactgtaatatgttgtgaattcccttgtactgtacttttattgttggtcttcttgcatcgatgatccaacagcaacaccatctttaaattattgtgaaaagattaactggcaatgtacagagcttactcaaagttttcttaagggaaaacactacaaaaagtcacaaggataccaaatggaaacacatgatgatgcctctgggtctgtatgagaccgtgatgaagtagaaataaagcccttctgagatggcaaaaa

SEQ ID NO: 322123 - DNA, 592 bp, Homo Sapiens
  misc_feature (49)..(49): n is a, c, g, or t
ccccaagcagtggctgccgtgccgctcccgcctccacttccggagacgntgcaaggctgtgccgtcaggactacaactcccggcgtaccccgcgctcaggggcgtcaccgcacgggccgacctcccgggggacactgggacaggagcgcggcagccactgcgctggggatggcgtagcagcgacgcggtgacgccacaaaaatggcggacgctggaaagcgccgttcctgactctaatgtacttagacacttgaagccacaaaaggatttatccccgaggttcctcatctgctcgcgaggatgccttttctcttctgccttgcgaaataacagcagcctagctgttgcccgtgaccagtgagaaaggcagcgtcgcgggctgattaggtttcacccaaagggtgccggcgccgaattggtttctaacgagaacttttaaaatgatccgttccaaaaaagggtaggagccgcgagaccctccaactgcccagagaaaacaagtctcgtctggcaaagttctcggcccacgcggtccgcggccaagggccaacggtccctcgccccacgttgccgcagcactgcgcgtgcgcga

SEQ ID NO: 322124 - DNA, 572 bp, Homo Sapiens
tcccacaaacagcatgaatgttgaccaactccagcgcaatgagtaacagtatcaggctgagcacaggggacagtagtctgatactactccacatacgcaggtagttctgccgctggcgagaccgcagcgtcctttccacccactgcctgtgtctcagctctgaggcaacggtgacctggctggacacacggcggcactgttcgccaatgcttcggagcacaaccagcacttccagcacaatcctggggcagaacagggtgggaacaggtgtgctgcagagctcacggagaagctggggccacgtctcagtaggaagacgatccaagtcctttaacacacaacgattctcaggcatatggtgatacagctcatccgtcatttttgtaatcaaagagtggcaggcatttgtttcagaattatcttctaatctgacggcttgccgagtgagttcttcggggaaaggcagcagagcccaaaccctgatgctctcctcacagctcagcacctgttttttaagctgaaaaaccggatgacagcgagaactatagccttctgcaagactaatcaacaat

SEQ ID NO: 322125 - DNA, 1241 bp, Homo Sapiens
  misc_feature (63)..(63): n is a, c, g, or t
  misc_feature (555)..(584): n is a, c, g, or t
gaaaagggaatgtaggactaactaggttttttaaaaactcaagttggtatttctttactacanagtgcacattgctgtgttgctgaggtctgtccaaaagaatgaccccactgaattttttaaatgactgaattctactgagtgcttgcttggcttgtgttcccattactccacattcaagcccgttaaggtcaaagtgtcaggagcatgtgctttagaaagtgtgcagcaccacacaggctgattgtcggtctgagccacttttttgcagtgtctcacatggcagcaggtatggtggaaagaccccacaaccataaagtcaagagacttgaattctagccttggctctgccactaattaaccgttctgagacaataggcaagtaatttaaccatcttctgctagtttcttaatctataaagcaaagggttggggtactgatagttttcagatagcactgggtgtttcaaacacctggcgagattactggagaatacactggccgagaccccagcccactgggaattctgatctggagtggggctattccgtcannnnnnnnnnnnnnnnnnnnnnnnnnnnnnaaccctaggggattctgctgtgcatccctagactaggtgttaataatagtagtagtagaacatttatagagtgtgctcattgtgtgccaggcacttgagctaagtatcttacaaatatcatctcatttaatccttacaacaaccctgaggtagttactattattatccctgttttacagtgaggaaactgaggctcccaaggttaaatgacttgccttttagactggcattagagcctaaacactaaaccactatctatactgcatcctttaaactcaaaatctccatgactttagttaaataaaaatgggcagtgccttagcaaagtcagcatgctttattacctgggacatattttactagccaattttcagttgaatcctaagaaactttctatctaatttaaatcttaaaatgctgctggtaaagggtctccactataatgacctctatgtacagaggtcatctagaaaaacactgaatgaatttcttagggccaaattttttaaggctaatctctgaaaatcatgatggaagtctacaggaaaatatatacatttaaattttacacaaagccttttaagaaaatactttaggtaaagcacaatcaagatgtattcaacacaaatcactgcattttaaagtgggaaatctaaa

SEQ ID NO: 322126 - DNA, 306 bp, Homo Sapiens
ttctaatttatattttattgcattatgaaaataatacatttggcaaagtaatctaggctccaagttgaaataaaagaaaatcctgaagagtgtactgatttttaaaatgtgaaatagtaagatgtattctaaccaatacatactagcactcttattaggccaaaacccagcaaacctaatttttataattccatatgaaattacaaggtgttttgcattcattcattttatgattagcacaaatcttgagaactgaccctcaccttcatcaaaaccaatgttaattcctgttcagaagacaatttg

SEQ ID NO: 322127 - DNA, 738 bp, Homo Sapiens
  misc_feature (484)..(484): n is a, c, g, or t
  misc_feature (609)..(609): n is a, c, g, or t
aaacatacacaatacttaggagacttgttttactcagagtggaaaattttgccagggacaaagtcaacacaaagaaacaaacaacaaaaaatagccagaaagagaacagttaagtgcagctcggtgagtcccggcagttccttcccggcactggctcgtccctgggttctcaaggttccatgcggccacagcgtccgtccacctgtccacgcgagccacatgctgaaatggaggtggataaaattcatcaggcagctgctgtaacacggaaatgtgcagatgccagagtagcttcgtctgaacttgaacaagacagacaaaaggaaatcattccataggctgaaaacaaaaacaaaactacgttgtttctttgccccaaatgaaatccacggaaagggcctgtgtgattctgaaagtctcagtagaaatggagtgatgtgaaatgcccaagaccccattattttgtaaagaaaggacacctcanaatactctaattccacatgtctccgctgcctggtgggtcctgtgagggcggcggggatggctccccccgcgtcctgaggcctagtcttgggagacccactcacagcaggcgctggccgtgccgtnctcacacagcgatgcctggtcctcgcgggaggacagagtttcactcgtaggtagaagctcagcccagcaggtgctcagtggagacaccgtctcccaaatcaaggtttgggtgtgtgtggggtttggtca

SEQ ID NO: 322128 - DNA, 741 bp, Homo Sapiens
  misc_feature (517)..(517): n is a, c, g, or t
  misc_feature (594)..(594): n is a, c, g, or t
  misc_feature (632)..(632): n is a, c, g, or t
ccagtttgattcgtttattgacaaatcaaatgaaaaaaattcacttaaaagaagggtatgtgatcacaaatgtagctaacagggggaacgcatacagcaccagggagggagagtgaggctggacataccattacagagaggaggaagagaaaggatggcgcggggggcggaggaaagagagcacctgccaaaaatcccacactttccacttctcagctatcactcaatcatttttctggatagggttaacagctagaaatggtttaagggcaacatccaggtagtttgtctggaagatcagggagatgaagagttggagagaatgtgggtgtagcattttgaaggattctccagcttgaacctgttgccagaacccttttcatggtgaactgggagtcaggaagcttaatcctggtctcagctcagccatgaacttgctgtgtgactttgggtgaatcactttccctctgtgatcctctttcctctgctgtaaaacaatcaagttggcaagttctcnactggctctagcactctgcaatgcctaagcgttctggcaacctgggctagaccaggagactggctcagcttccgganaaatgaaactactaagaaggccagccagagtgacgtgncactggccttcacctggagcccacttccttggcagcggcagcaattcagagggtgagtgtacgcgcacacacctggaaggaactcacactcactgcaagggtgatctct

SEQ ID NO: 322129 - DNA, 947 bp, Homo Sapiens
  misc_feature (884)..(895): n is a, c, g, or t
aacccttttacctgccctctaagggccccagcttcgacctgcctcaggagacagcagcacagaccagtggctccctgtccaaggccgcagagcagacgccatcccactgtacaatcgaatttgctggacaaacttgataggtttctctgcttagcaacgagcctatagttagttggcacatctgcgttttggcatctgaggctcccatctgagtggaggagaaagtgttgtgtttattagcaggaagtcttgtgaaaacagctcgctgctgtgtatgtttatggatttttctgatataacagccagcatggttaccgagtggtagagattctcgaacattctcaaactctctttttgggtaaatgattgtgctaaaaataaaatttattaataaagaaggggaaaaaggagtaactctacctgactaaatgttactctaatttatttatttctttactaattaagtaaaaccaggaagtatgattttacatcaaccagagaatttctgaatttatagggaaacactatgtccccataatgatgctataattctaatatatctagtccccataaacagtaagtacaaattatcattcctttaaagcatttttacacttcctggaatgagtatattatcagcaatcttttgtcaaatgccagccgtataaatgttacttctgctctttgtaaacctcaaaactcattattcttgattataagcaactggacagaaccatgccaaagcttccccgtttcccaccaaacccctgccagtgagtgcagagaactcgcaaagccacagcaggcggtctcagccaccgtcccgctcacaggggcccaatgccaggtcacaacactaagaatatctttcaaaaaatgtagcnnnnnnnnnnnnaaagctactgcttgactgttccttagaataaataaaggatattttataaatt

SEQ ID NO: 322130 - DNA, 599 bp, Homo Sapiens
  misc_feature (17)..(17): n is a, c, g, or t
  misc_feature (63)..(63): n is a, c, g, or t
  misc_feature (68)..(68): n is a, c, g, or t
  misc_feature (74)..(74): n is a, c, g, or t
  misc_feature (104)..(104): n is a, c, g, or t
  misc_feature (127)..(127): n is a, c, g, or t
ggatcacttcaggcccnggagttcaagatcaacccaacccgggtaacatggcccagaccccanttccnatttanatatatatatataaaacttagagtttttancttcccctaaaagaggccgtganatttgcagcagcctcaaattgctcttaaggggtttaggtgtgcagaagctttcctttccctacccagtaaccatgtgactactaacgtggtatattgatttattttgtttgctgtctgtctcccctgccccactgctggaacagaggctccaagaaaacagggaccttattattcattactgcatccccagtaatgaaagtacttagaaaataattattgaatgaatgaaatctaaactgtgaacctgagggtgtttgtggcagtgtttgttttactgaattgtagaaggacataaccgtgttttcggtgtttctatggaacaaacttgtacattttatttcacttgtgttttgtcttaaaccctactgctggaaacaattttatgtaataagcaatgggcccaaaagtctaggagtttttttgtacttagtgaatttgtatgcaacagagatgctgcagctgatgccttta

SEQ ID NO: 322131 - DNA, 1024 bp, Homo Sapiens
  misc_feature (39)..(39): n is a, c, g, or t
acctaatttttggttttggataacaatttaacagcctanggtaaagatgattaccaacagccctgattccaggtgtggtctttagcttcaagaaagtcccatcggtccatgtagctgactgtcattgcctaaatctgttgcttgcagaggcctcagtgctctggctttgcccgagtagagtcctcaccatttaagctcttcctacatacaggacatgtgtcatgcagttctagccacggcacaatacaactgctgtgaaagaagtgattgcaaggtaactgccggacttcctcttcaactgtgtaatcttctttgcatactggacactctaaacccatatcaacttgttcctgagttactgtcactgttggaagagatgtgatcttttccttgtcagctgggggagggcctgtgttttccagttgtcctaaaagctgggttacaatggcatcaagccctgtctgaccccaggcatagtccccagggttggagtgcagcatcccgctccaggaaaaagggtgtggagatccaggaatggcagaatttgcaaagaatcctgcaaagatgtgttgtagtattccttcaatagctggagatctgtcaggacgagaacttcctcgagatctgtatctccgacccaatggcaaccgtggaggtcttgctccccagaagtcagtgtgagtctggtgacccctttcattggctctattatcttggtccagtggactgctacttagaaagggtctaaaatcttgaaaaaacatcgtgtgatccaaatggccccaaagctctgcaaaatgtgttgttgtggtattgtctatccgactgccgccaccacctaaaaaactggaatcatctgtcacttcttcaataaagcctgattcacatctgggacatatatattccgccgcctggtcctctgggtgcacgtccaccagggtacaccagttccgcgtcccgttcatcttccctcggggtcgcagcacacacgccacttgtccaccccgctgtctggctccaactg

SEQ ID NO: 322132 - DNA, 666 bp, Homo Sapiens
tgtgaaatatttgttaatagaatccttatagaactgagcaagagagacaaaaatacaaaatactatttgttatagaagtcttttcttcctatggaggtgaaaccatcttctagaaattccctcagacctaggaagtgcatggatgctgagctaaccccataaatcattcatccctttagtaaaatggaaaccccaaagctcaaaatattagagaaagcagagtgactgccatttcagaaagtagcagaaggaaagcaggaagcctgtggaaccatgagacacactgaacagacaccctcaaaaggcagctcctcacctgggttacaatggcatcaagccctgtctgaccccaggcatagtccccagggttggagtgcagcatcccgctcctatacgtgagatgagatagacagcattagatggagtgaccaggctctgccttacaccacagaaaaaaattggcagagggatcctgttctctctcagagctggaaagtcactagtcctccaggatcaagaggcaaagaattctgtacattttcaagatcaaacagactatccagagatagtacctcattctctaagaattttacttaactagaacataaaatgtgaagctacctaaagtaccacatgacgacgccagagcaaaaaggagtgacctcg

SEQ ID NO: 322133 - DNA, 542 bp, Homo Sapiens
  misc_feature (101)..(117): n is a, c, g, or t
aaacaagtgttttatcacacaggcagtcttagatttatatacaaaagtaaaactgaaaatatagttttgttctctgtacatttcttttaattttttccctnnnnnnnnnnnnnnnnncacgcttgtatacttttctaaacagagtaaggtaaaacagagcacaaagttctcttctttctgccaagttcattcgatctggggtggggatgggagcagcagggcctgggaatcagtccaatgaaataatgtctggtatgatgccaaagatggatgccgtgtccgtgctgctcctgtttgtgacggtgtggctatggctttcccttaggctgttggaagaaaccaggctgctgttactgccactactgcttccattggtggttggcagagaagtactgcctcctgcacttaactgatcaagaaacatctgtgaggaggtatacgggaaaaaccgagacgagtgtaggaggtcttgatcatctgaaactgctgctgctgcagcggcaagcaaggaggtgttgtaatgctgattgtctcctgataag

SEQ ID NO: 322134 - DNA, 565 bp, Homo Sapiens
atgcagcggtcctcaagttcgagaaaatgtgcctttcattcattacctctctggagacttcttgctggaatgaacagtgtgctcagggactatttggaactggatgtttttgaattattttatacttagagatattctgaattttttgagggccttttaacactccccgagctgattgtttgcaagtgtgtttgttccagagtgtggaagtgtaaagacatgggcatcacgtaaattggttttgtttgctattctgtgtgtcagaaccaacgagtgtaatggagagggcaggtcatctcttattgtttctaaaacaacttaaaaggtgtagattgggaagaggtgagtgatccagctttctccttttggattgaggctatgtacttggtgggggcaggggagggaatatattataatactattcagttgggataatgggaaaaacagagtatatagggtatctacccagcctagaaagcacaggaacaatacgtcatatatttggaacagttattgtctgtgccatgaccttcatgataccagtgagaagccaggctagagaaat

SEQ ID NO: 322135 - DNA, 514 bp, Homo Sapiens
ggttactctctagaaaaatggtatttaaagacattttatgaaatcttcattgtcaaaacctttaataaaagtggaaatattttgaaatgccctttttcttgataccactcatccacgtgttcctgattgtccacatttcatgataaaatgagagctctgcagagaatgttagcctttctgttgtaaatgtaatcttcaagtagtcactttttgttaagttctttagaaagtagttgtcaagtacttagtcatccctattatgatatgagatagtacagcttttcaggaagcttagatctgaatttactttgaaaaacaattgtaatgaatattttatatttacattgagaatttcaactagcttctgatcaatttttaataaaaaattttcaaatcatgttagctgttaaaaaatgtataataactcagtttttcttggtttatggaaatatctatattaatgtgaaaataattaatttagaattgtgattaaagtgagcatttgtctaaaaaa

SEQ ID NO: 322136 - DNA, 125 bp, Homo Sapiens
tttttgaattttctttttaataaaaaggcacctataaaacaggtcaatacagtacaggcagcacagagacccccggaacaagcctaaaaattgtttcaaaataaaaaccaagaagatgtcttcac

SEQ ID NO: 322137 - DNA, 480 bp, Homo Sapiens
aaccttggcaccgtttctttttattatagctagacacaagatgcccaaagatatacaaaacaaacaatacaaattttaaacacttttacaaaggtgacaatataaagaaatgaagactatggatttatgtttgcaaacattaatttcctttgaatactgtctggtgttaaaacctaacagtttaccagaatttgtatttgacacaactatttttaaaattatagtggacaaaactaatgaaattctaatcatcaatagcctatgacaaataactattataattaaaattaatacaatcttcaactattctcctaagtactgttgctataattttctgtttattaaaactttttattttagggaaaaaaactgaccttactgctattcctggaaaaagaattaataaactttcattaaatattcaatctcaacttttaaaacttaaagctctttatttctgctaatctgaaactacttttg

SEQ ID NO: 322138 - DNA, 570 bp, Homo Sapiens
attttccaagatttttgtcagccttttcataatccagtcattaacaacctattggtaaacaagaatgtaggtgccagtagactaaaccaaatttatttttccctgagtctgatatatatatgtataaatataaataactcaatccatctgttccaccaaaataactcaaaagttggatgattatttgtcttccgctttccagttcaaagggatgaaattcctttagaacttgaaagatgacactagcgaacaccatgagaatactgtctacagtttttggtacgtcatcactagaacagtgaccccaaactgaatcatgaaaggtctgacatgatgtaatctgatcttccatgtgttattttggccccacatctcttcttgattttttagtcttatttccttagtgttattatcatacttcccctgatatatggccgtacttcctggccctgggcttgacatttcccacccttcattctccatacatatgagatgtcagaaaacatgcagtaattgatattatgggacacattggaaaggattgaatctggaattagttctgtccactgt

SEQ ID NO: 322139 - DNA, 635 bp, Homo Sapiens
  misc_feature (180)..(180): n is a, c, g, or t
  misc_feature (603)..(603): n is a, c, g, or t
aaagaggttttggatcattcatttcttcattccattccttcatttgttatgtgagagctcttgagtgtgtgtctctcgctgggcctgtgctggagcagggtggtataagttgaaggtgaaatatccagttactcctctagtcctatcacctcgctttatgatgtgtaaggtataggatcntgcgtcttcccgggtgacattctggatcagcagggatgcattggaatatgctgtttctcgtccactatatgcaggcccatatataattatttcaccgtctactacatatgatgtaatgtaatggtagaggtccctcatttgccctttgtaccagatgtagccggtaagattctggggcaaattgtggacaagtagaagaacatccttcccctcggaaactttggttggctcggcttcaatcgtgacttgggcagtggtgggcaggttccagaagtttaaaagtgatgctgtgagcaggagccccttccatttgatgcgctgtgtgcagggaggggctgagagggttcccatggtctctgctgcttgtgtgttctcctctgtggagctgagcctaggatccagaaactttctgagcactggctngtcggctgtgctgtccttcctctttctgtgct

SEQ ID NO: 322140 - DNA, 888 bp, Homo Sapiens
  misc_feature (864)..(864): n is a, c, g, or t
gcaggaggccagaggaacttgtctggcaattatgagagtggatggaggaactgcctatccctgtcccatggtcttgtccacaggtcagcctcacaaagggaaagagccctggatgggaatacagtggaaggtcattctcttagtgacctggggacattggctcgagaggaagcctggcaggagtggcaactccagatgatttctgtgcctttcctctttcctgggaggtgggccaggccacagtgttagtgggaagggaactgaacagccagagtggttagagggagtgtctagggaaggcctagaggttgaggaagaagctgtgcaggacagggcttgccagtcagaatgaagtgggaggaagatgagggacacagagaagcagagagaggcagatacaccatggcagtgagcagtgagggagacactgtcttcagaaactccagggaccaggtgcccccagttccatagtccaggaccaaggagccctcgagaaccctccggtggcttaagagcttcagaattacatgaggtggggtggctttaggggcaaagaggtaagtggggggatgaaacatggatgtccagcctctgaaggacaagggacaggtgtggctagaacctcctaggattctgcatccaagatccaatctctaaagaggttttggatcattcatttcttcattccattccttcatttgtcatgtgagagctcctgagtgtgtgtctctctcgctgggcctgtggtggtgtagagtgtgagtggggaaagaaaacaaggtcctctccttgatcctctcatgacagtgacaaggacactttgggaaacacaggatttcaggttcagtgatggtggttaagatnctgaggaggaggcctggacatttt

SEQ ID NO: 322141 - DNA, 869 bp, Homo Sapiens
  misc_feature (32)..(32): n is a, c, g, or t
gaagaaacggtgggagcatccaggccatgcgnagcaaagagaataatgtcacaggcgatattgtcagagggaagggaaaatcctggtctgtggaagggacacagtcacagtgaccctgtgagccaagttgcaacactgaagtcccagccaaatccccgctgtgttcactgatctggagcctgagacattcacctgtttcttccatcacaagctgtggaccctgagtctcccatgacaggagcagcctcttttctcttattgttgatcaagcctaggcctactctggtttgcctggggcaggaagtcatggccagctttgatgttcaggggtaaaggtctctgtacttggacctgagagggactgagaggcctggcctctggccatttgtatttgggatggcagcctggctcacagaggaacagaagatactcacggaggagattcagggtgactgggtcactgcggctggcactcactgggttccgtatttcacattcatagggtcctgcagtatagtttgtgacaccaaataggtagagggtcctgttggttttggacagctgcaagctgtgagtcatagggaggcttctgaccattcatccaccacaggtagcttgcatccggagtctcaggatcacaggttaagatcacagcctccatggcctccctggggtttaagttgctgctggagatggagggcttgggagtctccaggtataaggtgaaggtgaaatatccagttactcctccagtcccatcacctcgctttatgatgtgtaaagtgtaggatcctgtgtcttcctgggtgacattctggatcagcagggatgcattggaatatactgtttctcaactcactgtatgccag

SEQ ID NO: 322142 - DNA, 638 bp, Homo Sapiens
  misc_feature (11)..(11): n is a, c, g, or t
  misc_feature (29)..(29): n is a, c, g, or t
  misc_feature (34)..(34): n is a, c, g, or t
  misc_feature (63)..(63): n is a, c, g, or t
  misc_feature (94)..(94): n is a, c, g, or t
accaataaaanccccccctaagcctttgnaaatnaacctggggggaataaaaaaaccttttgntccctgaataagctgaaaacttcccccattnaattgtccccaagaaatattcctgcctggtgggttaaaagtcccgcgaaagcaggaacaagtccgaggttttcctccctgaaacggtaaataggtgaaatgaaagggtaaaattctggggaggttctggacccataagaggacattccagggtgaactgggtaaactgcggatgcccaccatatcggtcccgtatttcaacattgatagggtcctgtttcatttctcgtgacactgggtagaatgaggatcctgttttcaatgggtcgctttaccctgggactgaccgggaggctctgaccatttagccaccaaatgtaggtgtagttctcactcttaggttcacaggtgaaggctaagacatccttattctccctggggtttaagttgttgatggtgatgtaggggttgggcagtttcgggaggagattcagggtgactgggtcactgcggctggcactcactgggttccgtatttcacattcatagggtccattcatccaccactggtagcttgcggctggagtcgcaggatcacaggttaa

SEQ ID NO: 322143 - DNA, 612 bp, Homo Sapiens
  misc_feature (23)..(23): n is a, c, g, or t
  misc_feature (49)..(49): n is a, c, g, or t
  misc_feature (71)..(71): n is a, c, g, or t
gcggaaagcccacccaaaacggntccccctaatttccaacaatgaaaangggtcccctgtttccatttccnccgtgaacactggggtaagaaatgaaggaaccctgttttccaaagggtccgcctttaacccccgggaactgaaccgggaggcctctgacccatttaacccacccaaatgttaggtgtagttcctcactccttaggttccacaggtgaaagcctaagacatccttaatcctcccctggggtttaagttgttgatggtgatgtagggcttgggcagcttcgggaggagattcagggtgactgggtcactgcggctggcactcactgggttccgtatttcacattcatagggtcctgcagtatactttgtgacaccaaatagaaagagggtcctgttggttttggacagctgcaagctgtgagtcatagggaggctctgaccattcatccaccacaggtagcttgcgtccggagtctcaggatcacaggttaagctcacagcctccatgtcctccctggggtttaagttgctgctggagatgtagggcttgggagtctccaggtataaggtgaaggtgaaatgtcgaatttcttctctagtctc

SEQ ID NO: 322144 - DNA, 426 bp, Homo Sapiens
ccaagccttgtaaataaacctgggggaataaagagctttttgtccctgaattgcctgaaaacttccccattaattgtcccaagaatattcctgcctggtgggttaagattcccgtgaagccaggacaagtcgaggttttctcctgaatggtaataggtgaatgaagggtaaattctggggaggtctggaccatagaggacattcagggtgactgggtaactgcggatgccaccatatcggtcctgtatttcacattgatagggtcctgtttcatttctcgtgacactgggtagaatgaggatcctgttttcaatgggtcgctttaccctgggactgaccgggaggctctgaccatttagccaccaaatgtaggtgtagttctcactcttaggttcacaggtgaaggctaagacatccttattctcg

SEQ ID NO: 322145 - DNA, 777 bp, Homo Sapiens
  misc_feature (545)..(545): n is a, c, g, or t
  misc_feature (743)..(743): n is a, c, g, or t
ttttcttactgaacttgtgcaaatagctttattaccataaacatatgaatactcatgaatagattcccaattctggggcactcagatagagagcaaaaggaaatgtttcaatttttgtttacaaaagtatactttaccaattgctcaagaaaaaatgttcataaatctggagaatgaaacattccaagagtcagcacattttcaaatagaaaattatgaaatcattatccttttgattatttagtccaataacattgagtatttttcttctttgtcttgaatttcatgaaggtatcagcctgttcattaaaattttgaaagttcttaggtccagtgggtatggatcttgaaggttatcagggagcttgtattcaagagtccttggtaaggaggacctttccataaatctcctgccagtcttcctgaaatacagaaatgacatcacagctgctatgttggattaaggagaggaagaagtcctattcttgtagaagcagagactttgactgtcaacgatgtggagctttcccttgccagtggctgangttacgaacagagcaaacatagagtcccgctatgctttgtagtaatttgggggataaacagattttgtcctgattgctgaaacttcccattaattgtccaagaatactgtgccggtgggttagagttccgcgaagcaaggacaagtagaggttatctcctgaacggtaattggtgtatgaagggtgaattctggggangtctggaccatggaggagattcagggtgactggg

SEQ ID NO: 322146 - DNA, 1107 bp, Homo Sapiens
  misc_feature (800)..(800): n is a, c, g, or t
gaacttgtgcagataactttattaccataaacatatgaatactcctgaatagtttcccaattctggggcacttagggagcaaaagcaaatgtttcaatttttgtttacaaaagtatactttaccaattgctgaagaaaaaaagtgcataaatctggagaataaaacattcaaagaatcagcacattttcaaatagaaaattatgaaaacattgttttgactatttagtccaataaaattgggtttttttctttgtcttgaatttcatgaaggtatcagcctgttcattaaaattttgaaagttcttagtccagtgggtatgatcttgaagttatcagggaacttgtattcaagggtccttttcatagtcttttccataaatctccttgaacaaaaaggcaattttggactgtaagctgattttaaatactttgaggaagaatgaaagcaactttctgcccagtcttccctgaaatacaaaaatgacatcacggctgctacgttggattattgaaagcaaaagttcctaatcctggaggagcaatgactcttgattgtcaaggatgtggagctttccttcgccagtggctgagttacggagcagagcaagcatagagcccattatgctttggagtaatctgggggataaagagcttttgtcctgatagctgaaacttcccattaattgtccaagaatactgtgctggtgggttagagttttcgaagcaggacaagtcgaggttttctcctgaatagtaagaggtgacttgaagggaaaattcttggggaggtctggaccantggaggagattcagggtgactgggtcactgcggctggcactccctgagttccatatttcacattcatagggtcctgcagtatactttgtgacaccaaatagaaagagggtcctgttggtttcagacagctgcatcctatgagtcatagggaggctctgaccattcatccaccacaggtagcttgcgtccggagtctcaggattacaggttaagatcacagtctccatggcctccctggggtttaagttgctgctggagatggagggcttgggagtctccaggtataaggtgaaggtgaaatatccag

SEQ ID NO: 322147 - DNA, 961 bp, Homo Sapiens
  misc_feature (894)..(894): n is a, c, g, or t
  misc_feature (899)..(899): n is a, c, g, or t
tttttttacggaacatgtgcaaataactttattaccataaacctatgaatactcatgaatagtttcacaattctggggcattcagatagacagcaaaagcaaatatttcaatttttgtttacaaaagtatactttaccaattgctgaagaaaaaaagttcataaatctggagaataaaacattcaaagaatcagcacattttccaataaaaaattatgaaaacattatccttttgattatttagtccaataacattgagtttttttcttctttgtcttgaatttcatgaaggtatcagcctgttctttttctcagtgtctcagttgttgcagtcatgactgagactctgtcaggtctccatggcagggaccagagactttgactgtcatggatttggagatttccttgccagtggctgagttatgaacagagcaagcatagagcccgctatgatttctagtaatttgggggataaagagcttttgtcctgattgctgaaacttcccattaattgtccaaaaatactctgccggtgggttagattccgtgaagcaggacaagtcgaggttttctcctgaacggtaataggtgaatgaagggtaaattctggggaggtctggaccatagaggacattcagggtgactgggttactgcggatgccaccatatcggtcccgtatttcacattgatagggtcctgtttcatttctcgtgacactgggtagaatgagtatcctgttttcaatgggtcgctttaccccgggactgacggggaggctctgaccgtttagccaccaaatgtaggtgtagttctcactcttaggttcacaggtgaaggctaagacatccttcttctccctggggtttaagttgttgatggtgatgtaaggcatnagtgngtcgctgtgtggataacagaagattgtcctgtgtggcacctttgattcctccacaggcatcc

SEQ ID NO: 322148 - DNA, 475 bp, Homo Sapiens
acggttcccagaagtatagtttattgaactgctataagctgtagatagattaaaagagaaaaattccatcaatgtagaaaacaaaccatttaaagaatcagcaaattttcaaataaaaatcataaaaacattatcttcattattatcaattatttcaatgaaatcaatgttcttcctgcttggtctaggctgggaatattatgaagatatcagcctgtttgttaaagttttcgaagttcttagacaaatttggagggttcaggaggagaatttgggatttgcttgtgcccatgggacacaggctgggaatacaattgttttcctgactcttctctgaatgccagatagactccacctaaaaccctattgccaacgatgctgggattcacttaccagagactttgacctgtcatggatttggaggctttccttccagtggctgagttaggaacagagcaaacattgagcccgctat

SEQ ID NO: 322149 - DNA, 1297 bp, Homo Sapiens
  misc_feature (1270)..(1270): n is a, c, g, or t
  misc_feature (1277)..(1277): n is a, c, g, or t
cagcacagctgagcagccgtgctcagatagcttctggatcccaggctcatctccacagaggagaacacacaggcagcagagaccatggggcccctcccagccccttcctgcacacagcgcatcacctggaaggggctcctgctcacagcatcacttttaaacttctggaacccgcccaccactgccgaagtcacgattgaagcccagccacccaaagtttctgaggggaaggatgttcttctacttgtccacaatttgccccagaatcttcctggctacttctggtacaaaggggaaatgacggacctctaccattacattatatcgtatatagttgatggtaaaataattatatatgggcctgcatacagtggaagagaaacagtatattccaacgcatccctgctgatccagaatgtcacccggaaggatgcaggaacctacaccttacacatcataaagcgaggtgatgagactagagaagaaattcgacatttcaccttcaccttatacttgggagactcccaagccctacatctccagcagcaacttaaaccccagggagggcatggaggctgtgcgcttaatctgtgatcctgagactctggacgcaagctacctatggtggatgaatggtcagagcctccctgtgactcacaggttgcagctgtccgaaaccaacaggaccctctttctatttggtgtcacaaagtatattgcaggaccctatgaatgtgaaatacggaacccagtgagtgccagtcgcagtgacccagtcaccctgaatctcctcccgaagctgcccatgccctacatcaccatcaacaactttaaaccccagggagaataaggatgtcttaaacttcacctgtgaacctaagagtgagaactacacctacatttggtggctaaatggtcagagcctcccggtcagtcccagggtaaagcgacccattgaaaacaggatcctcattctacccagtgtcacgagaaatgaaacaggaccctatcaatgtgaaatacgggaccgatatggtggcatccgcagtgacccagtcaccctgaatgtcctctatggtccagacctccccagaatttacccttcattcacctattaccgttcaggagaagtcctcttacttgtcctgttctgcgggactctaacccaccgggcacagtattcttgggacaattaattgaaaagttttcaggttaccgggggcaaaaggttcttttattccggccctttttacttaccaaggcttggggnggttctnttgtttggttctgtttcgtt

SEQ ID NO: 322150 - DNA, 543 bp, Homo Sapiens
  misc_feature (21)..(21): n is a, c, g, or t
  misc_feature (48)..(48): n is a, c, g, or t
  misc_feature (53)..(53): n is a, c, g, or t
  misc_feature (110)..(110): n is a, c, g, or t
aaaaaaacccttccccaaaanctcccgcccaatcctcccgaaaatacngaaangaacaaccacaccgccaatgttgggaattaaggaaaggaaaaaatcccaatccttgnaagaaaccagagactttgaactgtccaacgatgtggaagctttcccttccccagtggcctgaatttacgaacagaaccaaacatagagccccgctatgcctttgtaagtaatttgggggataaacagattttgtcctgattgctgaaacttccccattaattgtccaagaatactgtgccggtgggttagagttcgcgaagcaagacaagtagaggttatctcctgaacggtaattggtgtatgaagggtgaattctggggaggtctggaccatggaggagattcagggtgactgggtcactgcggctggcactccctgagttccgtatttcacattcatagggtcctgcagtatactttgtgacaccaaatagaaagagggtcctgttggtttcggacagctgaaacctatgagtcatagggaggctctgac

SEQ ID NO: 322151 - DNA, 433 bp, Homo Sapiens
  misc_feature (394)..(394): n is a, c, g, or t
aagaatttcatgaaggtatcagcctgttctttttctcagtgtctcagttgttgcagtcatgactgagactctgtcaggtctccatggcagggaccagagactttgactgtcatggatttggagatttccttgccagtgctgaggttatgaacagagcaagcatagagcccgctatgatttctagtaatttgggggataaagagcttttgtcctgattgctgaaacttcccattaattgtccaaaaatactctgccggtgggttagattccgtgaagcaggacaagtcgaggttttctcctgaacggtaatagggtgaatgaaggggtaaattctgggggaggtctggacccataggaggaccattcaggggtgacttgggtaacctgcgggatnccacccatatcggtccccgtatttcaccattggataggg

SEQ ID NO: 322152 - DNA, 420 bp, Homo Sapiens
  misc_feature (233)..(233): n is a, c, g, or t
  misc_feature (243)..(243): n is a, c, g, or t
  misc_feature (333)..(333): n is a, c, g, or t
  misc_feature (352)..(352): n is a, c, g, or t
  misc_feature (373)..(373): n is a, c, g, or t
  misc_feature (396)..(396): n is a, c, g, or t
  misc_feature (405)..(405): n is a, c, g, or t
ttttatagtttattgaactgctataagctgtagatagattaaaagagaaaaattccatcaatgtagaaaacaaaccatttaaagaatcagcaaattttcaaataaaaatcataaaaacattatcttcattattatcaattatttcaatgaaatcaatgttcttcctgcttggtctaggctgggaatattatgaagatatcagcctgtttgttaaagttttcgaagttcttagncaaatttggnggggttcaggagggggaatttgggggtttgcttgtgccccatggggacacaggctgggggaataccaattgttttccctggctcttctcntggaatgcccaggataggncttccccccttaaaacccctntttgccccacggatgctgggggnccccccttnccccgggggcttcgg

SEQ ID NO: 322153 - DNA, 1033 bp, Homo Sapiens
  misc_feature (750)..(844): n is a, c, g, or t
acaaaagtatactttaccaattgctgaagaaaaaaagttcataaatctggagaataaaacattccaagaatcagcacattttccaataaaaaattatgaaaacattatccttttgattatttagtccaataacattgagtttttttcttctttgtcttgaatttcatgaaggtatcaacctgttctttttctcagtgtctctattgtggcagccattaatggagactctgtctggtttccatggcagggacctgattgaacagaaggcccaggtcagcgcatttcaaattcactacctccttttacagagaaagcttctttcccacaggctcccagcaagggtgtgaaagcaagtctagttctccgaggctctctttaactccaatgggtgactggttggaggattcctcatcagccttgcaaaaactcttagaactgcattggtacctaaaacttctttctctttctttttcacaggaatcagctctgcatagcggtctgtgggttctcccatactaccttcatgcctgccccacattccctcacaggtgtcttccctgataaattatcttgtatgtctaatcccatcttggatgcatctcagttggtaaaaactaacataccaggcttgattctttgcacttagctttttttctttctctcccacaagtagtcagtagccatgttctagtgttctatgtgttacctctttttccatatgtatggaaaaaggaaggtactgttgaggtnnnnnnnnnnnnnnnnnnnnnnnnnnnnnnnnnnnnnnnnnnnnnnnnnnnnnnnnnnnnnnnnnnnnnnnnnnnnnnnnnnnnnnnnnnnnnnnggcaatgaaaagacagaagcttagcgtggtgtaaaatctttcctggtgtcatatggctagtgacaggtggatctgagatttgattctaggactatttgacctcaaggctaatgataatggtagtaatatggtagctgacattggttcctctgtgtgtggcatcttgttcattgactgtattaaaccttt

SEQ ID NO: 322154 - DNA, 1188 bp, Homo Sapiens
  misc_feature (90)..(90): n is a, c, g, or t
actatagagtagcgttcactacgtttcaccggctgtttccccaccgggtctaattgtgtcagcggggcggccggtctcccgcgccatagngagagggatatacaactgtgttggcgtgtttcgtggttacaggcaatcgggtcgaagggttgcgggcagtggccacgtaccgcgggggcggaatgatcgggcgcacagtgaggcgacaaagtgctcgcattatacaccggatgcgttggcgcgcggccggatcaatgtcgtggtcctagtttaccggttcttgcggcgtccgtcggcgctgaggtaatcggcaaattgggggggagaacaatacgcaagtacgtaagaatggcgtaacgaaggcgaaaaatggggcgcgtcgggaatacaaggcggcgccaaatgggatcggggaagtgggtacaggaaaggaagcgggggcacggaagtgggaagcacctggcaagagcgggagtggcacgacatgtagaacggaaagggcggagggaaactaagggaaggggggataccaatgattggcggcgacggaaagctgcaggaggttagacggctggccgtagggacgatggccatcgtacaacagatggcggagggaggccatgtcccgtattcgaaggtatgcaggcactgtcttggtgttcccgctcagccggacatcaaacacagccgtgtccgtggctcccaggggcaacagcttcacacacatgcgtttcttcttggacacagaggccttggaatccatggggtcgcagacgggggagaagcccagcggcagggggctcttgtccaccacgatctggatatcggccaccacgttctcctgcgggttctctaggctgcccagagaactaaggcacaggaagtagccagatttctgcgcgaagctcttgccaaagctggcgggtgccccctcgacggtgcaggagatcgcgctgaacccccgcggcgggggtgcagaggccgacgaccaggccaggccagccagcggcgccgagtctgtcccgggtacgggatccatcctgcgagccgagcgccgaaggcggggtcgcggggcacagcctcgaacctcggagcgccggacgcgtggtcgacgatatcccgaagaattccgggaccggtaccagcctgctttattagacaactgttcatgcctattttttttcgctt

SEQ ID NO: 322155 - DNA, 610 bp, Homo Sapiens
  misc_feature (533)..(533): n is a, c, g, or t
ttggactgactcaaggattccatgtgcctgtcgacatagctctttgagcactgttgctgctgcggggaaacggcaacatcctggctcttcacatctgtcctcttagggatattctgaggggcactgctggaagaggctggcttcttgacaaacttgcctgtgccattctgattgatgcccacttggcagccagcaccagaggggcttaattctgtttgatgaaggtctccaaaatgttggttgtctccaggtcctggtatctccagaatttttaactccgtaatgtcacctgccctgaaggtgacttctggaacaagacacttcactccattatggaaaggccgggtgagagaaatggtctggctgacctgatccacagctgacactcttccctgatagacacccaagctatctccacaattgatggacacaatacttcccagccaatctgtagccatgtttcacacgtgagaccactccgcgccgacgggcctggagctcctccgcacaccacaccaagccgaccactcaangttcagaggacccacagaagaattctctcctcggccacccccacagcatcggccttcaccaccgccgccgctgccgg

SEQ ID NO: 322156 - DNA, 1299 bp, Homo Sapiens
actccgcgcgatcctgctgttctttatgtctgctctctttctgttcgtgtttgttctgccgtttttgtcctctcctgctcagcttgttgggtttccttcgctttggtttcttccccttactcccttcttttccagttctctggtttcctcttgcttgccatgttcccttaggcttggttaatcctctagggttaaaaagtgaggtcattaagcattggccttgggtatcccttttcgaccagtgaatccacggtaaagaaacaggattatgggaccccacctgtaatagaacccagaggagtgcagctcagagccacctccagctggagacagtcagaaggactgagggagaggggacagccaggctccacacccaggcaagaatgggggacggcctgtgcaacagagcagtcatcgacacacacagttcaaagtctacccttaggctaggagggtgatcaggaagaagggcacggtacgcaggggcccggcctgcgagctccctgttggcctctgctgccccctgctggctcccgcttcggtgctcaggcaggaagagaggaggctgctgtgtttaggcccaggacgctcttcattcccttgcacaccacccaccaaccactgcctgccccactccctgtcccccacttcacagagtgcccccagggccagcaggtggtgcgggtgtcttgcccgtgaccttgttggcacagtccagcagggcggtgtgaatgtccttggcacaggaaatctgggctttgatgaccgccaggtactgtgggtaggggaggctgtcaggctgcactgcgtcgggcttggtggctgtgggcaccaacgttggggagtgcttggcactgtcacaactctgtgacaggcactcatgcgccaggcgcaggcacagctccagctggtcacagagtgcatagaactcttccaggcacttgtcaaagcgctgtatgggtccatcactgctcttttgtccattgtcgatgttagtgttctgaatcaagttttgggccgcaaccttcatcaaggtctgtagactctccttcagctgcgggatgagcatcttataacgctgcacaggatcgaagtcctgttgctgttgctgcaggaggccgctctgggcagggcccaccagttgtgctggcggttgcggctgctgctggggacccgggccgccagccgaactaggacccgatacaccagcagctgaggaagccgctgaagcttgctgctgggatgcagccatcttcctcgcgtagaccgccggaagtgcgttacgactgcgtctctccc

SEQ ID NO: 322157 - DNA, 925 bp, Homo Sapiens
catctttatatctttgcctaaattcatttgctacagtgcaggaaccaaaacttgttcatctcatgattccctacatctgacataaggaaagtaagtgctcagaaaaatgtgcaggtcaataagttgcaaaagttggggctgcaattaatgctaacataagagctaaatgcttgattagaaatgatctcaaaaccttttagaatttccaaaatcttcatattactgaaactgtcggaatatatgggtcttgaaattcagaagatgatagtcactcttcccatatttataggctattaaggcaagggatatcttaaacatcatattactttatttagatttctactactccaattattaatgttatgtatttctcattgttttacttcttcatggtattatgaagactatatagatgattcaaccaagcctgcaaatctccctcttgtggaattccactggacccaatctgttttccatttccattgcaatactactaaagccatacaatatcaagcaccctccctctaggtccagggactatcacagaagaagcaggcatgtaagattttaaggactggtttcgaggggtcgagtgtaggaaaacagcctgttgcattgtaagagtgatgtcatcttgaagagcagctggcatgatgactgctgtttgactcctgcataccaagatattctgcagcaatgtctttaaacagtgccggtagtacagataacccctcataaagatgcttatctaacctccccagtgttcaggtgtttcacaagaaagtctgagatatgactagctacacgttttgccaaaaatgcttgttatataaagggtacttttgggagggtgagtgccgccatttagtggctgctagaaacattgcttctgtttgtaagttcctattaaatgtttctttctgag

SEQ ID NO: 322158 - DNA, 821 bp, Homo Sapiens
agaattttgtttcccaggagcccaaggtcctgtagaggctttctcaaaacctggctggagtatagcaccctgcatttgctgacaggaaaggctcattcatctgcagtcagcttctcttccagtttcctaaagagctggtagtatctccactttctggtgagtgtacaggtcttttccagctttcctaccatcagatctctatccatctctgctaaccttgtccgaagctgacctggttgtttctttgcaaacaatctgatgacttctgggggttttaaaggcctggctgatagctgcctgaatagccagctgcattccacttagttcatctaccaaagtcatatttccagacataattttctttagtgaatcattaaattcacttagttgctccagagtttcctttttggtttcttcatattcatctgtatcaagttcctctctgcattcctccagatcttgtaattgttgcatgagtctatccaactgttcttctaaattctgctttaatttgcttgtctctgtctttcctctggaagccattttaatctctgtctcttagtactctgatctctgcacagtgccgaccggtctcaaattgcacaaacctccagttcttgacgttccgagtgtcataaacttgaggaaaatgaaattattcatcaggactacaaaaggctcaaagttcaaaccacctcggggtggagatgctgacaaaaactgggacaacctccttaggcccccgggattccccctgtgccgcctgaccgcccgccagtcccagagtttagggccaggggccccgcctacctgagggcccc

SEQ ID NO: 322159 - DNA, 641 bp, Homo Sapiens
ggattttacaatacagtttattagctgttctcctcttcttcataaatggaatggataatgttgataattctttacaaaccagtactcatttaagaaactaatgaggaggttgtcaaaaacacatatttaataaacaactccagagagcaatgggaagccaaatattattattaatatgaaggaccagagaaactgatttgtgaaataatttctacctttcactaacatttcttaaaattgctcaccatgaagatttgtgcaattctagtgcagagcagtggatgaaagctgtctgaggggaaaacacacacataaatggggcttttgcctgccttcctattaataaaaggagaactagaaggaaagggcaaggaccaaaatcaaacctgatgacaagaacaacagtaacaacacggacaacaacaaaaaacctcaggaaccatttgaaaacctttgtagaaaagaggagaatatgcccacacttttacttataatctaatttccctaaatgtttcctcctcatgaccaccatgcccccattttcagttcacatgattaagataagtctattcaattaatatttaatttaaaaacccggacgcgtgggtcgacgatatcccgagcattcgggaccggtacca

SEQ ID NO: 322160 - DNA, 695 bp, Homo Sapiens
  misc_feature (314)..(484): n is a, c, g, or t
  misc_feature (604)..(645): n is a, c, g, or t
agaagttttaatctgcgctccaagtccatgacgccgccgccgaggtagtgccggcccggttgtcacccgtttccgtgtgttcggaatttcgcaagtgctccaacttacttggtacgttgaggactctgggacatttgcagtgctgcacacgggactgattgtagttggaatagttcatggagagtatgcatggttatggaatatactgccttgcgaatgcattggtgctttcagttcgggtcgtcttgtcgacctcatggactaggccacgccacctaagtgccttccctcatgtgcttgcaagggctctcgtnnnnnnnnnnnnnnnnnnnnnnnnnnnnnnnnnnnnnnnnnnnnnnnnnnnnnnnnnnnnnnnnnnnnnnnnnnnnnnnnnnnnnnnnnnnnnnnnnnnnnnnnnnnnnnnnnnnnnnnnnnnnnnnnnnnnnnnnnnnnnnnnnnnnnnnnnnnnnnnnnnnnnnnnnnnctgttcttttaatatagtcagctttattttcttgttttattctttgttctccctctgttcttgttaagatagcaagattgaaactccagtttatctttgacatcccgggaaaaacatgannnnnnnnnnnnnnnnnnnnnnnnnnnnnnnnnnnnnnnnnntaccggacgcgtgggtcgacgatatcccggaattccgggccggtaccacc

SEQ ID NO: 322161 - DNA, 1457 bp, Homo Sapiens
  misc_feature (507)..(534): n is a, c, g, or t
cctcctagaggtggagtccccggtgaaatggttgaaattgaggataaaccaccaaggtagtggaactaattccaatgagtagaatttataaggaaaagtgcaatgggtacgtgactgatttcggaaactgtgccaattcccgggcattaaggaacccaagtctccaaatgtgccgtctttgttctccgaaaaagggttttctggggcaaaaagtaagtattgcggaaacgttgcactaatacttaattgtaactttcgaatattatgaataatcctgcacatgctgctttacagacgatacatatttgtaaacttactcatgcaaaattagtgtgcgcaacagggatattgtaattttcatacttaaaaatgataccttattatcttttaaaaattgccaaactctctgaaatggtaacaaatcttatatggatattcttgtctgccagctaaaaatcaatttatgttgctgaaaacaaaaagttatacaagaaaaagaaacatggnnnnnnnnnnnnnnnnnnnnnnnnnnnnaaatgagaaaatttataaaagaaagaaattcatggtcacaaaattttaacattttaatcctaaacattacagggtaaatagatactggaccctatctccatactccataaaatcctaacttttagtttccatttcaaatgttgctgtaaccactaaaacactagtggttttacaacctctggattatggaaatacacatttctgaaataaatgctacaaaaacaacaatggaagaaagccaaacaaacagtctccatgaaggaaaaaaaagtggaacattttgaagcttttagacacttctctttccatgtcttatgattaacctgtcaattcagtgcattgtatggtcatatgtaatggtccccatggtgaacaaacatctaactagtgtccattgattccaagttagtagatgatgaatctttctggatactttcaaagatagccgccagctcagggttagaactgatctgtgactggaattcactcatcagtggactcttctctgcttctggaatggttagcagtgctgctactgctctcatggcagatcgctttaattcatcttgtttttcaaactcctgctttactgagtttgcctttaccttagttgtacatgttgcacgtaatggctcaacaagtcggtccaacctctgcagtactgcacttggacaaagggtagacagtctcaccaacattaaaaatgtcagcatcttaatatcataatggtccttcaaaccatcttcaacatgatttagaaattcaaagatatcaagtctatcaagacaactgtctagaagtgtgtacatacactcaaatgctgcctttctaatatccagaccatcatcaaccgtatgtttaaatggacccatttctacctctcttataagctcctttctaacttttgtttcattgtaaagatg

SEQ ID NO: 322162 - DNA, 1699 bp, Homo Sapiens
  misc_feature (716)..(734): n is a, c, g, or t
  misc_feature (753)..(1000): n is a, c, g, or t
  misc_feature (1555)..(1555): n is a, c, g, or t
agaaggcatcactgcctgtgatcggggctgcatttagccctgacctgataatggtaggagagttcatttagcctttctgctgcgaagattgtaaatagattaaagaaaacagctgtggccttctcccgtcatacatcattagactgtgtaaactaacattttagaacctctaatattggacttaaaaccaatttctgtcgtgcttaattgaaaatcacaactaaaccaataaaccattattaaatttccattctgcagcagaaggcacctctggacggctcccggcttgtagtttaatgaagtatgtgctccctgctgttaacccgcagccctccccaactctccagcagctttgccaagtcagcctccgggccatctggctgtccttggccaaggcactgttaacggagtgacgttaaccatcttgtattgtgacctgtggccgcttttctggtttaagtccttcactttttcaagaggaatggatgaaattaatgtgcatgcagagtctcacagtgatgccggaaggaaggatgtataggcagtgaatgaatgatctttccttgaaatgctataaaaagcaacctgcattccagtcttttcttcctggttgaagttggcagatttccatttgcagggtatgggctgcgagagtaatcagggtaacattgctgtcatttccaagagaaatcagtaggggaaagcaagggaggtcnnnnnnnnnnnnnnnnnnngagacggagtttccctctnnnnnnnnnnnnnnnnnnnnnnnnnnnnnnnnnnnnnnnnnnnnnnnnnnnnnnnnnnnnnnnnnnnnnnnnnnnnnnnnnnnnnnnnnnnnnnnnnnnnnnnnnnnnnnnnnnnnnnnnnnnnnnnnnnnnnnnnnnnnnnnnnnnnnnnnnnnnnnnnnnnnnnnnnnnnnnnnnnnnnnnnnnnnnnnnnnnnnnnnnnnnnnnnnnnnnnnnnnnnnnnnnnnnnnnnnnnnnnnnnnnnnnnntgagccactgcgcacggcctggggaggttttatttcttgacaaaggtatttgatactcgtgcagaccctggagggtctcactggagagacaacatttaggctgagatctgattaacaggaggcagctgcagtgcagaggtcaaaagggagggtgttccaggcagagaaaacagcctgtgcaaaggccctgaggcagaaacaaactctacttgaggtcagcctggttagaaagcccaactcaaaatagaaagtattacatgataaggtctgaggcaggctggacccagatcttacaggaccttgttaataaggatcccatttggtcccccacagtcctgagaagcgggcagggctgtgggaaacagcagatatttagtggtaagcctgagatcagaaccccggtctgcacttcctagttcccgttctccctgtagtggtaagcccagagaacctgagctgttaccctagaacagtgtgcttcctcaaccctaattgtgctcacccatccgcccgaagcttcccttaaaagtatcgccctgccttaaacaccaaagntcatttacctatgccctcgccacctcccacggaaaccacacggctctctccgccctccttgtccggcccctcgcaaaaaccacaccccttgcccttcgccttgtctccttcgcgccgtttcatctgtccctccgatctccccac

SEQ ID NO: 322163 - DNA, 1393 bp, Homo Sapiens
  misc_feature (190)..(190): n is a, c, g, or t
  misc_feature (199)..(199): n is a, c, g, or t
tgagccaaagattttcttcccccagtggttacatgcatgaagggcagaggggtggagttgtccctggggtgagctggcttgtgtggcatgctctgtctatacccctcagcaccactgactgggcaaagcaacgtgttccagaaggctccccacatgcagacagtggggtccatggggtggctctcccaanctgcatcangggatcaggaagggactggcctggagccaaggggaaagggatgattgctcctgctgtcaccacctttttcccacagaagctcagcatgtcagccagatgaaccatggaaactggagaggaacacaggcgataaggaacagtgactgtgtccagggctgtagccaggatggcactgcagtggaagggcagagtggcatcataatgcaggtaagggaagctgacaggtggctcgggtcgcaggcccaggctcccacccaaggacaaggggcagacaagagagctgtgagcagtcaggtgcacgagaccaaaagctgtgtttaatagacgatagatgtttctctgggcctccccacgatggtagggaccaggtagcaggccccaggttattattccccgccctgaatattcatcttgtagcagctctgccgccttcgcgcctaccccagagaagccatcgtgcaggtccacacaggatctggaagccctgcaagtagtcacattcctccacgtagaaatgcagcctgtcctccagctcttcctggtacttgggttcctttaggacactttccccttggccaaaagcctccagccgacctgcttccccatcgtggttgtacttctgaatcatacagatgctccggggatggagatggactctgaggaagtctgaccagaccctgatgctggcctctgtagggataagtggttttggagttgtagcggtggggagtggtgaggaacctttgccattgggaatggatttgacgttccagacaccatcagtactcagcactccctctgcactcagaaagtcttggagataagggttcttgggatagagttcctctttgtgtgtggtgagcttcccctgccatgctattgcagcatccaactgtttgtccctgtagagtccaccttcctcttttagggagctcaaactacccttcagatccatgaggatgagtcgcggcgtgtaggtctcctggccgtgcagcgtccggcccgtacgatacaggacgtcggggcacagctctcccgggggctccttggaatcggtcgctcggcccagcgcagcatcctgctggttccaccagtgcgcgcccacgaaaccggcaaaatgtcccaactgcagtgtgagcacctcccgggccccgcccgccatactgcgctgctccacggggccgccgcgcctca

SEQ ID NO: 322164 - DNA, 1272 bp, Homo Sapiens
cggaatgttaggcaccgccttttcaggttgcacccagggggttggctctgggcttgtacggctttccgggaatcttgaggggttccgtcaggggctgaagacctgccccagggcacacaactcaccacgggcgggtagcccatctcggcaggtgacattcttcatggggtccagtgacacctgggggccccagcttgcagctggagatgtgggcctctgtgccggtgcagtccatggagaatggccagtagcgctgcttcctccgtgaggcaaacattttgtacactttggtattgtatgtcctctccccagggaagccaaacatgccgcagaccacgcgggaattcttggccgtccagtgcttgtcacagatctgcttccaggtcttgccctccttcacctccacgtagccctccatcactggggtgcgcttgcggtaggttgagaggatggctcgaatccgaatgtcctccacctggatattcaggttctctatctggttgatcaacgaattgtcaaatttgaacccaggaatccttttgtcgctgcacaccacaccggacatcctccgtgtgcttgcagtcagtgacgccccagccattggaggtgcatgctgcaagggtcgcctcgttgccagtacagtggagattgtctaaccagatgggcccttctcccttgccgtaggaggagctggcagtccaggacttggcctccacgtagcccagctcccggcagacgacgtgggcagcgtggatggagaagtcgtcatcgcacacggtgccccactggccatcatagtacacctccacccggccctcgctgtgcttcctcttctgcccagccaggcgcagctgaatcttggccacgttggcgggggcctggggctggtgatactcaggagccggttgctggaagtactcggggtaatggggccagctgtcatactgtgccaggctcaggggggacaggagggccagcatagccaggcagctgcagaggtgggagcacagaggcctctccatccctgtcttcgggctgatgatcccacgaaggggccctgcgcagctgggagggacaggcggggtacagaagcagcaggagctttttggtttcagggatccgcagtggccgggctgggaccgcgctctccacggtggtccccctccgcttccgccgccgctgagcccctttctcgagcagagggggcggctctggtctccgatggctggagaaagcaagcaccaagcgtaggtagccgcgcgctggagtcgc

SEQ ID NO: 322165 - DNA, 1016 bp, Homo Sapiens
ggggagccggagtcggatggcggctacggcggctcattattttccgctgcaggggtgctgaaggggggacgcgggtcggacgcgtccggctgtggaagagagcggcggccgctcacaacatgcacagcctggcgacggctgcgcctgtgcctactacactggcacaagtggatagagaaaagatctatcagtggatcaatgagctgtccagtcctgagactagggaaaatgctttgctggagctaagtaagaagcgagaatctgttcctgaccttgcacccatgctgtggcattcatttggtactattgcagcacttttacaggaaattgtaaatatttatccatctatcaacccacccaccttgacagcacaccagtctaacagagtttgcaatgctctggcattactgcaatgtgtagcatcacatccagaaaccaggtcagcgtttctcgcagcacacatcccactttttttgtacccctttttgcacactgtcagcaaaacacgtccctttgagtatctccggctcaccagccttggagttattggggccctggtgaaaacagatgaacaagaagtaatcaactttttattaacaacagaaattatccctttatgtttgcgaattatggaatctggaagtgaactttctaaaacagttgccacattcatcctccagaagatcttgttagatgacactggtttggcttatatatgtcagacgtatgagcgtttctcccatgttgccatgatcttgggtaagatggtcctgcagctatccaaagagccttctgcccgtctgctgaagcatgtagtgagatgttaccttcgactttcagataaccccagggcacgtgaagcactcagacagtgcctccctgaccagctgaaagacacaaccttcgccccaggggctaaaagatgacaccccccacgaaaaccctgggcttgcacaactgggggaagaaacctgccagaagggccaaggtcacccaattccccgggggtattcccc

SEQ ID NO: 322166 - DNA, 1060 bp, Homo Sapiens
tccaaggttcaattcgaaaaattaaaatgttccaaaattacataggttccctaatatattttcaagaaatataaaaagcattccccagaagattcgagtgaggacacaggcaacccccataatctttgtcagaaatggaatttcacctgtcactcgctgatttaaccttcacttcttccctgacccacacccagaaccaggcaccctccagagctggcccatctccccttccagcccctgcctcccttgcccgggcaaccccccgggagctccagggagtctctggcggttccaagcgctctgagggcaccagcctgtcccactctggccatttcaatgccgctcggacagagcctggtggtttcgtaagccagtgcatacccccaccctgcacgtgctctcccgggtcggcgcccagtctggtctgggacccgcatcctcgcgctgacgcctcctggtgtccccacggtgctggacgcaagagtgaggtggggtgggctcaccctgaggccccagccttccagaaactgtgtagaacgggcggagggcatggttggtgtgggggtgggcagtgactgtgccagctgtggccctgggaacctgacctggaccgtctggtggaggtggacagccaccaccttcttcatgcagtctttgatcatctgggaggtgaagaagttggcctcgcccttcttgtctacggcgatcttgcggtagtcctccagcaagatggggcagatggcctgggtggggtgagtcatgtagatggggccgtcgtagcccaccatctcgctgaagtaggggagtgccccgcagtggtccaggtggaagtggctaatgatcacacagtccaggaagtctgttaggcggccgttctgggtgatgtaggagaagtcagggaagcgtcggtcgtcattgaagcccatgtgcattccacagtccagcatgacattcttgcccgcaatggagaccaggatgcagcttcggcccacgtcctggccggcccccaagggcgtgactctgatctcaggcatcgtctccgccgcgctcccggacccgc

SEQ ID NO: 322167 - DNA, 1671 bp, Homo Sapiens
  misc_feature (79)..(121): n is a, c, g, or t
  misc_feature (323)..(332): n is a, c, g, or t
cgcgggggcgggcggcacgggacaagcgggtaagcgggggcggagtaagcgggcacgcggcgaacgcgcgtgagctaannnnnnnnnnnnnnnnnnnnnnnnnnnnnnnnnnnnnnnnnnnaaagggcgagagcgggtaaaggagcagaaggaggggagtagagcgcgcgataaggggtacggcgatgagagtggtacggcggggaaggcacgcgcgcatagttgacggcgataagcgcgaggggaaaagggcgggagagaacgcctcaagggaaatgggaggagaaagccagagggatcggagggggggtgtacggcgagtnnnnnnnnnncgccgtaggcacgtgagcgggccccagtcccccgcgggtttggcgctggcccgccccagctcgcaggaaacccgctagcctcccggggaggcggtggaatgccaatgtactgcaccgggaatgtaagcgtccagcgacgtgcggcccctcgcatgtcgagcttcgactgccccgcggaggatatggtggcggacggtgcccgtgcacgcagtagccgggcatgatgaccatgttcttttcgtttgcggcccatttccggaagatctgcaggggctccccagcgtgcagcattcctggcgtggcaaacacaaccatcggtcctgggttgtcagcaaaagcccggtcgaaggccttgatgtgcttgaactcaaacatgttcctctgcacgaaagtcttgcggatcttctggttggtccaggggatgaacagcttgtagtagtggttggccttctcggtcagccccgtggagaagtagatgggcaccttcaggttcatgcgctcccagaaggtctccaggaggatgcagagctcctgggcgcggcccagcgcgaacacaggtatcagcaccttcccaccacgctccacggtctcgtggactttcttcaggaagtctcgctcccggcagcgcttggagtcccggatggtcgtggcgtacgtggactctgtgatgagcagtttgggggggcacttgtcaatccaggcagctcgtaagggtcggtctggggtcatgttataatcacccgtgtagaccacagactctgagcccactttaatctggaacatggctgcccccagcaggtggcctgcatagtaggccttgatctccagctcatcatctacctggaccgtctggtggaggtggacagccaccaccttcttcatgcagtctttgatcatctgggaggtgaagaagttggcctcgcccttcttgtctacggcgatcttgcggtagtcctccagcaagatggggcagatggcctgggtggggtgagtcatgtagatggggccgtcgtagcccaccatctcgctgaagtaggggagtgccccgcagtggtccaggtggaagtggctaatgatcacacagtccaggaagtctgttaggcggccgttctgggtgatgtaggagaagtcagggaagcgtcggtcgtcattgaagcccatgtgcattccacagtccagcatgacattcttgcccgcaatggagaccaggatgcagcttcggcccacgtcctggccggcccccaagggcgtgactctgatctcaggcatcgtctccgccgcgctcccctcgtgccgaattcgccacgcaggctttaagtcccattcgtttatatcttat

SEQ ID NO: 322168 - DNA, 841 bp, Homo Sapiens
gaatccatcatcatggtgtaaaccacatatgcaccctggttacatcagtaccataacttccatcctcagatgtgctgattgtagtagcaactggaagtttcatcaaaattaggagtggtaaatatgcctacttcatttttgctaataaggactgatggaggaggggaagccggaggtgtcggaggaggacgagcaccataattatggtccgcatagggcaaaccaatgtaactgtgtgaatgatgtgagctgctggtatataactggtggggataactgttggatttctcaactaccacagggctagcttctacggattctggttctgaacctgcagccatttccaagtatgacgtctctgctgtatcaacccccaatgggatcactatgctcatgacgttcgcctctggtaaattggattactatggagtcgtatgcattggtatccaaaacactggggcatgccagccacagtgctcattgcaaacatctaagtgcatccacaaaccctgtgatgttcacacacgagacacccgaaccccgttatgtgctcgacccccaaggagtctctccgcacctccgcgaacaggcgaccccccgacagcagccactgcggacacaggacccggctccacacaccccctccccaaacagcagcgcgcagcctcttcaccaggaaccgaggagtaggggagggggcagccaggcagtcaacaggaacgcagagacgacggcgaggctgctcggagtgtctatgcccactctgttgccgctcccgaactccggcacggtctccgactcggccccctgcgcccgctcagtgtcactgcctctcgctctg

SEQ ID NO: 322169 - DNA, 1199 bp, Homo Sapiens
aagttaacaaaatttttgtggtggcaacttctgacatgttctccacaagtcttgaagttttttgtccttgatcctgcacacttgcaacttgtgtcccattcttcatacagattaaaagtcatcaaaggttcaggcaattcccgtaaataggattttaaagcaccctgctacagcatgggggtctgaatagaactcatcccaggtgagaagtagaacagtccaaagcagctttcagcttctttaacttggaggccccagccccaattcggaaaaggccctcctccttcatgcctgtctccagaagcagcatgacacaggcttcaatgggcagcgcaatctctcgcccgctcctcttcaggtgttcttctaggggagtcccaaaggctggtttttccgcccacttatcttgatgggctcgcatttcggggagggtcttttctaagactgctaatgcttttctatggtaatctgcttgggcttctaataacgtaacaaagaatttgccatactccccttctttggccataaagttgtacatgtctgctgcaagttgatccttgcactgttctactttatttccagcttcatccatctcttcctttagagtatctatttttgatggaagcccctgaaagttggttcctgaggatttgtgagcttggttccacctggctctgactgaatcccagtctaacaccaatcttgcaagctgcttcctctgcttctggatgttgggaatctccacctcagctatgccgtacagagggtccacgatctccttctcaacaaagacttcgtgctgggagagctcgagagccagctgattctcagcatctccacacgtctccagcatcttccccaggagagagtcttccagctgagtcgatgcttcttgcatattttgagcaagagctgtcagaggcagttttttgtgtctcctctcggcatcggtgccatgctggccctggaaacatgccaccaagcgcttatgggaatggtggcatattgaccgcaccgtgtccaggcgtctctcaatctgtaatagatcttcactaaggacttctgttttctcagctctgcccacggtctggttagccagctgcttcatgcggttgaactgcttcttcatggcggcggtggcggcggcggcccgcggggctcgggccgggcagggcgggggacagcctggcagctactca

SEQ ID NO: 322170 - DNA, 1096 bp, Homo Sapiens
caaggcccgggcaggccaaacggccgggtcgggccggcagcttgggttcggggaaggaaaacacccctgaggaagtccaggtgccggagccgggacagaatactctgagtagacacaagcaaaggtgccacatctaggactgaggccatcgtggacccacatgactatgttgctttttgtgtgtgaatgtttctctgcttcaacatgttcagagatctcacatctagacgggtcagaggaagtaacaattccatgccagagaaaaggccttgcctataacccaatagaggcccccccagttcccagcaggatggtggcagagctgctgactgggcaccgactcccccgcctgggccggagcaccctctccatgaggacacgtgtcctcctcaggactgggctgagtcctggcatctgccccgtctgtaaagggaaagaccccacccataccagctccccagcagcatctccttgggaaagagggcaaactccagagcagtgcgggtattggagcaggacatcccctcggccgctgctgtgcccagggctccccagggcccgggctggctgggaagactgggaagacttccaggaaccaggcaggccttgcgggtccgggtctctgggtgccagcaggagggagctggtgaccagacatagttgtgtgggggagggtccggacgaaggggttgtcagggacagtggagccacagtcattccgagagctgggcacctgggtcgggggcggcgggtcactcccacaggaagcgcacgtaccagatggtctcattcttcagctggggtccgaacagggggttcagctgcgccaggatggcgatgagccagaagaggtaacagcagacggcggtggcgaccagcatggtgatgatcactccgcggttgggtcccttcggcacgaaccagggcccggcgatgccgacgaggccccagaacgtggtgaagatgatgaccgggagggcgaatgagtgcgccgtcatggccgggcgcaggatgcccaggcaggatgcagggccgagcagcgggcgctgcaggtgcgtgggtccccagccgggcagcgcgctgagcatgcgcaaca

SEQ ID NO: 322171 - DNA, 1013 bp, Homo Sapiens
  misc_feature (39)..(39): n is a, c, g, or t
  misc_feature (55)..(55): n is a, c, g, or t
  misc_feature (86)..(86): n is a, c, g, or t
  misc_feature (112)..(112): n is a, c, g, or t
  misc_feature (1003)..(1003): n is a, c, g, or t
ccctatttttcagccagaattgtgtttcaactaatccantgaacagccatcccanaaggtaatattaaaaggccaagtccacatanccatcaaaatgaaaaccggtgggccnccttgtcgtttttctctatcatcctgctttcttttcctgcccaatgtaaaatgccaattattgccaagatgaaaacacagacaccgatgagagctatagcagtaagcagaacaatattacttggtgtaagatacagtttggcactccaacttcgagggacattgtgagggtatggaatgacaattagctgggaatttggaatgattgcagtccactcttgttttcgtatagatttttctccagatggacggggaataccaacgtagagatggtcaagaaaatttgcgctccgacctaaaccaagcacgttgtatggtagttggagagctaaatgtgcggattggctgagttggccagctgatccatttttcagatacccatttgcatctacagttgtatacatgatataaggtccaggttgattcactccaaagggcgttatcttacgaggacagtcattagaacacagaccactaagaacaataactttaacaaaataagcatctgcttcaaagttattttttagtgtatgaatggcaaaatcattctttgtatatcctttacttagcactacaatgtccaagattccatcttcgtaaatgtcaaagaaggtggcaaccatggcatccttaatttgatttaggtctgtcagctcccagtagactttaaacattcgacgcgcctcttcacagcttgcattattacaagggacgttctccagtaaaaaggcctgctggttgcttccagatgtgttctttagtatgaccagagcgtctggatagccatccatattgtagtctccaatatgaagggtaattggaattggtatttcagttggttgctgttcatccacaaatggcacaaagccctcgtgccgctcgtgccgaattnctgggcctcg

SEQ ID NO: 322172 - DNA, 1168 bp, Homo Sapiens
  misc_feature (907)..(974): n is a, c, g, or t
ggggggccggcccccccttccccacagggggtacctttccccgaaccattaaacctggggttccccttctaaatttatcccccctcaagaaaggttatttccctccttcaagggggtacccttaagatggattttcttattggtcccttttcttttaacaaggccttccccttagccattctcttcaagtccccagaggattacgagtttgtctgtctcctctaatctatcagtctgagagcaccttcctctctgcaaaggggaacacatttgctttaaaccttgtgagtgctgacatgttacagaatgtctgggaggaggcctggctgagtgactggtgtttaagtgcctcaatgaacgacatcagcgcttctctagttggtgagaaggcccaggaaagcttggtctgtgtcatacactcaatagcttctcctacccagccacctaccctgcctacagggataggatgaaagcaaggccagctgacagcatccaggggagagtgaactgccaccacaccagaggtgcaaatgtgactcagcacttcatgagttctactctcaccatgggatttctcagcagaagcaaaccttgcagtcaggctcacttgtagccaacaaatgatatagccatctggatttggcataggaaccttttgttctcaccataccaggtctatgttcttgaacataggcagtacctgagatgatagtataacactaccctgttccccacattttttgcttttctttaggaaataattaagtccttatcataggcacttttaacctgtttaagataatgaagcaaacaaatgaaaagtactgagatgagtttaagaaagaatatgctaactgaaaaggatactgggtgcgtacatttaccatggtttagtctaaatattagnnnnnnnnnnnnnnnnnnnnnnnnnnnnnnnnnnnnnnnnnnnnnnnnnnnnnnnnnnnnnnnnnnnncccttttggaactctccaagaccatctccgaatctaggtaaatagtcttaaaatttcgggggagctaggtttggaaacaaaatggtttttggagacaggaaaagagatggtctgaaactggactcacttcagtttggaaaggaatagcctacgacgcgtgggttcgacgatatcccgaaattccggccgtacca

SEQ ID NO: 322173 - DNA, 2150 bp, Homo Sapiens
  misc_feature (484)..(484): n is a, c, g, or t
  misc_feature (513)..(522): n is a, c, g, or t
  misc_feature (834)..(842): n is a, c, g, or t
  misc_feature (1841)..(1841): n is a, c, g, or t
  misc_feature (1900)..(1901): n is a, c, g, or t
  misc_feature (1938)..(1938): n is a, c, g, or t
tatctagttgatcagccggtcccggatacgggcgtgtcagatcccttttgtccctcccccgagcgaccacagtgctgtgttgggtgtcggacaggtatcggcggtctcgcttccgcgctgagtgaggatggaatagtataatgacgacaaaggggcaggcccgtacgacatttatggcggcgcgtctgctcctgcgggaaaatgatgtgctcgatggcaggggcgtagtgcggagagccccgtgggccagaccacgctgccctcctgggaatagtccgtgcgagtggctctcaagggatacgtgatcgcgcggacggcagcctcctttccgggacgcagttggcctagtgggacgcgcgcttcgttcgtgagttgaggtgcgtttaggtgcgtggtaaaggagtaatatggtacagagtggggtaggtgaggaggtgggagatatctagggacagaggaaaacgggtgtaaatactgtgaacgntgggtgttatcgcctccaaccagcgattnnnnnnnnnnatgcgtctgcgtgattgctactgtgacgtgaggagagggacatatgaaataagacacgggcggtggtgagtgtgtactagtgggatcgcagcggactgttgcgcggggtctcgaggagagcaaaatacaggggtgagagaagggtgagcggttgacacccggctcggcgcggtgcggggggcgcggggggttctgagtattcccctgtgacttgcttgaagcgccgtttcgttctcatcggcgaggcggagggcgccccgccccccagaccgcggtgccctgttggggccggtgcgtcgcgaagcgggtgtnnnnnnnnncggtgcggccgaggcggtccggcgttgagatcccgcctcgcacggcgtcggcgggggcgcttgagctcctgcagttgagcgggggcgcctggggccgcagggcggttctgttcgttgagatttaggattttattattatttatttttagaaaaaagagaaaatttacaagatgcaaaggtctcacacaatacattatcattgatgattgctctcttgacacttcaacacgggccctggcaataaaaagaacatggacagtgtgagtgtattggagaacccccgccatggacacgcagaatacaccacagtggacttgatgacaaatgatgctgggccagcctgttccaaaagcaagccaagatgtggtagaaaccaacaaagcctttctgtgggggaggcacgagcgcacaccttctaccacatgcgcacccgccccctggcccaccggcagtgcccactgcatcactccaccacagcaacaacagaaaacgataaaacggtcctttggtgttttttgcagagctattcaggttcccaaattcttatttctgtcttcctcttcatgtttcagttccaaattcttaaagtagtgtaggtgcttagcatcttgaatttttcaggatccagttctgcccaatgataacacactgaattctgcctcctgagctacggctcccgttcagaggacacgtcgccctcagccccgctgctggcactgcggtcttcttttcggggagtgtttctttccttgcttgattcagaaggtcccttagctctggtcttttctttcctctgctgctgtttttcgagctttgacagctgctttgggtcagaggtagcagtgccgggagctggcgattccagctctatggtcacaggcccatcattctgaatgtgcacctgcatgtaggccccaaacttgccatctttgataagctccggcactcgtatcgttcttagcgcagctgggctcacagggaagctcgctctgtagaagnacccgtcgtgccgtggctccgtgtgcgcattgcataagggtgggaaatcacggcttgtnnttccgcttcaggggacacactggagtcggtaaactgngctgacacacagaatctcgtactgtttgtccatcacactcttcgaccagtgcttcccactctcatcctcaaatacacgcaggtttagaatctttcggaccatgtgttccagttccttctgcgtatcctccagggaaatacccagcaacacacatatgccccttccaatggcactaatccctcgtgccgaattcgccacccaggcctcgctac

SEQ ID NO: 322174 - DNA, 829 bp, Homo Sapiens
  misc_feature (91)..(91): n is a, c, g, or t
tgggcccatccaggggtctctatggggaggccaggggacttggaaatggtttcctttaaaaaccagcaaggctgtgaactgggctgttgantaaagatgccagtctggccatgccctggggtgtattccctctatccagtcaattggggggcctgtatagtcgtttaagaaaagaatctctcttggggagaagcagatctgggaagtgacagtaaaataggatcttcttccgccgtctagccagcctgaacactgggatacaggcagacaccaaggtaaaaagcttgaacttttctccaaaaaccaatggggagccatgtacaagttttaataggggcatgatatattcagcttggcgtttttaacacatgacactgctgaggacggtgtggcctggctccgaacacaaggacagtgggatgcaaatggcctggtcgcacactaccacgtcgaactcctcgtcggcgaggaacagcacgtagagcgccaggaaaaccatgcgcacgtaggcgcagacggcggcgccgcggccgccccagcccaggcctcgcggcagccagtccccggcacagcgcaccggtagctcgcggctctcggcgaaacagtggcccgggtcgtagtgcgctgtccagatcttcacgctacacccgcgcgcctgcagcgccagcgccgcgtccaacaccagccgctcagcgccgcccacgcccaggtctgggtggaggaacagcaccgacggcttgggaaccgagtcccgttcccggtcctgctcctccgccatggccctggagccgcaactgcaccccgcaccctgatgggggtcttctgcccc

SEQ ID NO: 322175 - DNA, 519 bp, Homo Sapiens
gtggtgatcaagtgctttttccgtgacctgtagaatcgggccacccccttaattgctatgttgttggattcagtagcaccactagtaaaaatgatctcacgaggatcagctccaatcagagatgctacttgctgacgagcacgttccatggctgcctcactctcccagccataagcatgtgtccgggagtgtgggttcccatagtagttgattaggtaagggagcatggcatcaagcacccgggggtccagaggagttgtagcttgcacatccatatagagaggtcgcagcactggccccacctccggggcagcggctgtatctgcgggaaccgcagactgaggagcacggtctccaacgcgcaggcgcagcccccgagtgggcgccgcgggcttcggccctggagccgctgtcaccgccactgccgcccgcctccaagcggctcggagcagcatggtcccgctggcagagcccaccttccgaagccgctgcagtcctgggccccaggctcccggaagt

SEQ ID NO: 322176 - DNA, 1477 bp, Homo Sapiens
ggtttttgagtcaaggaagaagctgacacaaaatagtttattgaaggaaaaacgaggggagaggagtcaggtgggaaagtgctggaatgtgaggagtctgccccttttcttcaggaactagagcaggtggggcgctgtcggagagcacccccagcaggttcagagctgcccagagtctctaggacaggggcagaagcagaagcaggagcaggagcaggcaggttggcctccgtcagcaaagctgcatcttcccaggagcctgaaccatcactggcctcaggctctagctcctcttctccgctcaggggctgctgatctggtttctcctcctcggacagctgaccctctgtccctgagggatcttcagggctctcaccatcctctgtaacatctgattgcgggagttgactcctcctggccttcaggcctgggctgatgagcagagatccttcgttggacttccttccgggaattgtctctttttcggatgttaacctgcaaagagaagcggtgtcggggccagatgcccccccacacccactgcatgtagctgaagagcacgatgacgctgaggaaggtgaagttgctggcaacacctatgaaggcgcaggtcatcgggaagttgtatagcaggtatctgagccccagtgaagtgcgcgtggatgcggaggtaggctccatacagctggatgcgcttgctgtggatctcaatgatcgctccagtggtcggcacgtacgagttctctctatagtctgcgtagagttccacctccagcagctgcttctgctctgcaaagccaaatagcaggaggctagagaagaccagtgtgtccagcatctggagcaggtctgagcggtaatgcagcatcaccgaacgcgaagaagtggagatgattcggccacctctggtgtagcaggaaatggtgaccaagaacatgcccaaatcttgattcacaggggactctggcagctcaagctctaaggtaacacgatacggctgtccatacatcagcacccgatcacgtccacccttagtcagcgagacattggcaacagggaaggagcagagtgaggtggtggaggaatcacagtcggtcctgtagtagaaatgcacagggctgaggtggctgactgtcggcatataggaatagtagaaggagccatagaggaagacagacacccagagcaaaaggaggatggtgcagaagagcaccccaaactgcagcagcagcctgcgggcacggcctgccaagacttggcccacctcctgggcccacagtaaggcaggtactggagggtcgttgaccatggccgggagagcagggtgtctggccccaggttcaggccttgcgttcctagctgctctgccacctggacgccacccctggccatgggatgcagcagctggtggttcctaatcgtgcaaccatggaaaccagcccgccggctgccacagggctgccgactcaccagcctc

SEQ ID NO: 322177 - DNA, 584 bp, Homo Sapiens
caatcccgctgaagaattggaacatagttatattggctggaggtttggacattcctagagcaatacatatgcctttcaactcttgaaagacctcactaccgcctccttcttgagctttttttggaggagcattcacacagagcattctggcagcttctagttctgagatgaggtatgtgagcaagaggaggcagttcttctgaatgagaaggcgcttggtcacatccccagatgtcagtgaaagatacgggcagttcatctcccctagtagcccactcacctcaagctggaattcttcagcttcactcggactgttagttgcttgcacgttttcctctagtttacagagcactcttaattcagacaccagccaagcacagagtttggtaaactcgggggaactggctccagcagagactgcctgagagagcgctccatcttccaacaatgggcccttgtaacctagatcttccaacgactccaagatgtcagtctccatgaggtcacactccatgctactgtggtattcaaatttccgagtcgtcaggctcccctcttcgccggcaacgcgtacactcgcgcat

SEQ ID NO: 322178 - DNA, 798 bp, Homo Sapiens
  misc_feature (33)..(33): n is a, c, g, or t
  misc_feature (102)..(102): n is a, c, g, or t
  misc_feature (106)..(106): n is a, c, g, or t
  misc_feature (175)..(175): n is a, c, g, or t
tatttcttttcttcccccttttacgttcccacntgcgtctcagaaatgtcagacccctggaactggaacctggggcttattcttcaagtgctgccatccgcntggnaaagtactcctggatggtgaaggcagctggttgtcgtggtttcggttctccttctggagtggagggacntgcatcgccctcgggagtcttcttactctgtcttttcccaaaaatgcagtcaagatctgttttgctccgagatgacagatccttcctttttgtgaatttcatatagtgaacacggtttttggagattttggacttttcctcaaggctaaaagatttcttttccttcttgtccgaggaatctgtggtttcctgcccatggcaagtgttcagttcggctagaagctggttaaaatcatcctgatgggcaatccagttgtcttcattattgatggtagctccgagtcccaggtggttatttttcacttgaactttaatatgatctgtggctccttgctcttgagcccctaaaccctttcctttagaccaccccatcttctctagcatccgctggccaaacttggaatcgtcattactccaggcagtgttctgaggatccacagcccacttctgcttccgccgacgttcagccagcatagacatgtcggagagcctgtgataccgccgcctctggacctgggtgactgcggccactgggcgggctggagactccaggagaatcaggacgtgcgtaactccctcgccggcggactgcagcggacggggcgcgtgctggtgacgtcagt

SEQ ID NO: 322179 - DNA, 764 bp, Homo Sapiens
ctgtcaaactttgagaccccattcaactacttcaaattttagttggggaaaccaagtcccagagagagaggtcactggatttataaagttaaaagcagagccaaacatacatctcaccatttctggtcatcctcagatattaatactcagtttttcaaaccacatgcaaggaagtaaattcagaggtaacatttaactatgatttaaaaaaataccaaaaccataaattttcaaggcagtaattatctccttctcaacagtgctttgagaagaagcatgcatttgcactggggagggaggcacagagtcgagtctcggctgtactgctgaaccctgaaggcctgacagaggctgcctggaatgggatgaagagcagcaaatcagaaacaggcaatctgtccaattttcagtgaaacaagtttcatgattttagaacctctcaacatccaaaatcctagacacaatgttcctttgaaagaatatattttcttattgactaagttgatatgagaaataagtttcttattatacactttctgaggacctacatttctatggcatttaaatcttggatatttttaatgaacattgaatcccagggagctaacactgcatttcacaatctctgagcactgatcgatgttctttttaatcctgtagaatttctccacgtattcagaacgtcctaaaagctccacaaaatcttcatcatgagtgattaccagaagctggaagttacgctgctgtgagcgactttttaataa

SEQ ID NO: 322180 - DNA, 1004 bp, Homo Sapiens
  misc_feature (654)..(669): n is a, c, g, or t
  misc_feature (933)..(951): n is a, c, g, or t
caaagacagccccacctgccctgcctacaggttatgattcagaggaggaggaagagagcaggcccatgagttacgatgagaagcggcagctgagcctggacatcaacaaattacctggggagaagctgggccgagttgtgcatataatccaagccatggagccctctttacgtgattcaaacccagaagagattgagattgattttgaaacactcaagccatccacacttagagagcttgagcgctatgtcctttcctgcctacgtaagaaaccccggaagccctacaccattaagaagcctgtgggaaagacaaaggaggaactggctttggagaaaaagcgggaattagaaaagcggttacaagatgtcagcggacagctcaattctactaaaaagccccccaagaaagcgaatgagaaaacagagtcatcctctgcacagcaagtagcagtgtcacgccttagcgcttccagctccagctcagattccagctcctcctcttcctcgtcgtcgtcttcagacaccagtgattcagactcaggctaaaggggtcaggccagatgggggcaggaaggctccgcaggaccggacccctagaccaccctgccccacctgccccttccccctttgctgtgacacttcttcatctcannnnnnnnnnnnnnnntctaggagagctggctctgcagtgggggagggatgcagggacatttactgaaggagggacatggacaaaacaacattgaattcccagccccattggggagtgatctcttggacacagagcccccattcaaaatggggcagggcaaaggtgggagtgtgcaaagccctgatctggagttacctgaggccatagctgccctattcacttctaaagggcctgttttgagattggttggtctaatttattttaagctaggtaaagctnnnnnnnnnnnnnnnnnnnccttggttcccctcagccttccatgggggagggggaaaaagggggggagcctc

SEQ ID NO: 322181 - DNA, 1038 bp, Homo Sapiens
gaaaaacgcagcaggtgctataaccactagggatagactctagcttgctgttcataaaaggattctgtaagggaaactttgctctataattaacagagagccagatattacagaaactttagattgtcttgctacttcactgacccttaaatatttatcttttcttttgcaactatcaattcacttaaaagttttaatcattgcataccctgtaaacttcctataaacaatatgttattgcaaaatgttttaaaagatgtgagaaagtatctgtggagtttggtatcagaaagggcagagcctttgttttatctaacgattctttcccaaactgggaagttcgggtagagacagtggcttttggtaatatttaggcagtgatttcttattcttaaaatcaacagtaatgaataaagttttgacatcagaaatgtttacaactaaagtagacattgattacattcttagtacaatacaatttttaacataactacaaatgtgtatacacttcaaatattagcaaattgcttcaaaatgaaattctaagcaagtttttggtaatttattcacagttcaggcttactcactggacttaacgacatgaggaagaaatgaccaactggctcagtaaactaaacattcatttcaaaaatcacaaaactgaaacaaagcaaagatgatcctaaaatttccacttctcaagaagtgtaatttaaacaaataccaaaagctttatttaagcaaaaacacattcaaccacagaacattcagaaagctaacaggatcatttctacattcattctgcaaacagtgtagtaagaaaggtaatttgagaatttccaaagatgttctcgctagccattatttatggtaattacataacattttgatgtcaagttattacagacttaaaagttaatatagcataattttacaatcgtactttcactatgatttttattttaaccctggatattattggtttgaagctaatattatcagtcctattggctgtcactgtcacagatctgaagatcc

SEQ ID NO: 322182 - DNA, 1302 bp, Homo Sapiens
  misc_feature (494)..(505): n is a, c, g, or t
  misc_feature (550)..(550): n is a, c, g, or t
  misc_feature (670)..(681): n is a, c, g, or t
  misc_feature (1270)..(1270): n is a, c, g, or t
tcaccattgatactctgtaaggtgggatgaaagcaagttttcttactcattttgcccagttgtcaagaaatgctgcccttctctctaacataaattaacaggtttggctacagcctagagaaatacaaaatgtcacattttagccttagtggccggttttcaaagggtgcctgagtgtgaacaccatgtcggctgctctgttaatgtgactgggtctcataaataggtatttttctacccctgtgatggacaaatctgaaaaagttttttcatcttacaagcccagaggatggtatttagaggctgatttttggtatctcagttcctggtagggaagacgaattccgtatttgaaatttggggacaaacaaaaataattctttctctttccttgaagggttaatgctccaaccagcctcagattggttcgcttgaatcttaaaattacttttctggtcacgcgcaccgaaggtctaagcatttgtgaaatgtcnnnnnnnnnnnnctttcctcttgatgctgttctctttgggctgtcttaattacacanggggttgagaaaccaaattaaaattatggcgtgtctggtcaacagtgatcacgttgcatgcttttaactttgcttgttgaaagttgcttctcctccccgagtggctttcctccccacaannnnnnnnnnnngaaggaaatatcataagctctttcagaaatactcacaggaagtgagagtccgtatgctggttactcaccagcaactgaagtgttggcaggtggagaatgctaccggagcccgcccagacggatcttgcagactggccccatcgcagaggattagacagaggggtgcatggatcataggggtttttgaaaagaaggggagttttaagagggaattggtcactgcgtgtcatctcgaggggtggtgattcagggagcagggctgggggtcagaaggcacgtggctgccatctcagaggttgctgctcacttctcagagggcaggctggcttctaaaaatcaacgctccctccacccccaaacagcgattccttcctgcagtgaatcacttcccagaaatgaaatagcccacagttttttggaatgaacgttgtgaaatccctcctttataatggcaggttttcagttggtggttttatcagaatttctcaagatcaaaacgaaaccttctctttaaaaaggaaagaaagtactatcgatacagaaagcaaaagtatttccagtctcctactgaactgtcacggcagacctnctctgtatctatatttagagctgtatgtccat

SEQ ID NO: 322183 - DNA, 582 bp, Homo Sapiens
ttagagtcatgaccttatttatttacaagcacaggataagtccctaacctcccccaaagactgagcaaccctacccagcccagttaaatactgcaactgggggggtaaaaaaggtcgggaggaggaattaagggaaatacaggaataggggaacatatcccacattaaatagttatatacacatcagttcctgtggttctgtacagagcagcggctgaccccacccccacaggacacaatgtggggagaggagactgagggtactgaggccagagccaacctctggtgaagtgcaatagcagcagcaaagtcctaatggtgcacaagagggaggggaacccccagggctacccacccccaccctgccctggaatgtgtaagggacaggaatggctctcagggagcacacaggaaggacaaggctggaaccgtcttcagggcccagttttaagggcaacgttttgcctacttcaccctagacacagcaacccttggaggaaagcagatggtcagcagtgctcttatctgcccctccaaacctaagtgagggcctggttccttcctacctctccccagggaaaa

SEQ ID NO: 322184 - DNA, 1063 bp, Homo Sapiens
  misc_feature (84)..(84): n is a, c, g, or t
  misc_feature (103)..(130): n is a, c, g, or t
  misc_feature (156)..(287): n is a, c, g, or t
aatcccccacccccttttgttcttgttcccccgggttttctcttggggaacccactttatgggccccgtttcccctttcccctntgggggcccgcgggcgccnnnnnnnnnnnnnnnnnnnnnnnnnnnngaggggcggggggggccggccaagannnnnnnnnnnnnnnnnnnnnnnnnnnnnnnnnnnnnnnnnnnnnnnnnnnnnnnnnnnnnnnnnnnnnnnnnnnnnnnnnnnnnnnnnnnnnnnnnnnnnnnnnnnnnnnnnnnnnnnnnnnnnnnnnnnnggacccatgggatgagtgttttattcatgctgtttccaggaagggatgtcagagctggaccagtcgaaacccttggaggctttttttgcagttggccacaggggcgttggaggcctgcttatgggtcctcgatgtcgagaaactcctgcttggggggcgccgcgccgcggtaccacgcacaggagccgtcacttctcttgatgcaggcgaagaacttggcctggtgcccgttgatgttcttctctgtgacccagtccatccagaggcactcgtccggggaggagatgtagcacgggatcatggggcagcgcgtgatcttgcactcgcagcccatctggtacctgtggttcaggctcttcttctgggtggtgctcagggtgtcccagggcacgatgaagtcacagagggtgatgtgcatcttgccgtccccctcggcctttcctgcaatgagatattccttctttcctccaacgtccagcgagaccccacacactgccgaggagggggccgtgtagataaactctatatccttctcaggccctttgaacatctttatctgcttgatctcatactggatcctcttgatagggttgccataaatgtcgtttccagagtccacttccttctcactgaccgctttggccctgatcaagcagcaaggtgcgagacgggcaaggggcatggtgatcccagcccccggcatggcgtctcctcctccaggctgagagatgatgcccagcctcctcctcctccttccacgattcttcaacaagccc

SEQ ID NO: 322185 - DNA, 695 bp, Homo Sapiens
  misc_feature (427)..(458): n is a, c, g, or t
  misc_feature (471)..(592): n is a, c, g, or t
  misc_feature (605)..(605): n is a, c, g, or t
  misc_feature (646)..(646): n is a, c, g, or t
  misc_feature (656)..(656): n is a, c, g, or t
  misc_feature (671)..(671): n is a, c, g, or t
taattgccttgtgccatattagtccccaatattttattgacatttgatagcaatttttttcatcattttccgtactcctaaggaaaactgacctatacctcataaaatgagaccgctatttaggtattacttctgccagatatttatcacccaattgcctctgacactgactaagaagatgaagaaaagcttttcaacagcctttctatatcatcgtgtgataattgttcaccaatgaatgagtccttagccctgtgtcagtttaccctcgatgcccttatttgtgagttaaagagaaaatatcataaatggtatactcttaagtatagaggttttgtatctagaggatctcagttcaactcctgtctctccatataccagcagtgtaactgtgaataacatacttaaatggctgtgcttatttccnnnnnnnnnnnnnnnnnnnnnnnnnnnnnnnngagatgaagtttnnnnnnnnnnnnnnnnnnnnnnnnnnnnnnnnnnnnnnnnnnnnnnnnnnnnnnnnnnnnnnnnnnnnnnnnnnnnnnnnnnnnnnnnnnnnnnnnnnnnnnnnnnnnnnnnnnnnnnnnnnccaccaccacccnggggctaaaatttgtatttttcagtaggagacgggggtttnccccatgttnggttagggctcgttntaggaacctctggaccccaggtga

SEQ ID NO: 322186 - DNA, 1684 bp, Homo Sapiens
cgttggtcactgtcgggttcagctggacgtgggcaaagggattcctgctcatggaccgcgctccatgtcatccaggcctgggagaaggcgggcaccgccacactgtagggcctctgcttgaagccgctgtccgtctggtcggggaaggtccgtgaggcggcgccgtaatcggtgggtgggatggccaggtcgtccttgtccaggaggttgcccgtgctgctgctcttcccttgctgcaggctcatgtgcagcctgtcactgccatcgctgtccaagacccgggtgtaggagaagggaaaccagccccgcatcttggtcttctcactctctccgtagtgccagccatcgcgggcctcaggcaccagcagggtaatgaggtcaccctccttgaagctcaggagggtgctgttgtccccagcagcgtgggagaagatggccttcacccgcatacggccattgcgctccaggccggctgccatggagctcgagcgaggcagagtcttgttctcggtggtggcatagctgttttttggggtcacgctcttgcgcacggggagtgtgttggagtaggagtcgctgagcttgctctgagactgcggaggagacagggatttgggctgggcagccttgcggtcagcccacgggctgtagtcctcgccatccgggcctgtgacgccgttcatgatgggtgtgctctcctgggcagacatccgccccacgaacggtgccagctcggggggcaccggcagggggctttggcccccggaatggggttcggaaatgaccaggttggacttgggggccgacagggcgctggggagggtggcgccgttgctggccacctgctgcatgagctgcaccgcgcgctccgggatcttgctggggtcggcacaggcctgttgccacagcggcagcttctgcgccagcagctccttgcccttggagtggtaggccgcggagttcttggccacggcgcactgcttctccaccaggaagcagaagcgcctgcgctcctctgtcagtgcggtcttgtagccgtcggacacgtaattctccagctcgccctgcttgttgctgatggcgtcgatgtactgcagctccttgtccgagtacttctgaggattcttgctgccctggctcttcttccgaagcttcttcagctcagcctgacacttgtccagggcgtcgcctttgctcctttgctcagtctggtatttcttcagcgcagcactcagatacctggagtccagctccaccttctgctccagctgcgtaagcagctcgttgtgaaaagacttcagcatttcttccagctgattctggatctgcctgtggacttcagccatctggaagagaacgtctccgagttctttggagccctggctctcgctggccagctcccccatcttcaccagggcgtcaaagtagcctttggctgcatacgtcacacctgccagtgccttctcgtaattcttccccatggcgatgaagttccggaggctagggttgaactgctccatgatggtcttatagacattttccgtgagccggtgcatctcctctgagcgagacagagacatggtcctgggtcccggctgcaccacagaccggagcgggggacgcaagcggcggcagcagcggcggtaacggcagcaggacggagacgaaagcggacccgaaccac

SEQ ID NO: 322187 - DNA, 1114 bp, Homo Sapiens
gggttccaaaaattcattcccggccctggggagaaggccggccggggcccccactttggggccctctgcttgaagcccgctgtccgtttggccgggggaaggcccgggagggcgccgccgtaattgggggggtgggatggccaggtcgtctttgtccaggaggttgcccgtgctgctgctcttcccttgctgcaggctcatgtgcagcctgtcactgccatcgctgtccaagacccgggtgtaggagaagggaaaccagcccccgcatcttggtcttctcactctctccgtagtgccagccatcgcgggccttcaggcaccagcagggtaatgaggtcaccctccttgaagctcaggagggtgctgttgtccccagcagcgtgggagaagatggccttcacccgcatacggccattgcgctccaggccggctgccatggagctcgagcgaggcagagtcttgttctcggtggtggcatagctgttttttggggtcacgctcttgcgcacggggagtgtgttggagtaggagtcgctgagcttgctctgagactgcggaggagacagggatttgggctgggcagccttgcggtcagcccacgggctgtagtcctcgccatccgggcctgtgacgccgttcatgatgggtgtgctctcctgggcagacatccgccccacgaacggtgccagctcggggggcaccggcaggggcttggcccccggaatggggtcggaaatgaccaggttggacttggaggccgacagggcgctggggagggtggcgccgttgctggccacctgctgcatgagctgcaccgcgcgctccgggatcttgctggggtcggcacaggcctgttgccacagcggcagcttctgcgccagcagctccttgcccttggagtggtaggccgcggagttcttggccacggcgcactgcttctccaccaggaagcagaagcgcctgcgctcctctgtcagtgcggtcttgtagccgtcggacacgtaattctccagctcgccctgcttgttgctgatggcgtcgatgtacttgggctgagcccctaccggcctcaggcagaccctccaatcccgggaatccggaccggtccagcctc

SEQ ID NO: 322188 - DNA, 920 bp, Homo Sapiens
  misc_feature (279)..(288): n is a, c, g, or t
ggagcccagcacaggcccaggccactttgtcgtgtttgttttaacttctaaagaaaatatgtttcagcattataagaaaggcagaatgcagaacacctacatttttgttttagtttggtgccaaggctcaggctgtattggcaaattcccgaaagttttcccactttgcctggccctgcttctgtcttttctttctcagtaaacagttctgaaggcaggagtggaacccgggagtattttcatgtctttcatccttgaaagatttttatgtgcctgcannnnnnnnnnaattaaaaaatgccttttcattggtcttaagagaccgcattggagaatttcaggcttttgataaatgcttcttcaaagagattttcttctctagtctagccttccacattcttagattaatatggccaaccctgtacacatcactacactaaacactgctctagataaactgctcaagttcatttaactcatttgatgcacctaaaggggttcctcattttaaagatttgttaggccaagaagcaagagagtattcctagtattcccaaccatgaaaagtatcattctttgcaccaaatgttaacaaaatcattttgttctcctgccctcttctttttaaaggtgttttgatgattaagtgggggtcactgaaattccatttgtggactgaaaagtattcaatccacttttggggttcagagataaaacattttttcccaagtagctggggctcttccattttgcagataagtcaaataatcaacactaaaggaggctaaactgttgatgaatgagagactccctgactgctcagatgaccctagccacactgaaagggcacctacaggtcagtttagctacctcctgtctttcccatgcaaagctgataacacagttgtctttggacttgt

SEQ ID NO: 322189 - DNA, 1929 bp, Homo Sapiens
  misc_feature (140)..(152): n is a, c, g, or t
ttttttaattgaattcatgtttaataattacaggcaccgtgcccccccttccccctgcccaggcaacagcaggggtggtacaggggctggggcatatgcccccagcagcgaggacggcagtcccgagagtgattttcagnnnnnnnnnnnnnggaccccaggggcaggcgttggtgcccctccccaccccaagacacaccaaatttcaagactttatatataatatatctctgtgccccagggggaggagagggacacctggcggcatcctggaggggggcccaggcagccccaagccatcctgcctcttcagccactttattagttcagacacatcacattacaggcacccactgccaccgccgctgctgccgcccccctgcagttccaggcggctagccgggccatctgtgtgtccatggggctccaggtccccggccccaccagccctcagttgtggtcagactcctcctctgcttcacggagccacttgaagaaggctgtgacagatttaagggccacacccttgccctgctgctcagcggggtccttgctactctcccaactgtagaaggcatcctccttcaccacgtcctcgtcatacagtgcgtcaaagaacatccgcagcaggttgggaggctgttctaaggtcactacaagggcctggagggcgtagagcgcctgtagctccttctgctcgtcacacaggtatttctgcagcagcttcgctcgcgctttcagcactgcaacgtccactcggaggggagtctcaaaaataattgcagaatagcagacagccgtcatgagggctcgaactaacgtgttggatactatctgctgctcactcaggttggcctctatccagtcgaacacccgctggttactgctgccctccttcagcagcttctccagctgcctgttcagctcctcggaggggagtgccctctggccaggggcttccgactcctctcccagggtatactccaccttctgttcagcgacgaatgcaccaatgtcctggccttcaggtagaaattccttccagctaagcccggcttctcgccacagcgtccccacctttttaggacccatgcttttgcacaggaggcccaggatctccagcaacagggaagcagctttgcccaacggtctcagaggctttgtaatctccctgaacagctcccccatgggcaccccaccttcctgcagaatgggtgttaccagttccgctaggtagagccacacgtgggggatgtcaatttccatgtcctcagccaattccaagatttcatacaacccttggtagtactgagcagtagacagatgcccagcacagagcagctggtgcagcagctgccccatatgctcacgagcaatggcactgcgctccagcgtagactcgacaccatgccgtacaaagatgaagagcaaggagggtgaggccagctcctgcacgcactggactgcctctttcatgtcattgagatggagatattcctcaatgatagccttggatttcttctctaactcctcctcagagagagccgccttcagggggctcactgggggtagggcagcttctcgcttcacggcatcccgcccacggtcccgatcctccgtgaggctagctgccttgcgcagcccctcaggctgggagggccgttctctactccgctcctccacttccttgctgaagctccgcttggtagcaggtgtccgcgcacgatcaagccggtccccacggtcccctccccgttcactccgctctaggcggtctcctcggtctccagctttctcgcctcgttctcggctcaagctactcctctgcaccacacgtctattatctgtgctttctgtgggtaccgcttgttgaagggctgagaagcgattcaaagtactagtagctgggcgagcagcttctgatgctgc

SEQ ID NO: 322190 - DNA, 639 bp, Homo Sapiens
ataaattgtgatgtttattcctcgatttaggtctttccaatggtaatggtcaccccggtcattcttggctagccgctggcgttttattaacttgccttgaaggattccagaattttctacaacaggctctatgacagacatgctgtcatcttctagataatagtaaatgttcacctgacggatcctatactgttcctcagttgacataggaacatcttcttggaaataggcatcaaatttcagtacctttttgtcaaaggccacatgcgcaggaataaaatccgcaggtggggcttgtttaaggttggcccataagttaaagactggtgccttactggcccaactcatcccagctcagcctgggacagctggttgaactggagccggtctccgcctatcccaactgttggacgtcgaacaattgcatagccgttcctgtagctcagcgtctgacttctgtggaaggctgttttcgtagagtccttaaaggacgtgcccggaagaaagggcaagccatgcacgggattggacaccattgcagccggtaccaccgccgccacctaggtcctgcttcgtcctctccggttgcccaggcgacaagcagtgttcgcgggcacctccaggatccatggtaacgct

SEQ ID NO: 322191 - DNA, 593 bp, Homo Sapiens
gttttttttgcagccgcgctgcgcgcaccgcgggctccgggctcagaagtgcggacgcccggctcccggcgtggacgccatggtgctgtgcccggtgattgggaagctgctgcacaagcgcgtggtgctggccagcgcctccccacgccgtcaggagatcctcagcaacgcgggtctcaagtttgaggtggtcccctccaagtttaaagagaagctggacaaagcctccttcgctactccgtatgggtacgccatggagaccgccaagcagaaggccctggaggtggccaaccggctgtaccagaaagacctgcgggcccccgacgtggtcattggagcggacacgatcgtgacagtcggggggctgattctggagaagccggtggacaagcaggacgcctacaggatgctgtcccggttgagtgggagagaacacagcgtgttcacaggtgtcgcgatcgtccactgctccagcaaagaccatcagctgggacaccagggtctcggaattctacgaagaaacgaaggtgaagttctcggagctgtccgaggagctgctctgggaatacgttcacagtggggagcccatggac

SEQ ID NO: 322192 - DNA, 547 bp, Homo Sapiens
aggcatgggtgaaaagggcttgttatgaatacaaaagacactcctatcaggaaactctagaatttttgaagctgtgtgctaggaactaggcacaaaatccagatacattctttattgtatcacaactggtatatgcaacagtgataaaagtttaagtgagggtgtgtggggttaaagcacttagaccttccagtatctttaagggtaaagcccaaggaaaaagtctttttatttgggaagaggatactccttggtgggggggagaaaggcaggctcagaaggaaaagacaacagcctcctataaatatgacaacagttataatctgagcctttggagagcttgaagttctaatgaaagggttggctggctgctggcatagaggatgtctttgtcagcaggggcagaaagggttttgtatacagaggaaacagacaggacgtggatgagttggaagcaccgagagcaagatcacagagttatgagaaccaaggggaaagtaaagagctttgctttgaagacacagaggattccttttttagactggaa

SEQ ID NO: 322193 - DNA, 760 bp, Homo Sapiens
tatcgctgttaatgctacatatccagagctgcaatttgatgactattttttgaatgtgtgttttgaagtaattacaaaagattcattgaattcatcccgccctatctccaaaccagcggaaaccccgactcaaatacaggaaatgtttgatgaagtttcctataacaagggagcttgtattttgaatatgctcaaggattttctgggtgaggagaaattccagaaaggaataattcagtacttaaagaagttcagctatagaaatgctaagaatgatgacttgtggagcagtctgtcaaatagttgtttagaaagtgattttacatctggtggagtttgtcattcggatcccaagatgacaagtaacatgctcgcctttctgggggaaaatgcagaggtcaaagagatgatgactacatggactctccagaaaggaatccccctgctggtggttaaacaagacgggtgttcactccgactgcaacaggagcgcttcctccagggggttttccaggaagaccctgaatggagggccctgcaggagaggtacctgtggcatatcccattgacctactccacgagttcttctaatgtgatccacagacacattctaaaatcaaagacagatactctggatctacctgaaaagaccagttgggtgaaatttaatgtggactcaaatggttactacatcgttcactatgagggtcatggatgggaccaactcattacacagctgaatcagaaccacacacttctc

SEQ ID NO: 322194 - DNA, 778 bp, Homo Sapiens; identical to SEQ ID NO: 150903
  misc_feature (139)..(156): n is a, c, g, or t

SEQ ID NO: 322195 - DNA, 816 bp, Homo Sapiens
ttttatacatagtagtctcatcaaatgaattcgggcttggggtgatattgtctccattctccagatacaagtgctccaggcatccatggaatcagcaggagaccagggctcctaagatatatttttaaaaatcagtatcgatttctttttgcctttgcagaatctaaagggcaaatgacctcgcagagactcccaacgggctttgggctcatgacgaaacacccactagcattgatcttttattcctcttccctataaaataaaggccttgggaaatcacaattttatttttttaaagaagttgttttagtgcctaggagtaaggaccgcatcaaatgttgttaaaaggaacctaatttagattgtgtggtatataccactgtttatctcaatacacagacacctcttacttcttgttataagtgagaactctaaagaaaaatcaaactcccaagttttctgtaaacatacgtggtcttaatagggtcactgtctgaggcaaaatgggttgtcttaaagcaattgctacaaatttgcatcaaagaaactagatagcaaaatacaacaaccatgtaccacccaggcagaagagtcctcacctatacgcagttctgcatattgatcatcatgacaggaagtatttcgttttttaactgatcccaggtgcacagatgtattcataaaggaagacattagatccagccattgtggccaccaggctctgtggacccatctcagtggagaattcgttttggacccgtggctccgtgcagctgtggactcgagtgccatccactggtgtgagtcttgcgggga

SEQ ID NO: 322196 - DNA, 582 bp, Homo Sapiens
  misc_feature (19)..(19): n is a, c, g, or t
  misc_feature (53)..(53): n is a, c, g, or t
ggctgggacgctgtttgtnctcagcggggacagccagggttgatctggccccnagggttttggatgtttttaggatgacataaaaagcaagtgttttccccatttcctcttatgaaacaccgtctgagcccaaggtacacattgggcggcctgcaggaacctgctccagggttggacacacggggccagcagccgcgaaccttgaagctggggtgaccgcaggagaccctgtaaggcctgtgagcggagccctcgaccccgtgacaccctggccagacaccctgcttggactggggtggcctctgctacccaggggtctggcacgggggagggctggggctttctctgcctggtacacacggaaaggcggctgtgcggacgcagggtcaccgtgctccgggttttctgacagtcggtgtttcctgggcctttggagtggctgcgaggcctgaacgccttgtggatccgctgtgtccagcccggctgagcatcgccagggctagctcatgctgctcttgtcagcctctggttctcctcgagtccttggggacgtggcagatgccagcgaccatcatacaacgt

SEQ ID NO: 322197 - DNA, 576 bp, Homo Sapiens
cggaaaagctcgataattacccagcctaaccatttctcaggtgcttgcgaggtgatcagaaggcaaagatgtcggagcgaaaagtattaaacaaatactacccgccggactttgacccatcaaagatccccaaactcaagctccccaaagaccggcagtacgtggtgcggctgatggcccccttcaacatgaggtgtaagacgtgcggagaatacatctacaaggggaagaaattcaacgctcggaaggagacggtgcagaacgaggtctacctgggcctgcccatcttccgcttttacatcaagtgcacgcgctgcctggcagagatcaccttcaagacagaccctgaaaacacagactataccatggagcatggagccacgcggaatttccaggctgagaagctcctggaggaggaggagaagagggtgcataaggagcgggaggacgaggagctgaacaaccccatgaaggtgctggagaaccggaccaaggactccaagctggagatggaggtgctggagaacctccaggagctgaaagacctgaaccagcggcaggcgcacgtggacttcg

SEQ ID NO: 322198 - DNA, 1175 bp, Homo Sapiens
  misc_feature (236)..(452): n is a, c, g, or t
  misc_feature (454)..(466): n is a, c, g, or t
tggtaccggtccggaattttcgggatatcgtcgacccacgcgtccgctgcttcttaggagtgggttgagctgatagagaaaaaacggccttcagcccaggctgggaagcgccttctccaggtgcctctccctcaccagctctgcacccctctggggagccttccccaccttagctgtctcctgccccagggagggatggaggagataatttgcttatattaaaaacaaaaaatggnnnnnnnnnnnnnnnnnnnnnnnnnnnnnnnnnnnnnnnnnnnnnnnnnnnnnnnnnnnnnnnnnnnnnnnnnnnnnnnnnnnnnnnnnnnnnnnnnnnnnnnnnnnnnnnnnnnnnnnnnnnnnnnnnnnnnnnnnnnnnnnnnnnnnnnnnnnnnnnnnnnnnnnnnnnnnnnnnnnnnnnnnnnnnnnnnnnnnnnnnnnnnnnnnnnnnnnnncnnnnnnnnnnnnnggcaaggtgaatatctataaaagagggtcctaaaaagtccccgggctagagaggactaaggaaaacagagagagtgttacgcaggagcaagccttcagttaccatgggatggggaagggggcgcggtatgcccgggaaagggccgggccgggaggtcaggggggtgtcagccaaaacacgtggcgggtgtccctctgacacgcaggccatcgcacggagtaggcgctgacactggaattcataacggggttgacagggctattcacatgggaaggacacggggcggagcccaggaggcctttggtccttgggggggacaacgcaataccctgaggtaggcaccaggggagagcctgggcagatggggccacagaacggcacgccgaacgcacatctcacccacagaaggcacaccgggcacaaactctgtgcaaagaacgggaaacccagggccggggagttccccacccgagagtaaaggaacaccagagaaaagggacaaagggacacagccacaaggcgaaaagaaagatagggcagcaagccgcgaagagacgaacaacagcaacgcaaagcggggcgggacaaacaccagcgggagcagcgccagtgtaagcgccacagaaataaaagaacgacactcgcaacagcatcgaacacaggcaggcaaaaatagatccgccgtgttcgaagtagagcgagagacgaa

SEQ ID NO: 322199 - DNA, 1854 bp, Homo Sapiens
  misc_feature (134)..(134): n is a, c, g, or t
  misc_feature (162)..(162): n is a, c, g, or t
  misc_feature (165)..(165): n is a, c, g, or t
  misc_feature (187)..(187): n is a, c, g, or t
  misc_feature (287)..(287): n is a, c, g, or t
  misc_feature (311)..(311): n is a, c, g, or t
  misc_feature (704)..(704): n is a, c, g, or t
cacgcgcctccgccctacgctatcagaggtcgcggtacatgataggcacttaggtcgtcgtggctccgcgctcatgcttctcgtgtcccatcctctgccggggccgcgacgacccgaccaccgtgtcgcatcgngcactgcgtgtgtgcagccgacgacctngcnacacaagcgggacaacttgtgnccaacgttgcaggtccctctctgcacgttcgggccggggggagtagtgggtgtatcctcctcccccgcgggtcatttaagacccgtgaggctcctgttcntaggatacgcgcccggcagctcgncgcgcatcaggtacgctgatactacctctccaaggacgaagagagtgggccgcaaccaaaaaccatagtgtagtgttaccccactacgtccttcgcacgccgccgcgttcgtgcgtcatatattccctgatcgccagaagtcgcacgagagcgacttatcttgtcggcgtcgcgccccggtgccgggatctactggctccggtcctggacggcgaggcctacctcaacttagctggtgcactcgtgactgttctgcacccccgatcacgtctaagtcggtgcgcgggccagcgcgcggggcaacacagcgagcgatagcgcgcaccaccccgccgggtgccgtagtagtcaccatctggaggcggcggctcttgtatgagccgcgagcctatncctgctctatatacgaagggcgcgggggcccatgcccgcgcgctcacacggagcacaattgacttttgggtgcggcgcgcagaggcgggagacagcggccgcccaccgcgcgacacggcgcgggccactaagggggtgagggtgccccgcttctacggaccagggaataatctcgggggaggggcccaccccacgcgggcaggcctcgcggcgtcgggtggggggtttctgcgcacgtccccggggatcccaaaataaacggcggtgggggtggtatagaagcgcccaatggcgcgacccggcgtttacgcgcgcggtttgtcgtttttccaagttattattattctttttttatgttagcttagccatcatgcaaaatttactggtgaagcagttgataaaacacacatcccattgaagggttttgtacatttcagtccttacaaataacaaagcaatgataaacccggcacggtcctgagaggaaattcctttgcttcttaaagctgccagtcccggctttttgggggctcatgtgttataaattctggaagctcttttagctgcagtttgagcatcaggcaaatcttcttcctcttcctcggttcgcttgtgttttaaaaacaagtcagactttaagaagcggctgtagctgtcgtacttcatgagattaaagatctggtcctggagtttctggaacatcagagggtgcggttcttccaggatcttctcgttgagccgagactgcccctccacgttgacctgtgatgaggccttgctggacagaaaggtcatgtagatctcctttgccttttcctgcatctgcgtcttatcttgcattttcttagaatcttcacatgctagccaaaacacaacattttcttcactgaattccttttttaaaaattccctaaatcttttcacgccttctgggtcttccagcagattctccagggatgccgcccatttggctgtgctcttgaggctctggtggctgctgctggaactgccatcgctgtcgtggatgtctgacggcggccgcttcctgctcagccggctcacggcgcggttgaacatcgccgcgggcgcccgaggaggaagaaggagcagcccggcggcgcggcggctgagccggaggaaggcgaggagt

SEQ ID NO: 322200 - DNA, 600 bp, Homo Sapiens
  misc_feature (12)..(12): n is a, c, g, or t
  misc_feature (45)..(62): n is a, c, g, or t
  misc_feature (209)..(231): n is a, c, g, or t
taatgtagatgnaaattagcaaggatgctgcctttggtctctggnnnnnnnnnnnnnnnnnngcatatgttttgtaagcaacaaatttttttgtataaaagtcccgtgtctctcgctatttctgctgctgttcctagactgagcattgcatttcttgatcaaccagatgattaaacgttgtattaaaaagaccccgtgtaaacctgagnnnnnnnnnnnnnnnnnnnnnnnggaagccactgcacacagacagaacggggacaggcggcgggtcttttgtttttttgatgttgggggttctcttggttttgtcatgtggaaagtgatgcgtgggcgttccctgatgaaggcaccttggggcttccctgccgcatcctctcccctcaggaaggggactgacctgggcttgggggaagggacgtcagcaaggtggctctgaccctcccaggtgactctgccaagcagctgtggcccccagggctaccctacacaacgccctccccaggcccccctaagctgctctcccttggaacctgcacagctctctgaaatggggcattttgttgggaccagtgacccctggcatggggaccacaccct

SEQ ID NO: 322201 - DNA, 739 bp, Homo Sapiens
aattctaattttaggatttagaaacagcttttggttatatcttgaaagcgtaattgaaaatctgcccagctccctctagctgcaacctgaacatcaagcccaatattgttgtaaacatttacgaaaatactaaacccaacagaatacacaattagctagtcagaggcctcactttacattttcacacggatgagaaatctccccactcagtcttgctagatgctaggatacccactctgagatttgagtttgggaacagccattaagcctcctccttaattgcggttcataatgacgtacgaagtcaccaaaaataaacagtggagctgccaccatttttcctacactgagtctacccaatgtgccccgggttgtttgtttttcctggctggccccagagcaagaagagatgactgctggtaaagagccagggcctggtttactaccaggcctcttttcagataacattcaagctattcttccactccccagaggaagggggagatgataatgatatgacactattgctagggagttttcataactccttaatagccaatggaaacctctactttaaagcagctgttatgccctcagagaggtttggtgctttagtgctagataaccttacctttgaggttacaagaaatcaccttaacatcttaaacctaccccagaactgaatgtcaaatcgacgcgtggtcgacgatatcccgaattccggccgtaccagcctgct

SEQ ID NO: 322202 - DNA, 1311 bp, Homo Sapiens
  misc_feature (74)..(75): n is a, c, g, or t
  misc_feature (86)..(86): n is a, c, g, or t
  misc_feature (90)..(90): n is a, c, g, or t
  misc_feature (137)..(137): n is a, c, g, or t
  misc_feature (526)..(527): n is a, c, g, or t
  misc_feature (588)..(588): n is a, c, g, or t
ttatgaaaatagtgcaattatatcaaatgaggttatcatttaagagggcaaatactctatagatttggattgtnncatcccaattncctnggcattcaataatataagtatctttagcggcgtcttcttcatcttcngatttcttcacaataaatttagcctttgctatttgttcagcaaaatgtatcgcggtttgcgtatggagtgtaactggtcctgtttttattctggaaactccattggctaatgccatgaaaacaatcagctggtcttgcagatactcatccacagtaccaccatgtctaagatttgctaatagcatttcggcagcttcaattccaactttgtctgcatttacacctcgtttaccaagcgatgatccagcaaacaaacagccagtggaggtctcagcaataattattattccatttccattgccaaatgcttggtctttaggttcttgaacaggctggatgttaacatacaaatcccggatctcctttctgatgcatctaactgctgccgnnctgccaatatcttttgcttactttaaaatggcaaaacaccagcaaacgaaaagctcttccnatatatcttagtcacacagccacgctccagttaaatttatagggttcaattgtttaactggtgacattcgaacaatcacttccaccaccccccttttgggtaatatccccttgttttaatgtcacaattaaatatgaaaccaaatttttcaacaattggcttgaagaccatcactgtataatcgatctgtggtgccatttcagcattagttccacctttcaaatgaagttctgatggagaagcagcaaagagaacacacggcattgagacctgcatcaagaggcacacactccctgctgtcttggtatctgctgtgtggattccacctttgatcttctctggtgtaaaggttatttctgttgagccaatttctgccccctccagttgcccatcacacaaatctcgaatcatttccagtccagataaatgttgaggcctcaggcctggcgtgctccggccggctcggatcttctgcacccgcaaggggaggcctaggagacagctcaaggccgtagagactctcaggatctggccgcccccttccatgatgctgccatcgacctccacccgcggccccgccatgggggacaccctggggcccagcccgcagcgacaaagcctccgccagagcgggagaaagaagagacgttggctcccgcccagtagttcagaaaccttggttcatgcctggggcgcaggagcctgacgagaaagcggaagaag

SEQ ID NO: 322203 - DNA, 484 bp, Homo Sapiens
aggattcccttataaagaaagtgcaatgtctgaggaaatttcaactgtgaaaactacaacatatttactaaaatgcatgaattttcttgtttttggaattattcctggactattcagtagccactcagatgccactgtgtgaaagggccataaatgttgcctgctgcttgaacatctatttttttctcttccagtgcttgataactctgggagataatacactgcagtcgtactagtggttaagatatttgggaataaaattaatactttttgactagaagcgtctaaggataaaccaacagaaattgaatctggatacatctttaagatgtaatcagaaatgaccagatgactctagttagaatttttgaaggagggattacattaatatttcaaaacccttactctgtagataagtgtattttaattttttcccctcgtatacttttatttacctggggaaggagcttttaaggttgggggg

SEQ ID NO: 322204 - DNA, 521 bp, Homo Sapiens
gccaggcggaaagccccacgtggggcctcgtgcagcggcacttgctcatttgaggattgcggctgcaggtccatggggggccggccagatgcctgctgctgcagccgacacattgactctacctgcctggccacagctaaaatctgttccttccggagaagcctgtccctctcggcaccatgcggccgtgggtcatcaggtgacttctcagcaccgaagacgcaggagtacagcactcggcaaaggcccgtgtcctcagtattcggggccctcaaggtgtgaatgaggaaggcgtggactatggctccagggtgggtggtcactgcctccgtaactttgaggcgcaaggcacttcgggggttgtagtttcttactccggtcagccaggcctaaatggggcaccccgccctgaatgtgttgcccctgcagctccggtccgctgtcgtcgaggcgtcgcctcagccttccgtccgggcccgcggactgccaccaagcgctcccctccgtggcaggagagcaaa

SEQ ID NO: 322205 - DNA, 893 bp, Homo Sapiens
  misc_feature (102)..(102): n is a, c, g, or t
actcatccatcaacacaaacatgccatagcctctgctgacccttcccctccttctgaaatgcgaacgcccactgcaattgtgcctttaactacaggttaagnacgggttaagagaaagctgccagagattccagggactggccagaaaagaagcatcgccacaggacccactaggttttaggtgaaccctggctaccctggagtcccatctgaggaaaagtttcacttgaacaatagaagcttgaatccctggatcattcggtttagaaacaggctagacaagagagaaaaagaggccctcgttggagttggctccatctttccttagctcacataaaagcagggatccagttagcgtaatgcactgtttggcttatttttggtgtgcaattataccaatagtacatctgatatttagaatgacaaaaatagggtatcgttgaaatttaaagtgacaatgagcacacttaacagtggtctgtggtatctgaggaaactttagatgaacagaaagccactgttttatgagtccaccccagtaagctgttacaacccaactaactaccttttcatgtttgttttgtgtgttgaatagaggtttgtgagcatcagaacgtcttataggttaaaaacaatcaaaaaccattttgaggaagtggcgtctccacaaacactgtacacccagacaacgcggcatttgtgttacactagcacccgactgtgtgccaacactaatgtaatcggcacaactggggtgtggttccttcccagttaaaagagctatattacagaatggatcactgttgcagaccagtcaacacaatattcaagtaacaaggtgtttaaatggataagtgaaaaaaattttacctaacacttcacacatctacata

SEQ ID NO: 322206 - DNA, 534 bp, Homo Sapiens
catcagagggtccacatgggagagaaaacatggaagtgtagggagtgtgaatatgtgcctttaagtcaggcctcaaagccttcgacttcatccagaatgttccatgttggagaaaaacctttagtgatgtgatggtgccaataaagtcttcactcagtcttcatgaatgcagtctcatcattagattagcaaaacttaactcctcgaagactgtgtcttctcgcttgttccctttccaataacactcctgttatcattggaggcgtttagacttcagaaattcctgtctattcagtattttctgtcctggaccagggagagagaaggacgactctcaggataacagttcacattccccactaggcaggcgctcgtggctttgggattcgttcccagtgggcacctcggagtggcaacgcttccccctgaagaatgagattttgagcgtttttccttcagcattcggaggagtgtaatccaaatgctctgtggagtcgtacacactggctccaggagggggatacaagcaattct

SEQ ID NO: 322207 - DNA, 243 bp, Homo Sapiens
ggacatgcctttaatgcagccttgaacaggaattggccaagccttgccaacttgataaggagcaaaaaaggctctaaaggatgtatggctccccagatttctggagggcatccaaatgaatgagaacagggctgcaggtagtcacctgcagcatcctcctgggcacgatgacagagggaagtgtctctaccaagatccatcatgggggacaggttcccatagccccggacacacaacctaccc

SEQ ID NO: 322208 - DNA, 638 bp, Homo Sapiens
ataaaggcttcagagccctgattatatcaccaacacgagaacttgccagccagattcacagagagttaataaaaatttctgagggaacaggattcagaatacacatgatccacaaagcagcagtggcagccaagaaatttggacctaaatcatctaaaaagtttgatattcttgtgactactccaaatcgactaatctatttattaaagcaagatccccccggaatcgacctagcaagtgttgagtggcttgtagtagacgaatcagataaactgtttgaagatggcaaaactgggtttcagagaccagctggcttccattttcctgggcctgcacatcccacaaggttccgaagagctatgttcagtgcaacttttgcatatgatgttgaacagtggtgcaaactcaacctggacaatgtcatcagtgtgtccattggagcaaggaattctgcagtagaaactgtagaacaagagcttctctttgttggatctgagaccggaaaacttctggccgtgagagaacttgttaaaaagggtttcaatccacctgttcttgtttttgttcagtccattgaaagggctaaagaactttttcatgagctcatatatgaaggtattaatgtggatgttattcat

SEQ ID NO: 322209 - DNA, 1020 bp, Homo Sapiens
  misc_feature (224)..(234): n is a, c, g, or t
caagaggaaagtttttatttccccccgtgggtaaaacgccactttaaaaaagttcccccttcaccaagaattgtgggtcgcacaccccaactttgtcccccgttaaatttcccagttactcccggagagggctaaaggccggggaggaattttgtgaaggtcccaggagtttccaagacccagcctgggccaaacatggcaagggcccttcttttttccagggnnnnnnnnnnnggccacctacaaattggaaactgacttgatagtttaggatcatttatcaccagtccccatgtactggtagttgatttcaaatgttttgtacagggggagtttttctttctttcatatcacaaaaaaacctccggggcatgctgggatcataaaattacatttctgggacagtatttttaaagtctgtttttaacttttgtcttcaagagctactttcttcttgctgttctgaccagtgacctttttctgtttatccttagctttttctaagaaacattttggagttgtcctaatgctctccctttccaatggtttcttaatcatctttttcttttgtttgcttagtagtttctgaaaaccttttatgtattctggtacaggacacccagcctgctgtataacattagcaacgcttcttaataatggcttatcatcctcagtgaaaaatgtaattgcttttcccttattccctgctcttccagttcgacctatcctgtggatatattccactgagctagttggaaagtcatagttgatcaccaagttcacacctttaaaatcaatccctcttgctagcaaggctgtacaaatcagaacccagatttttcctgctctgaaactgtggactgtgttatctctctgttgttgtgttctctctgcatgaataacatccacattaataccttcatatatgagctcatgaaaaagttctttagccctttcaatggactgaacaaaacacaagaacaggtcctcgtgccgaattcgccacccaggcctcgctcc

SEQ ID NO: 322210 - DNA, 595 bp, Homo Sapiens
  misc_feature (169)..(203): n is a, c, g, or t
  misc_feature (316)..(369): n is a, c, g, or t
tacacattatcttctgtagggatagctatcgtacatgaagaaacaaagatgtgatcactctattgcacacccagaaacattagagaatctggtcttagaatgatctagtcatcttcttcctctccatcgtcttcagcatctcgtttcctcttctcccctcgaagacctnnnnnnnnnnnnnnnnnnnnnnnnnnnnnnnnnnnaacatagtcatcatcatcttcttcatcctgaatttcttctttcattaagtatgagaggcccacttcctcttctccctctcccaactctgaacctgcttcatcttcatcttcannnnnnnnnnnnnnnnnnnnnnnnnnnnnnnnnnnnnnnnnnnnnnnnnnnnnnggtggaccagcttcattttcctcttcctcttcatcatcttcatctccatcctcatcatcctcctcttcagagtccggcgcttcattatcctcctgatcaaatccatctaagtatgtgatttgctgcagtagttcaaaaatactttctctataatcttccaggtttgtgatctcacagttaaacaggtcaagacttttcaaatttttaagattttgcagagcttccc

SEQ ID NO: 322211 - DNA, 533 bp, Homo Sapiens
gactctgtatacatcggcatggacggcatccacgcgcacagcatagatcttggtgctggcatccagagtacccgcagccactttaaagttggttggttcggtgtctttctgtttaagaatctctgacataaaatcaatcaagtgcaaaccaaaagcattcttggtagtgattttattttcagtggacagtttgatacaggtggagtaatgttccgtaatctgcgtgtttgtaaacttggggatagtagctgaaatgtcaatactcctgctggagggggaggccaataagcgaggtgagtcagtgctgaactgcagatcaaagaccctcgagcgcctccgctgcagccgctccttctcatcgtcattctgaggaaagtcttcgaggactggggtgccaggaatattgagaggcgccttcctgggcaggggcatcgggaacacacgctctgaaggagaggaggcactgtgggggtgtcctcgcgtctctgggccgggaggtcccatctttccttggcgtctcctgagctggttat

SEQ ID NO: 322212 - DNA, 572 bp, Homo Sapiens
  misc_feature (318)..(330): n is a, c, g, or t
ttaaattatatccctggaactgcagcgagcccacacgttctcacgtagtcatggtgatgcaggcaggtctgaaaccaaatcagcaagaggaaaggaggaatatactgttctttgggcctcactgggggaaactgaaaaacagccttctaaggggaaatcaggtggctctagggctcggggaattgcctttttatatttttaagagcaaaacagagatgaagaagagtatttcatttataagcttatttccacccagtaactcagagacagagctaaggaagagtgggcccccatctaacaaatggaaaggcagagacnnnnnnnnnnnnnggcagcagcagcaaaggcaagttagaggctttcccggcttggccactgcgctaggagggagcacaggacgcaatggtgatgcacaggattatccatccagtcgccagcatgcctcatcagagatgctcccagccagggtgaacttggtttccaccagaaacatacacgttagaaataagggaaggaaacgtggcaccagtataatttctgggtcctcgcaatgcagcatcctctttcgcctg

SEQ ID NO: 322213 - DNA, 525 bp, Homo Sapiens
gatgatgggacttgtccaagttagaagcttcatgacctagggcaaatcacttaacccttgcaatcatgccaagttgagagcattttcctaaatgctgtggctcagagatggctgtgtgctcgtggttcctcctgtttctccctaaccctcttccacatgggttttttactgcccgatcagggtttggggaatgattggcagcccggaggccagccagcccttttggcaatccagtcaaatctgcccactggctgatgaaacatggactcccttggcagcgagtacttcctcaagagatatcttgcttaaaattgatggcccccctttggctttgctattccccatgcccttggtggggcagagagttagttccatcccaagttcttctccatttgccagagtccaccttcaccccagcccagagctgtttgctctggcttgccctatcctgcgttggctcctttcactctctgcaaacccttctgtccttcccgttgtctgagctgcctttttcttgactactac

SEQ ID NO: 322214 - DNA, 983 bp, Homo Sapiens
  misc_feature (58)..(58): n is a, c, g, or t
  misc_feature (66)..(66): n is a, c, g, or t
  misc_feature (158)..(158): n is a, c, g, or t
cctagaatggacatccaggtgtttccccacagggatgaatgaattaattcaagtaacnggaaagcntcccttccacatgttttaggttgggacctccatcacagcagtgccatcccgagcccatagcttccagagagacgaatccatgctcctccaantgtcgcactgtaatcctcccatgaagacttggtcactcccagaaccatctctctggcggagatgtttatattgctccacaatgaagtcctctgactctttggaaatctttggtttaaactgtcttgcaaagagaagatatcttctgatatcatcgagtgaatagacacgatcaattgattcctcaattcttgaatgcaaatctactatgcgcctggcaatggcataatctgtaacctcattacattcatccacaaggataaagaagagatggaatcgggacatgatgggagctgacaaatttatattctgtttcaatgattttgatctgtcatagtgtccactgattgggtttgctgctgccaaaatggacgtccgggcgttcagagtagccttcactcctgctttagtgatggatatggtctgctgttccatagcttcatgaatagcaacttgatcccgcacgtccatcttatcaaattcatcaatacaacacacaccattatcagccaacatcaaagctccagcctcaatgacaaactcatgagattcttcatctctcacaacagctgctgttaagccagcagcactggacgctttaccactggtgtagacagctctggggctgaactcctccacgtgcttgagaaattggctcttagctgtacttgggtcaccaacaatgcaaacatttatgtcccctcgaagagaggtcccttctcctgttgtctttggaacgccaccaaagagcatcagcaggacaccccgttttacttcatcattgccatgtatagtagggaacaggctggtacaaagattgtggtata

SEQ ID NO: 322215 - DNA, 1476 bp, Homo Sapiens
cagaagagaactcaaataactctttcgacatgtagtgaggcagagtctacgaagtaccctgaagcagttgggtgccgtgaatcctggtggtgcttcagccaatgatggcagcagggctggccaccgtggaaggcaagtgactgagggcttcctaactcaagtctctgtcccacaagacttctcagttgaccttcagagcagcggagtcacggctagagagaatcctccagaccatctcaggctcgcactacctggcagtctttcaaatgcccttagagcacggtcttcagaacaatctctttgctcaatgaagtattctgaacaaataatacattggagctcattctctagcacatcattcatgtggctaagaacttcttccttctgtgcttgcatcttctccttctcttcctcctgcagagcctgggccagctgttgcttcaggtccttttctccttgggctatctccaaaccctgaagatgctgttcttcttcctgggaaagttttctttagttgctccacttttgcctgctgctgagcctgctctgcacacagctgggactgtaagtcctgaagttccctgctccatttgcacaactttctttgagttccccttttgggtctgttttttcacattcataacggcttcatgtttttcctgcatctgtattttgagcctcagaatcctggacatggtcaccttaaacatctgtaagcttctctgagatgctgaagagtttgaggctttctgctcatgatgaacctctgtgactttggggaagccagggtaaatgggagcccctgtggtcttacttggctcaagggcagtcaacttaggatccaaattgtcagagggtgtactggccacttcacctttcccctgtgatttcactggctgaccagattcacaagacactttatttattttggatttcaaatttgaggggccttcagctccaggacctgctaattcatccaaactgaatttccttttagttctcaattccttatttttttctatcatttggtcattctttggggaaagacaaggatatattgtctcccagtcttcttcagtaacttcatattcatactccgcattctccttattttccagaggcactccaagttggatgtagtctccctgatgaatggaatagacccttaaaggttccagacgcgctctgttcagccaaacaccatttagactcttgttgtccataattgtccattggccctcaggattctgcttcaaaacacagtggtttcgagaaatcatcagggggcagatttttgataccagttggtatgtgacaccaaatcctcgtcctacagtcacctcgcacccatcttccagcagcagccacccggcgctcatccccacccgccgcaggcaccagctccggccaccggcgcggtctcctgtgacgaagaagccgggcctcgtgccgaattcgccacccaggcctcgctac

SEQ ID NO: 322216 - DNA, 574 bp, Homo Sapiens
  misc_feature (17)..(17): n is a, c, g, or t
cgaagtaccctgaagcnagttgggtgccgtgaaatcctggtggtgcttccagcccaatgcatggcagcagggctggccaccggtggaaggcaagtgactgagggcttcctaacctcaagtctctgtccccacaagacttctcagttgaccttcagagcagcggagtcacggctagagagaatcctccagaccatctcaggctcgcactacctggcagtctttcaaatgcccttagagcacggtcttcagaacaatctctttgcttttcgttccctaatgagaacaattcgtcgttctttaacttctgagctcagattatttaccatcttattaatgcaattgtccagaaccaaagagtatgttttggacttaatgtccttccgacaaatggggcattctatcttccgcttcatccattcattgatacagtaggagcagaaactgtgggcacagttcaaggtgacagcctcaatgaagtattctgaacaaataatacattggagctcattctctagcacatcattcatgtggctaagaacttcttccttctgtgcttgcatccctgtgccgaaat

SEQ ID NO: 322217 - DNA, 772 bp, Homo Sapiens
caacctgcccataaaaagaaaaatactctacatttgagcctgctgcagttttaaattttccctctgggtcaagtttgccagcttttggctacagagaaattatatttccattacagtgcaggtagaaactctgtaaccttaagcatgtaaactacatagaataaaactgtttccactgcatttctgtccttcaaagtggccaacctgattaagtcagccttaatcactgctgctgtcagtttcacgactaaaggtcatattgactaagtagtcatcagctgaccacctcgctgtatcagccagcaacgaggggaaggtgaagaaacatgataggccatatagaatctgccctatgtttacttttttaacccagataattatttttgtgtgcagtatctaagctcctgattgtgtaacctgggacttctggcaccttttgttccattcattttatgtataaaatgcatgccaaagcacactgtgccctctggtacccttgcttccaatcgccaaccatgctcatttccttcctttttttgtggtccctttttgtggtgatcattttaaaccacgtcatccaacaaatgttttatggtcaaccttagcttgttcataagccatagcaactgaaagattaaactcttaaatatgtgtctgggcagtggctattaaatagcaaaaaacaatcagattttagtattttattatttccttgtaaaatggctgaactaaattaaacccttgtttcccatttgttctataatttataggg

SEQ ID NO: 322218 - DNA, 898 bp, Homo Sapiens
  misc_feature (40)..(40): n is a, c, g, or t
  misc_feature (64)..(64): n is a, c, g, or t
  misc_feature (228)..(228): n is a, c, g, or t
  misc_feature (286)..(286): n is a, c, g, or t
  misc_feature (433)..(433): n is a, c, g, or t
ccactggggaaaaagggcccccgaatcttcccatgttgtncaatgcccgaaggtccccgcggcntaatccctcacctaggtgaactttaatggaaaaaggcaggctgcaatcccaggggttaagggcacaaaagcccagccctgtggtgctctctgatctcaaatgtccactagagacgagggggtggaggcccaaagacctggaatgatttgcccaaatcacagcanaaatcctcagcacagggcccattggctcggcctccagccaggcagcctccttcccggntccagggagcagcagtgctggcttaggggaaggagaccgctgtgcagggctaaatgggacgtgtgttggggggcccggaggacgcccagtttcctttccttccctttagtgagggagcacagcccagacaccagcgcggaactcccntgaggggtctgtggcctcctctggctgtggggagggaggggttagctgcacaccaggcagggtgggggctaacaaagccttggtggagaccagtaggaggaaaaacaaggaaggggcaggtcagggagtggggagtcaggcagaagggaagccactctcacatgcaccgatcagcctcccacagcccgacatgggcaggcttcccccaagggtcccggtccacagtggccatggagaccaacagacagggatgtgcacagacactggcatggcagccatacgcacacccctcacctcccatccagacctagtgttgcaaacacaagcgtgtgtaaactcagttaggaggtctgcacagtagagagcaggcggacggccccactccccaacggtggaccacctggtactctcttccatcccccactacccctcatttagatcatgacatcagagaatcaggttaaa

SEQ ID NO: 322219 - DNA, 240 bp, Homo Sapiens
ctcttagtgcttacaaggaaagctgtcagtcttcataaactttcaaagagttacaaaaatacgtattttttaagctacaattcaagattagcatccaaacctacaaacatgatgtacattcgtcacacaccatacaaccttcacacctggctacagcaatgttgacttacatcaccattgtttatacttgtgaaaactttattgtgcacagtgacatccattccgccagacttaatgtta

SEQ ID NO: 322220 - DNA, 915 bp, Homo Sapiens
ccttccgtatttgtccttcctggattttgtgggcaaagccgccctacaagcttagaccttcgacataggtgtcgttctctgaaggccgtgtgactgctggagcagaagcacaaagagtgtctcgggtggacttcttgccatgcgtgaccacgcccgtgatggctttcttgcagcaagaaaacagcgagccgccccgctcgtggtagtgcacctcacagtaggctgctctcgtgctcgaagaagctgccgttcacgaatgggcgtgaagcattgcccgcacacaaagcactcaggatgccacagcgtgttgagggccttgagatatagttctccaggatggcccgggcgcagccgccacacttgggtgcgaacatgtcgaagtagtccttgcgacagtaggccttgccgtccttctcgtggaacccttcgggaccaaagaaggctccacactgtgcacagaagaagtgttcagggtgccacgtccggtcaagggctgtcaccactttatccaggatggggccgttgcagtagtagcagcgcggggagaagaggttgtggtagtccttttcacagtagggctgtccatcccgctcgaagaagttccgggatccgatctcctcctggcagtgggtgcagacgaagtgctcggggtgccacgtcttccccatggcggtcacaacctgcccggcgatgggcttcttgcaggccccgcagactcctttggcgactgtggcgacccccagcttgttcaggtcagactgcaggctccccagcatgctgtccagctggctcccgggcttcgggggccccccagggggtgagctgctccctgtctctccctgggccatgaacttgaaatccgacagcgtagcccgacgcgtggtcgacgatatcccgtaattccgagccggtaca

SEQ ID NO: 322221 - DNA, 542 bp, Homo Sapiens
aaaaaaggtgttaaatacatgtaagttttgaggaggttatttaaaagtgtaggatataaaccaagaatttttcacaccccaaaaccccgcacaaattaagggattacatatctgagtgacaagtacatacaaacgcattacttctagagatacttagatgtagataaaagaccacatttcaatagaaggatcacacagaccagtgggatgtttcttctgagataacccactttatgcaggaaacagtgtggactctggggacggcctctgctctggctgaggatttctgtcccagagcggtacaggaatctgcgtagtgttttagtttggagaaaacaggaagttacactcatcacatcttttgcccagatgatagaattcgaaattcccccggggttgttcatggaatgagccgctctgttatgttgtgagccgtggtattaatcagccacccctcactaggtgttggggttccaccacgcttcctccaccccccgtcaccacagcagcgggtagtatttaggttgaatattccaaatagt

SEQ ID NO: 322222 - DNA, 1323 bp, Homo Sapiens
  misc_feature (1055)..(1055): n is a, c, g, or t
tacccctctatcctccccttatgttcccgttccaccgcatcctttccgctttcgtgtcccctacgacctcctgctctggcgacttccgcacgacggctggtcgcatccggggcagcggagcacggcggtcgagacggccctggcagaggtcgggcccctcggggccgcgtggtcaatcagatcccccctgagatcctgaagaaccctcagctgcaggcagcaatccgggtcctgccttccaactacaactttgagatccccaagaccatctggaggatccaacacgcccaggccaagcaaggtggtcttgcaaatgccggaaggcctcctcctctttgcctgtaccattgtggatatcttggaaaggttcacggaggccgcagtgatggtgatgggtgacgtgacctacggggcttgctgtgtggatgacttcacagcgagggtcctgggagctgacttcttggtgcccctacggccacagttgcctgattcccatggacacctcggccaagacttccggttgctgtacgtctttgtggacatccggatagacactacacacctcctggactctctccgcctcacctttcccccagccactgcccttgccctggtcagcaccattcagtttgtgtcgaccttgcaggcagcgcccaggagctgaaagccgagtatcgtgtgagtgtcccacagtgcaagcccctgtcccctggagagatcctgggctgcacatccccccgactgtccaaagaggtggaggccgttgtgtatcttggagatggccgcttccatctggagtctgtcatgattgccaaccccaatgttcccgcttaccggtatgacccatataagcaaagtccctatccagagaacactatgaccaccagcgcatgcaggctgctcgccaagaagccatagccactgcccgctcagctaagtcctggggccttattctgggcactttgggccgccagggcagttcctaagatcctggagcacctggaatctcgactccgagccttgggcctttccttttgtgaggctgctgctctctngagatcttccccagcaagcttagcctacttcccgaggtggatgtgtgggtgcaggtggcatgtccacgtctctccattgactggggcacagccttccccaagccgctgctgacaccctatgaggcggccgtggctctgagggacatttcctggcagcagccctacccgatggacttctacgctggcagctccttggggccctggacggtgaaccacggccaggaccgccgtccccacgccccgggccggcccgcgcgggggaaggtgc

SEQ ID NO: 322223 - DNA, 1162 bp, Homo Sapiens
  misc_feature (62)..(62): n is a, c, g, or t
  misc_feature (64)..(90): n is a, c, g, or t
cggcgccaaaacggaattggtttaggaaaagcttcttcgaggggccgagggcggcccgacangnnnnnnnnnnnnnnnnnnnnnnnnnnnttccaaaatcacccctttattatgtggcagtcaccatggtgccagcctctgccttccccatgtcaccttcctaatccagggctctccaaccatattcatgtttgcgttttcacaagtcaatgtccattaaggccttgtgctccccttttcttcagtacagggcagggcccttataatttgggtctcaagaattgatagttgtctcttaactggttctggtgaggcgcactcacagcagtgagtggagggtcctgggagggcatggatgacggaggctgcccctagaggagctggatgtaggagcagagacatttcttgatctttcactctgcaaactggtccaagaacttgaggtaggcctgacgctggggtgcagctgctggaatgaagtggccaccagagtgggtgagggtgatggctccgggaaattggctggccagttgcacactctcctgagaggggatgactttgtcagtgtccccaaaaacatggagcgaaggcaatgacaagggcctttgcaggatggattccttgaacccaatgccccggggacagaaaccagacaccaagaggataaaccgtggcaaggggaagcggggatcgcctgcctggcccagggcacacacaagggctgctagcgcagccccttggctgaaaccaagaaggccgtcaaaaggccccagcctgttcagtgcctgtgccaccatccccagtgattcctccaggcccctgcagacggcgggctcttccaatgcggagaaaacgtcggcctcctgctctgaaaaccaccagcctcgaggctgctcctccggagggcaggacccgaagtctgatctggcgccctcggggcccggggggtcggggaccgggtgcgggccgctgaggcacacgagctcggcgcgaccccgcagcgccttcctcagcgccccggtcttctcacggaagccccgctcgctctgccggaagcccgccaggcacaggacccgcaggggtcgctgcgcggccattatgcccggcaaggagcgacggaagcaccggaagcggtctttccccgagcggaagcacaatgcac

SEQ ID NO: 322224 - DNA, 1063 bp, Homo Sapiens
  misc_feature (57)..(94): n is a, c, g, or t
  misc_feature (792)..(792): n is a, c, g, or t
gggagttccgggtcaggcccttctcccgcctccctcggccttagccatggcgagtannnnnnnnnnnnnnnnnnnnnnnnnnnnnnnnnnnnnnaatctgaatgcggtgcgggagaccatggacgttctgcttgagatttcaagaattttgaatactggcttagatatggaaactctgtctatttgtgtacggctttgtgaacaaggaattaacccagaagctttatcatcggttattaaggagcttcgcaaggctactgaagcactgaaggctgctgaaaatatgacaagctgactttctggagaaattctgatgagatatgtcaagctctgcaagagggttagaagattgcattgtagttgagaatgtacaatgaaattactgcatgcagcagtgtagaaaaattttactttttaaaagaattataaaaccatagctttataaatcagtggaaagtggcttacagagagaactatcagatgtgtttacatcacatcttattcactttttttaacagctctaatgctttggcattgctatgttcatatttatgtattccttatttatagctctgatagctttaattttctaagcagtctgtctatcagatgtgcacatctgctgtgcccaggttgaagtatagtggaacccatcagtagtaatgtgtagtagttatgacttgttgacatttccattataaactttaattttgaattgtttatgcattataactgctggatttatattgtattggggctgaaaagttgacaggatttcagccaccacttgtngaatttttatttagattcattatgtatatcagaatcttgttttttgaaataagagcatggaaaacatttcttgtaatctactcttgaacaaagaatatttagtttttcaaacagtttgttgggcagctaatagtgtgaaccaggtcatttttgtattgagtaaaaaaatcaaactttgagaaacttggattttaaaagtaatgacaatgcttaggttagtattatttgtaatttgaatcatttacatctaatgagaatgttagttgagaat

SEQ ID NO: 322225 - DNA, 456 bp, Homo Sapiens
  misc_feature (20)..(20): n is a, c, g, or t
  misc_feature (58)..(58): n is a, c, g, or t
cagagggaatttttcctttnggattttgtttactgaaaatttgttatacttcaaaagnccataacttgaaaaatactggtggcgtcgatggtgagtgattttatcccacgtgggccttttgctcagttccatggcaattttgtaaattgaccctagccagagaatagatcagtatttcactgataccacgaggaaaagaacaaacaaaacttaaaagtattcatacaccttgctaacctaaaagacagcagggacaagatacatatgaggacaaggtatacacccagttctgaataacttgaagaacaggcttggcaaagaagtaagtttatccaaatcttgaatttctgccaggcatggtagctcatgcctgtaaccctggcacttaagggccaaggcaggaggatcacttgaggccagtgagctgtgatcactccagtgcactcgaacctgggt

SEQ ID NO: 322226 - DNA, 799 bp, Homo Sapiens
ccaggtttcttgggttttccaaggaagttggaaaccccttcccccgggaggggcccccccaaaccagcccctttttccagggcccttgtattcagtagggaaaaggaattatgcattaaattgggagggggtttatcctggggtcaaagggctcaggggagatcattctttttattgccaagggaccaagaaaccaaagtgtagaaatgctatacacaatggtcatgagctacaaggtaggaatggggtgcaggggagacgtggtaacacacagcactattctgaacgaactccagctctccattctaacacttgaaccaaggaaagacagcagtcctttttcactaagcctgcaacagaatgcaaatgtgacttggtttatcagctcccacaggacaggcagcgcaaaaggctattgtaagctggttttgggagcccccagctcaaacagagagtggatgctgaaggtggtccctggccgccactggtggctggtccccggcttgctaggtcctgggcatgtctcgattctcaatgatcagcttgtcagttgaatacagttggccaatgtggacctgtcgacgaattactccaaggtctctcttggctttattcactagggtttgaatttctacaggatcctttacatttttattttctctgaaggcatctcttatcctcctgacagcatatgttctgtaattgtaggcgctgaaacgcttgctctctctcagcatcgcccggtacagagataacacttgtgcgcgactggaggctgccattttggaaaaaaaagccc

SEQ ID NO: 322227 - DNA, 574 bp, Homo Sapiens
  misc_feature (235)..(235): n is a, c, g, or t
  misc_feature (302)..(302): n is a, c, g, or t
  misc_feature (418)..(418): n is a, c, g, or t
gcgcctgacggcttttccggggcccgggagccaaccgagggcgttcctgtcggggctgcagcggcgggagggagcccagtggaggcgccctcccgaagcgccactgcccatgctgaccacccagccctccggctgctgatgtcatgagtaacaccactgtgcccaatgccccccaggccaacagcgactccatggtgggctatgtgttggggcccttcttcctcatcaccctggntcggggtggtggtggctgtggtaatgtatgtacagaagaaaaagcgggtgggaccggctgcgccatncacctgctccccatgtacagctatgacccagctgaggaactgcatgaggctgagcagggagctgctcttcttgacatggggagaccccaaggtggttacatgggctgggcagagtnggttaccagcacaagcggatgccactgctggatgtcaagacgtgacctgacccccttgccccacccttcagagcctgaggtcctggactgcctggggccctgccatctgcttcccctgctgtcacctggctccccctgctgggtgctgggtctcca

SEQ ID NO: 322228 - DNA, 1261 bp, Homo Sapiens
tttaaatagtgtagtcttaatttctttaatataaaacccccccaaatctgatgaaaacaaagttttatataccatataaacaagatttgtcagatttgaaagtgaaagttaaagtaatttacagttagcttttaaccctctcgggacatttagatacatcctgataatccatcttgtattagtgtgtgtcaattttacaatacactggggaaaactcagctattgtatttaacggtacagtttcatttatcaagtgtttcccattaattccattattagtgacagctaacaagtgaccccatcaaatgaagtgaatgacattagactcgtggcagagtaaatcacatctggattgctttctataattcaccagtttgcaggaagtaaacattctttgatttgttcataatatactgaagttacctataacactggtgcagtaacacagctagttcctctgtattgttatggtagaacggattttgtaatataaagttaacaggaaaaaatgctcacacattatgtggtgaaacttatctcacaaaagagcattaaataaaaggatagagggaaaataaaccatgcagaagagacggctttccccatctccacctgtttcccatgggctcactcattgccatacatcacttgccacactatcaagtgactcctttctgctttggtgacagaaggttcaagtggaagatcctctccaagaagttctgattctccaccttcatcacccattcggaagtcgatgtagccctctcctccactgatgacaagcatagacttcaagggcgtctgactaccaggctcctgtgcagatggccctgctttgtcacccgtcagatccgtgccactactgctactttgtgggctgatgacttgacctgggactgccacaaagaatttcacagcatcccggtgcccatggaagcaaagctgtgcatgtgccattgaacaatagggtataaatgtccctggagtcactttatcactgttttcatcaccatatacacggattacacttccaggacgatttccctggtacacctgaggttttatttgccctcagccccagtaaacgtccctggtggaggattacggtttctgtcaatgggatggagataatgacaccatttcctgtccccacccacaaacgattacaagacaccataagagctgtaattctcacaaaagagaagcccagttttccagtacctaacattttgcttacataaggctcaatgtccacatc

SEQ ID NO: 322229 - DNA, 745 bp, Homo Sapiens
  misc_feature (292)..(312): n is a, c, g, or t
ggggccagtgtccaggtcccaggccatgaccctggtgcctgtcctggccaggagcccaggttcgctgtgcgaggacagaggagcagggagcaggcgccccaagccagcagcctttatgcgtcgcccccttgctgcggcggccccgccccgctcccaggctccgtcctcccacgcaccctgcccccggcaccacagccgcggggcactcaggagtcacaccagcttccacccttgtccaagggcccagcagcccctcgtgtatccctggacggctccccagctgccgtgtctnnnnnnnnnnnnnnnnnnnnnccatctgtgaactcctcctggttgaggccataggccaatgtggtgtgcgccaggtctacctcgatggggaagacgtcggcatcccgcagcactgcgtagcagtcgttgtagtacttggacatggtggacacgaggcgctgcagctggaacacgatgtcctggacgtgcttctggtccagcagctccatcttctccagcacatccttgcgcatctgggagaagcgggcgcgcgcctcctggcggcagcgcaggatcaggcggtactcatagttgccggtgctcacccggtaaaggggctcgcctagggcaatgcagctgtattcctcgtcatccatctccttcaccttcaggcagtacgacaggtactcaaacttcacgtccaggtacttcttgatggtgaggcgagtgtccgggatggctttgttgaggtacg

SEQ ID NO: 322230 - DNA, 821 bp, Homo Sapiens
  misc_feature (298)..(331): n is a, c, g, or t
  misc_feature (476)..(537): n is a, c, g, or t
acaagatttttcataatccagtcactctgaggcatctaccgcgggcccaatccaaatggtcatgacctcaaaacttccccaatgagtgcttgtctctgggttggcagctggggccatgtgagcagtgtacaccacagaaccgcactggtctgcgttgagttgaccctgtgttcctggcagcaagagtgcagggccctgagcccccagagatagcaaagaggcctaaaagtttaatgccagaccttaggggcaggatggagcagggctaaaagatgtctctttgggcctgtctgcctgnnnnnnnnnnnnnnnnnnnnnnnnnnnnnnnnnngggtcagttgccatctcaatctaatcatagatgtaagaatgcggaagccagagtaactcactcattaagctacacttgtgtaacagttactgtaaatttcactacagctctgcactgtaatgattgtgactctgggcactgtgtnnnnnnnnnnnnnnnnnnnnnnnnnnnnnnnnnnnnnnnnnnnnnnnnnnnnnnnnnnnnnnggtatattaagggtgacaaagaaattgcaaagtgattttgcaaacatgaagtgtcatatgagttatgtatgttctaattatccctcagaagaccccccgttggaatggaattctcacatcaagtgtctgtgcctcgctgctgaaggataaccccagagtgcaaggtcatctttgttgctgaacagggctggacctgtcgcacttaagcacacttaaaggattctattcttcattcaggtcccccagagaaatggccccttatttcttaaccaattcctagactt

SEQ ID NO: 322231 - DNA, 574 bp, Homo Sapiens
tatcttctgacacaatttgctttttcagaggaccctaaacataactttcaatggcttcacactgagcgcaagccaagtctctctctctaatcatcaatattcttgcgcgcacatctgcacacgatacccaagattgagtgagcaccccgcgcagcacaaagtctcaaggacgcaaccattttccttttcacgtttggatagcttctgttccttatccacagaaacattacaggaaacacagcgaagcaggatgcagttggtgtcctcctggctggccacccagctcagcgagtcgcccagcggccgccggcagccggagcacaggaacaccagcggcctctcctccgcagccgccgcctcctcctccagctgcgccctctccatgtcggccaccgacgcgtcttcgctcatggagctccacatgctcgcccacttctgcaacagctggtggcggctcgagtcttcggagagtctcttgcccaacagcgaggagtcgctgcatttgcccttgtcgccgcactcacagccgccagcgcatcctctgctacacctcagtgaccgaacgcctgccatt

SEQ ID NO: 322232 - DNA, 572 bp, Homo Sapiens
attcacacctgagaacatccagctcctctcaacagcccaacccacaccagcctcagacaccaccatgaccggctcctgctgcggctccaccttgtcctccctgagctacgggggaggctgctgccagccctgctgctgccgcgacccctgctgctgccgccccgtgacctgccagaccaccgtgtgccgccccgtgacctgcgtgccccgctgcacgcgccccatctgcgagccctgccgccgcccggtgtgctgcgacccctgctccctgcaggaaggctgctgccgccccatcacctgctgcccctcgtcgtgcacggctgtggtgtgcaggccctgctgctgggccaccacctgctgccagcctgtgtctgtgcagtccccctgctgccggcctccctgcggccagccgaccccttgcagcaccacctgcaggacctcctcctgctgagaccccacctctcctctcaacgcacgaaacattcccaggtgcacagaagcttgtgcagactcttctaccccttctggatcagatgagagactccacctttgcagcctagctgatcctcaag

SEQ ID NO: 322233 - DNA, 632 bp, Homo Sapiens
ttcggcacaggggacagatgcaccatctttatttcaaaagaaaaagctccctcagattgtgttactaggagtctcttttgtgacatttactgagctttctccccaatcttaccttcctattggctactttttaaataaaaataaacattttaggctaatatgacaaaaatgagataaaatcttaaaaacattgtactagtgtacagttactaaaatgtgcttactacaaaacagtaaaatatttcactctgtaaatcatcactaagtagttattctgtcctgttgattatgagcctccaaaaatgtttaatgcttgaaggatggtttgggaggcagggaatccttttcttaaaacaactttaatgaggcatatgttacatatcataaaacacccatttcaagtgtacatttcagtgattttagtaacttccctcagtggtgtagctgtaactattactcagttttagaacatttttatccctcccaataagatccttcatgctcttttacagttaatcctgttcttacccccggcaaccactaatctactttctctataaatttgccctttctggacagttcaaatcaatggaatcatacaatatgtggtcccttgggtctggcttttttac

SEQ ID NO: 322234 - DNA, 796 bp, Homo Sapiens
gaagaatctaataataccaccacctttacagtaaagacgctgcgaattgacgccttttataataaagacacttatcttgcccaagagctggggagcatttcctgaagacgtagtcatgcagcacgtcagcagctcccagagcagccagcgccatgtccagtggcctggggcctgccccggcgcgggcgaggagcagccagcgtgctcccagccgtccctgcccctcacactgccatcccccagccaccaactacagcagctgatggtccagacccagagtcccacgcagcccagtccggggccggggcaggccttgcagaatgtgcgtgcaggtgcccctggccctgggctgggcctctgcagcagcagccctacaggggacttcgtggatgccagcgtgctggtgaggcagatcagcttgagcccctccagtggtggacactttgtgtttcaggatgggtcagggctcacccagatcgcccagggagcccaggttcagctccagcacccgggtacgcccatcacagtccgagagcggagaccctcccagccccacacacagtcagggggcaccatccaccacctgggaccccagagccctgcagccgcgggtggggccggcctgcagcccctggccagcccaagccacatcaccacggctaacttgccaccgcagatcagcagcatcatccagggccagctggttcagcagcagcaggtgctgcaggggccgccgctgccccggcccctgggcttcgagaggacgcccggcgtggctgctccccggggctggggg

SEQ ID NO: 322235 - DNA, 1649 bp, Homo Sapiens
  misc_feature (55)..(55): n is a, c, g, or t
  misc_feature (1552)..(1552): n is a, c, g, or t
  misc_feature (1593)..(1593): n is a, c, g, or t
  misc_feature (1621)..(1621): n is a, c, g, or t
  misc_feature (1627)..(1627): n is a, c, g, or t
gacattgtagtcttaataattgctaacatgaatttaataattgctaacatgattngattctttagatggccgccaagaacgagtcatgtttgacaaaattacatctcgaatccagaagctttgttatggactcaatatggattttgttgatcctgctcagatcaccatgaaagtaatccaaggcttgtacagtggggtcaccacagtggaactagatactttggctgctgaaacagctgcaaccttgactactaagcaccctgactatgctatcctggcagccaggatcgctgtctctaacttgcacaaagaaacaaagaaagtgttcagtgatgtgatggaagacctctataactacataaatccacataatggcaaacactctcccatggtggccaagtcaacattggatattgttctggccaataaagatcgcctgaattctgctattatctatgaccgagatttctcttacaattacttcggctttaagacgctagagcggtcttatttgttgaagatcaatggaaaagtggctgaaagaccacaacatatgttgatgagagtatctgttgggatccacaaagaagacattgatgcagcaattgaaacatataatcttctttctgagaggtggtttactcatgcttcgccctctctcttcaatgctggtaccaaccgcccacaactttctagctgttttcttctgagtatgaaagatgacagcattgaaggcatttatgacactctaaagcaatgtgcattgatttctaagtctgctggaggaattggtgttgctgtgagttgtattcgggctactggcagctacattgctgggactaatggcaattccaatggccttgtaccgatgctgagagtatataacaacacagctcgatatgtggatcaaggtgggaacaagcgtcctggggcatttgctatttacctggagccttggcatttagacatctttgaattccttgatttaaagaagaacacaggaaaggaagagcagcgtgccagagatcttttctttgctctttggattccggatctcttcatgaaacgagtggagactaatcaggactggtctttgatgtgtccaaatgagtgtcctggtctggatgaggtttggggagaggaatttgagaaactatatgcaagttatgagaaaacaaggtcgtggtccgcaaaagttgtaaaagctcagcagctttggtatgccatcattgagtctcagacggaaacaggcaccccgtatatgctctacaaagattcctgtaatcgaaagagcaaccagcagaacctgggaaccatcaaatgcagcaacctgtgcacagaaatagtggagtacaccagcaaagatgaggttgctgtttgtaatttggcttccctggccctgaatatgtatgtcatatcagaacacacatacgactttaagaagttggctgaagtcactaaagtcgttgtccgaaactttgcataaaattattgatataaactactatcctgtaccagagggcatggcctattcaaattaaacggccatcgnccccattgggaattgggggttacaaggtctgggcaggatgnttttttattcctggatggaggttacccnttttgnaggagttgccggaaggccccgt

SEQ ID NO: 322236 - DNA, 597 bp, Homo Sapiens
aattcacgagtacgtaggaaaggctgaggatgcttgaattcccaacgcaccacattgcaccactgattgagcttgatgggcaggtctctgtgtgactgtacccattttgcatatgcaggatacattactgtttcactagtaggacgaatggcaattggttctgccagctcggttttgccagatcttgtaacccaagcaacctctggggcaaagtcagcaacatgagtcttctctttctctaatgcactttgagacacaaacatggggaagtagcagttttcaacaccaagtttcttgatctcagcatcaaaaaagtccttgatggcttcccaaatggcataggcccagggacgaagaatataacagccacttatgtcatggtattcaatcatttctgactttgtgatgacctgagaataccaatcagcaagattttcttctttttttgcctcaagacccaacctggtctgtttcttaggcccctgcccttctcctgctccacttgatgagagcccacctccttggtttttagaagggtctttcctttggccatcattttgtttctgaggcttattctgcttttcagatttattttct

SEQ ID NO: 322237 - DNA, 1073 bp, Homo Sapiens
cttgaagattcccggtggagtaatggaaccccagctttgatcccagagagctgctgagagagctggaccccaatgaaaatgatgatgggctgtccgtagcctggacactctaaagaggctttaggcccggtgacttgcttttcttgtgacatccctggcactctcatctttcatctccttggatgtcttgggatacatcctgggtgcccccacaacccgctgggaggatctgcttagcattctcctcttcttttctgttaatgagccaaaaatctgggactttcagggcaaaatggaagggctgcactttgtaggatagcaggaaggatggtaaaacccagtagcagcggccatagctcttcagacccaaggatgaattccagaccaaagatctgggccaccagaattccaacaacgatgcccagctggttgagagtgccaaaggcaccccgcagggcagtaggcgagatctctccaatgtacatgggcacaaaacctgtgcagagtccgcagaagaggccaataaccaagcgacccaggatcagcatttcaaccgacttagctactttacacagtcccataaagcagccaccagtgacagccaacaggttgacaatcagcattgaattgcgcctgccaaagcggttgacgaagagtccgacggaaaaggagccgatcatacccccgacggaaaatatggccacagacaaggaccagagagacgtgagcagcacctcagagggtggggcatttcccttgtccgtcaaagttttattgataaattcctttatgatcttctcaggagcattgatgaccccagtgttgtagccaaattggaaagagccgattgtagcaactgtgatggcaaatatcagagctggggtgaccttctgtgtccccatcgctgtaatctaattcaagtcttcaagaaagatctaggggtgattccagaaacagctttttcagccaacaaaaccttcaaaatgtccttctcagcagcaagttttctccacgtcctcaggaaggatccaaagtctcaccctcgtgccgaattcgccacccaggcctcgctc

SEQ ID NO: 322238 - DNA, 729 bp, Homo Sapiens
  misc_feature (476)..(578): n is a, c, g, or t
ggtttttaaatatttccaaactgaccaacccagtttctcttaacttcttccttctccaattttcttttccacttttaccaagttaacttcacattcttatctccagataagttctttagtataatctattactttgtcttcccgattaattacctaaatctcgtttgatgtttgtccttttcataccactcataggtcagattctcctaatacagctccataattaataagaaacagtcatcaattacaagttttaaggactattctctcctccctgtcctctgtctctccagggtcaccccagctctgatctttgccatcacagttggctacaatcggctctttccagtttgggctacaacactgggggtcatcaatggctcctgaggacggtgagtgccggggcacaagaattaggattctggattggggaaattattcctttaagtagggtttcaagaattcagaatttaagnnnnnnnnnnnnnnnnnnnnnnnnnnnnnnnnnnnnnnnnnnnnnnnnnnnnnnnnnnnnnnnnnnnnnnnnnnnnnnnnnnnnnnnnnnnnnnnnnnnnnnntagtgagggtccctcccccaactaggggaattaaactttgtatctatcctgtccaagactgaagatggagacaatattggtggggaaaattagtggggtcatttaatcaaaggaaaaaggtcatttactccttataccctgggcagggctg

SEQ ID NO: 322239 - DNA, 1134 bp, Homo Sapiens
  misc_feature (849)..(849): n is a, c, g, or t
attcggacgaggcttggcagctgtggcggcctgggtaccttgtcggagctggggctgggcagccgtccccttcggtccccaccgtggcctcagcgtgctgcttgcacggatacctcagcgggcgccacggtggctcccagcttgtagacaaaagacgtcactctcattccttaatcgaccagaccttccaaacctggcttataagaagctaaaaggcaaaagtccaggaattatcttcatccctggctatctttcttatatgaatggtacaaaagcgttggcgattgaggagttttgcaaatctctaggtcacgcctgcataaggtttgattactcaggagttggaagttcagatggtaactcagaggaaagcacactggggaaatggagaaaagatgttctttctataattgatgacttagctgatgggccacagattcttgttggatctagccttggagggtggcttatgcttcatgctgcaattgcacgaccagagaaggtcgtggctcttattggtgtagctacagctgcagataccttagtgacaaagtttaatcagcttcctgttgagctaaaaaaggaagtagagatgaaaggtgtgtggagcatgccatcaaaatactctgaagaaggagtttataacgttcagtacagtttcattaaagaagctgaacatcactgcttgttacatagcccaattcctgtgaactgccccataagattgctccatggcatgaaggatgacattgtaccttggcatacatcaatgcaggttgccgatcgagtactcagcacagatgtggatgtcatcctccgaaaacacagtgatcaccggaatgagggaanaaagcagacattcaaccttcttgtttaccctattgatgacttaattgataagctctcaactatagttaactagtatcacatgtttagttggtatgtaaactaatgtatccagaagattggaagagggataagaaatgaaagatcctgatactttaggtttttccctttcctctattttgtaaatataagatgagtattatttaatgatgtatttgcataagtaatgcaaattgtgaagaaggaccagctgctgtttagaaaattttctccttccttctgtccctg

SEQ ID NO: 322240 - DNA, 866 bp, Homo Sapiens
  misc_feature (98)..(136): n is a, c, g, or t
tttattccagcattcgatgcatttttatagaaacactttggaaacactttggatgaaccaaggccttttccttatttaagtagactcagaacactccnnnnnnnnnnnnnnnnnnnnnnnnnnnnnnnnnnnnnnnacgaaagacttagaattgcatttgtccttttgtgggtgtcctgtgagaggtgatatgggggctaagaggactggctttctaatagaagaagtgagcgcctgagaggacaatttggtcattggacacggattgcaggctttgagaagcgctcagaggcccagggcggcgggctcagccattcggcttggggcaccaggctccccagagacaatgctcagtattcattcatacacagacgatggaagaagccacttcttccctgggcggtgtgggtttcccccagctcttcccacacgtgtgttaggaaatgcccgtgaacttgccctctgggctttttaatgagaggcttggcgcatgcggcacccagcggctgcttccctgcaagccagcgacttgccgagcagaatgagctctgctcctgagccccggtagctgcttcctcatctgcatttcatctggagcagggcaggtaaccacaggaggaggcatgcccgaggcagccaggactgggcgggaaggtgctccctggatatactctgtgaaccttctggaaggctgctggcagtttttcctttttgtccaccaccctgctctttttaataattgtacataatccgtgtatttgttttacctgctcatcttctaaactggcgagccctatagttcgttctcattgttagattttgccttttacaagtgtccccaacctgcaataaacttttccctcttg

SEQ ID NO: 322241 - DNA, 606 bp, Homo Sapiens
gctcacactgcttcttactgttaaaaggaaaaacttatgaggtcaaatgtggtccaaactgcagggtgtaaatgagaacaaggatattatcttagcctgttttcttttaaatctatttccaaatcaaaacctcaaaagggttgaggcagtgtctacaatccattcaaatgtactgcaaaaaacatcactaggtataacttcagaattgaaaaccatctttcccaaacatgtttttgacttgatgtgcaatataaacagagggaaaaaaggaagaaaaacttaaaagtgccatcctactttgccagaaggatggttactttcccagatctaaggcaattttaatagatgggttctcttgttccctacctacaatgaggtaaactgttccatgtcagatcagattcaaaatacctgttcatcttctaatcagatggtaatggccatacccagggcttcctcgaccttgatggttttctccaaatttaaaaagttgggagtagtgtcatccaacttgtcactgagacacttctgtctttaaaatttcacaaatagctctgaagagtatcatgcacctgccccatccacctcagccatgatactgtatta

SEQ ID NO: 322242 - DNA, 1502 bp, Homo Sapiens
  misc_feature (27)..(27): n is a, c, g, or t
  misc_feature (394)..(411): n is a, c, g, or t
  misc_feature (418)..(435): n is a, c, g, or t
  misc_feature (1248)..(1337): n is a, c, g, or t
tcaccccctgatttggatccccgaccncctcccaggggggggacaccgccacttgaagtctatatgtgcgaaaaccgaacactttgttcaatcttgtttaaagggcccctgtgggggggccccgggaggaaaaattgttccggccgttcctcgtggtgggattagggggaatgggggacttggaaagggggagggtgccgcctttttagtgacgggtcaaattttttcctttaagggagagccaattggccttcccttcccaccttttccttttggtggcagagggtataatccccccttacggatatcaggggttttaaaagaagcccttaacctttttccctttccataaaatagtcaaataaataaactgcagtcacgttggcctgaagcnnnnnnnnnnnnnnnnnnctcgagnnnnnnnnnnnnnnnnnncagagtgaaacaggagtgctttatggtctgagtggagtgtttgggaggagtgcctcccggctcctgccttcgggctcacctgagcgggggcgcagctgaggccactgtgggaaacacaacccccactcccaggagaggcctcacatgctgccttcggtctcgccagccttctagcgtggggcctgggccgccctttagggtgagtctgcacacccgtgttcagggctcccggccggaagcggaaccataggcatgctgcggccccagatgagcgcggagggcaagcaggtgccggggcagcgcacaccccacagccaagcggcccctgcccagcctctgtaaacagaccctcacaggtccctcctgggcctcagtcacatccctgagaaacactggcggctctgccccgagagggccagggtgtccaccgagcctggctgaagccagctgtcccctcccttcttgcagagcaggctcacactgggcctgaaggcccagcacctgcagggcccagcctggggaccaccaatgcccggcctcttccagctcagaagcgcacacggcagccacggggcagcggcaaaggcgatggtacagaggcaaatgcctccccaggcagtgacaggcacgccccccgccccagggcggccactgcccacgccggcctagagctcctcgtagtcgccacccccagggtggcggccgcccggggccccgccccccaggaaagcctccagctcatcggcagccgtcctctccctgctgcgcgggggccgctgctgccgccgtcgccgctcctccttgccctcctcnnnnnnnnnnnnnnnnnnnnnnnnnnnnnnnnnnnnnnnnnnnnnnnnnnnnnnnnnnnnnnnnnnnnnnnnnnnnnnnnnnnnnnnnnnagagggggttttgccctccttaccttcctcactgctctccttgggtccggcctcctccagccccagcccgaagaggtccgagtcattcttcagtctgaaggcggggagagggagcttggggggtgggggcggctcggccctcgtgccgaattcgccacccaggcc

SEQ ID NO: 322243 - DNA, 1134 bp, Homo Sapiens
  misc_feature (743)..(821): n is a, c, g, or t
  misc_feature (1023)..(1023): n is a, c, g, or t
  misc_feature (1110)..(1110): n is a, c, g, or t
gggggagggcccctgttgggaaccccaaaacccccctttttccgggggagcccctcccatgctcctttggttttcgccagccttttagcgggggggccgggccccccctttaggggggttctggccacccctgtttcggggctcccgccggaagcgggaaccattgccatgtttcggccccagatgagcgcggagggccaaccaggtccggggcagggccccccccacagccaagcggcccctgcccagcctccgtaaacagaccctcccaggtccctcctgggcctcagtcacatccctgagaaacactggcggctctgccccgagagggccagggtttcccccgagccttgctgaaagccagctgtcgcctcccttcttgcggagcaggctcaccttgggcttgaaggcccagcacctgcagggcccagcctggggaccacccaatgcccggccttcttccagctcagaagcgcacacggcagccacggggcagcggcaaaggcgatggtacagaggcaaatgcctccccaggcagtgacaggcacgccccccgccccagggcggccactgcccacgccggcctagagctcctcgtagtcgccacccccagggtggcggccgcccggggccccgccccccaggaaagcctccagctcatcggcagccgtcctctccctgctgcgcgggggccgctgctgccgccgtcgccgctcctccttgccctcctccttgtccttgcnnnnnnnnnnnnnnnnnnnnnnnnnnnnnnnnnnnnnnnnnnnnnnnnnnnnnnnnnnnnnnnnnnnnnnnnnnnnnnnagagggggttttgccctccttaccttcctcactgctctccttgggtccggcctcctccagccccagcccgaagaggtccgagtcattcttcagtctgaaggcggggagagggagcttggggggtgggggcggctcggcagggcctcatcctcgtcagtcacatcggaggggtcatctcgcacgggaaagtcatccgccctgnctgtgtgtctgatccctcgctctcaaagtcggggtcatccatgacgaaggacagcatttgtgcagcaatgggtccctcgggggtcantttccgacgaggagggcctgctta

SEQ ID NO: 322244 - DNA, 764 bp, Homo Sapiens
  misc_feature (71)..(86): n is a, c, g, or t
  misc_feature (693)..(718): n is a, c, g, or t
ggggtgttctgtttatttaataagtgggcaggttgcaagcgttgcacagaaattctgagattttactgccnnnnnnnnnnnnnnnnaagaaagttgtttgttggactccataagtgaatttcaagcagtgaggattttgtggtgcctgagatggccgagggcacagggagtgagctgtatgtgtgaggaatttggtgagcgagataaaagtccacggtgtcaacccctaaaacatgggtgaccgtacatttttatacatctccactctacggccttttacaggctttccgattttacaggcctttccaagtttccattctccttagagagagaactgtgcttccaaacagaaatcaggagtgaccacaaagcctgaaaaacactttgccacccagcaaagaactggcacaattggtttgggtctgcattgccatagtgcccgagttaaaactgcaggccactctgccttgcagtggcctctgatttcattgtgggtgcatccacaggggggcccgagctgttctttcagctgctccaaggattgagacccaagtcatcatgaaaaaggccccagtacagtcttaatgcgataattccactagctaagacgtcgagtgccaagaccagccttccagccgaggtttggaaacaagcctcccgtttcccgtgactccggggaaaaggtgcttgggnnnnnnnnnnnnnnnnnnnnnnnnnnattacttttggcccaaaccgaaacctttcttcccccccggcataca

SEQ ID NO: 322245 - DNA, 1333 bp, Homo Sapiens
  misc_feature (293)..(302): n is a, c, g, or t
gagcaagtagacatatgttgatagttatgttgggcgtataaatagcttacacggagcgaaaattagattacaatagcagagggagatacaaagagttttcttataagggagcgatagatactaagacggtgatgaatgtgacagcaaaatggtgacatatgagcaaagggtgaaccacaagtttgtggtggaatgcggcgacataggagatgcgagtcgagcagaaagaagtgcgagggttaatgggggtggcgtggtgtcagggtgaggtaggcgtgggtgatgtggggccnnnnnnnnnncgattggggtcgcctgatggtggcgtgagcgcgtggcacaaggggagcgttggagtgccctaggtggttggttggcaggtggcgctgtgcgccgtgtgtgcttggtggcggtgcatgtgtggtggtccagtgagggatgtggtgcgcatgggttccgggttggtgcaggtgggcaggagttggggctgtgcgcagcgtttgcttgctaggattagtggtcaaggccgcgtgaagggtacgttgatcgcggtatcatgtctgctttagtgggcccgagcaggttagggccgaggcagcttgtgagtcaggcggaggcaagagatgcaggcacgttcaggccgcggtagccggcagtggatcgctccacgtgttcgttgtcagctaggtatcatgagtgtgtgtctagtaggatttggggaaccaggctgtcagtgtcgggctatggcatctcgtggcctgctagatggtgctgacgctagctgactaggggtgtgctgtgcgccgcatagcctttgagggcaagcatgggaaggaggcgcaggcaagcagagcgccctgcagatgctgccagagcagaaagcaaggtagcaaagaacaggatatattgctggggctgggttgggactcaccccattggacctccgttaataggccatgaatcccaagcgagcagagagtcttgatgttgaaaaactatttctgaaggtgggtgggggtttgtaagtgcaacccacagatggggctgggacagggaaaggggactcctggagtcggtcctcaccacggccacagccctgaacgtagagcaggtaggagcaggtgggggcaggtggaggcaggcgaggccctggcagtcattctcgacaggagggcagcagtgggggaggtgcatgtagcttcaggccccctcagtcagtctggcctcagacttctaagggctagaagaggtatttgcggcaggactcagtcccacacttgcattcaatacggacccgcttcttaggggagccagggagcccagccaggccaaa

SEQ ID NO: 322246 - DNA, 827 bp, Homo Sapiens
aaacagctttatttttataaaaatgatgggcaagaagattttaaaaatcaaaagcaattatactttggcctttatgtagtcccagctactcagaaggatgattaagccccagagtttgagtccagcctgggcaacactgcaagaccccatctcaaaaataaaatgatggaagggacaaggatatttggcaagtgggttaagctcattcagagtattcctaacaggaattcatgtacaactatagatctattcctaaaaataaatatacatatacatacacaaaaagctatcctaatgaaatcttttccagactgatattatatattccacttggaactgtttcccaaatatccacactgaattgtgtgccaaggttcgttctgcttacatggaaggccctttaggagggagtctattgtcatcagtaagttcccccacccttcccaccccgtggttccaaagatttataagcttagaatacattcccaaaccaccacccataaagcaaatacagggtcccattgcattgctactagattttgcatcaatcatagcaccaactatttaattacaaccacagctttaagtcagctgacagaaatcctatgagcagtttcctagtgcatcgtacatctttggtgtagggcaggtgaaagggtctacaatgtgcagctgtctaaaagaacatcttaaagacaacctggctgacctgttgttcttcacgccctctgaaaagcagtaaactacaattccttctgtcaaccatttcctaactacataaaggatcatatgaatctacgtgacacgccatcccgtcactaaagtct

SEQ ID NO: 322247 - DNA, 1128 bp, Homo Sapiens
agtggtgtcgcgctgtgtgagggagtgtgcgccgcgggtgttcttgctgggggctggttgtgggcgtgctgtgctgggtgctgggtcgcgtctgtgagctccccttgcgtcggagagttttgcctgcgggcgccgggctcttccaggacgggcacttactacggccctcaatgcttgttccggtcccaggtagattgaccaccgggattcgtccagtggtgatgatgttgaggatgggcctccgttcatgccgcgccatgcaggagctggttacacatgtagttgtaactgatggtggtacatcagaccaaccgtcaggcggctcatagtgcaccaccacactatgtcgaaaagtgtttctggtcatccgaatactccacacgcaaatttccttccactcggataagatgctgaggaggggccagaccatcgctatctgagcagcgctcatggtgggggcagcgcctcacaacctccgtcatgtgctgtgactgcttgtagatggccatggcgcggacgcgggtgccgggcgggggtgtggaatcaacccacagctgcacagggcaggtcttggccagttggcaaaacatcttgttgagggcaggggagtacgtgcaagtcacagacttggctgtcccagaatgcaagaagcccagacggaaaccgtagctgccctggtaggttttctgggaagggacagaagatgacaggggccaggagggggctggtgcaggggccgccggtgtaggagctgctggtgcaggggccacgcggggagcagcctctggcattctgggagcttcatctggacctgggtcttcagtgaaccattgttcaatatcgtccggggacagcatcaaatcatccattgcttgggacggcaagggggacagaacgttgttttcaggaagtagtttccataggtctgaaaatgtttcctgactcagagggggctcgacgctaggatctgactgcggctcctccatggcagtgacccggaaggcagtctggctgccaatccagggaagcgtgtcaccgtcgtggaaagcacgctcccagcccgaacgcaaagtgtccccggagcccagcagctacctgctccctggacggtggctctagacttttttt

SEQ ID NO: 322248 - DNA, 604 bp, Homo Sapiens
ccagtcccacaccgagagcatgtgatcattggattcatccactgcacacagcaggttgcctccattagatttggagaagcccacacagcacacggctctgtcaaacaccccccaagcccagcaacgtgtaaggtggagagggaaactgagtcccaagatgcgcacgtggggcggcagcggcttcccttccttagtggttcccgccacctgtcccgtggcgatggtgacacatatctgggtggatggccaagcatttgatgtcatcgttgtgtcccaggtagtgtcgctgcctctgctcctccacgctgtatagcacggctacggaggccacaaagtacactatctccccggtgggcagcaaataaaggttggcccggcagtctcggccacggtagccatagacccactccagcttgagccggcaagaaggcagctccgagcgtgtgtccaggctgtaggtgggtgccagctcgtctgggatcatcatgggcacagggcggcccctcaggaacattttcacggagccatcctccacactgaagataacttctttggttttgccagctccaaagctactcatggcggcgggtggcggagcttcggg

SEQ ID NO: 322249 - DNA, 394 bp, Homo Sapiens
cttccagtttggctgttatgcaaagcaggtgatttgtcttaatcagataaaagatagaggctatgggggcctcaagatttttggagagcagaggtggtctctggcaattccatctggttttgagaaacttagcagctcacagagcacagagatcctgccttcttcctactatcaggctgacctaatggggttgggctgctcggcaactgcttgggtcaccttgccccaaggaaaccagccctgggtgccacccagccacttagggtctacagggtgggactccagacctagagcgtaagtatggatgttgtggccctgtgtcttcctagtgtgacccagccaggagcggaagcttcaggcgtttgtaaagtgaggtctggctctgcctcctccg

SEQ ID NO: 322250 - DNA, 939 bp, Homo Sapiens
cacccaaggaactgcctggcgagctgctgggctaccggctgcagtactgccgggccgacgaggcgcggcccaacaccatagatttcggcaaggatgaccagcacttcacagtcaccggcctgcacaaggggaccacctacatcttccggcttgctgccaagaaccgggctggcttgggtgaggagttcgagaaggagatcaggacccccgaggacctgcccagcggcttcccccaaaacctgcatgtgacaggactgaccacgtctaccacagaactggcctgggacccgccagtgctggcggagaggaacgggcgcatcatcagctacaccgtggtgttccgagacatcaacagccaacaggagctgcagaacatcacgacagacacccgctttacccttactggcctcaagccagacaccacttacgacatcaaggtccgcgcatggaccagcaaaggctctggcccactcagccccagcatccagtcccggaccatgccggtggagcaagtgtttgccaagaacttccgggtggcggctgcaatgaagacgtctgtgctgctcagctgggaggttcccgactcctataagtcagctgtgccctttaagattctgtacaatgggcagagtgtggaggtggacgggcactcgatgcggaagctgatcgcagacctgcagcccaacacagagtactcgtttgtgctgatgaaccgtggcagcagcgcagggggcctgcagcacctggtgtccatccgcacagcccccgacctcctgcctcacaagccgctgcctgcctctgcctacatagaggacggccgcttcgatctctccatgccccatgtgcaagacccctcgcttgtcaggtggttctacattgttgtggtacccattgaccgtgtgggcgggagcatgctgacgccaaagtggagcacacccg

SEQ ID NO: 322251 - DNA, 177 bp, Homo Sapiens
ttcttctttaaaatacatacgaagtgtaaagagaaaatggccaaaacctcaaaactaccattgttgaaaacaatattaaaaggacacaatctaaaatcatgctacaaaaatagtgttatcttgtttaactaaatgtacatctttttttccaattccatgattgacaagagtgcttat

SEQ ID NO: 322252 - DNA, 1138 bp, Homo Sapiens
tgaccccggaaagaggggcttccatttggagggagggtccttttccaacccctgaagaaccttctggctcacagtttgggaaggccatagaagggcaggacaacccctggaaaaaaccagagggcaagcccctgttttttgtttcttgaaagaagatggggtggatccatcaggactggccagaatttcatggcaggcccgggtcaaaaaagtaaatttccaaagtgtcttttccagtgtcaggacaaatgtaccaatggctgaaattccatcatccccctgtagtaagcagttgtaaaatgtgcatgtaaacatcaagccatttctggattttcagaacgtacttgtttggcagcttcaagtatacagggcacaagccgaaacactggctgctcttcagactcttcctggggttggtccagaggctgagcagccccatttctgacccattctaacattagtttctcatccaaatcaaagagcttgtccacaacctcccccaccttcaccagcaagtcaacatttgttgaacttgacataatgaagcaaatgctatcataaatagctggatgttcctggatcctttcaacccaaacactggccacttctgcctgggaaaggcaagtaagcaacaacctgcttgtttccagcagagtaggtgggtctgaatcatacaaacagtgcaataacacctgcccaagatttttatcactgctgatggacacacatatctcctggaaacaggccatattacctaaaattcccacacagatttctcttaatcgaggacacttggacttggccagtactcccatgaatatatcaggagcattaaattcttggagaaataaagccacgtcctcatccattgacatatcccatactctgcaaatttcattctccatttcttcatcaagctccgtcagctgctcctcatcatctgagctagatttggtgttttcagggctaacaatctggatgagtccgctgaggacgccgaagagccagtgtttgctgtagaccgtgctccctatgcagtctccaccggccacctcctcctcctcctccttgtcgcgacccggcggcggcggcgaggggttgcggtccatgactttgtcgcgtcccgcgcttgaaggcc

SEQ ID NO: 322253 - DNA, 476 bp, Homo Sapiens
ccgtgatcgtccgtctcaagcccggccacagggttgctgccattgcctccctcggagccccgcggccccgcagcttcagccagaccacggcccggctgctgggcaggggtagggcccggtggcagcggcggtaatgtccgtggtctagggtcaggaggcccaagacctggcgcggcctcggctgcctgcagcaggactgccaggggcccgcttagttcaggcagcaacagcaggaggaggacggaagccaagaggtggctgagacagcagcagcactgcgaggccttcatcgttcccggaccgctctctcaccacccgggagccgccaggcccgccacgctggctccaagagggactataggcgcggtggagaatgaagcagaggtgaccaaacgccagggagaggcccggtcgtggcaggtggcagaagctacagcagtggcagctgcccggagaaccggaagttcgtacatctc

SEQ ID NO: 322254 - DNA, 1255 bp, Homo Sapiens
gccaagcatttttagaggcttatctttttaaagaaatacagccccaactttgttttcgaaaatgttgtagcaatagctattttgatcgcttctttgcccatccttactttcctcatactaaagccaaaatatttgtaaatgctaacaatatgcaaaaacactgaagctttaatactgttttgtacgccctatggaacctgctaccaatcctgcattgcccatcaaaggtgtggatgctcccacagtgcttgggctgcgagctgtggccacgggtgcatagcagggaccttcaggcctctgctccaaactggctcccctaatatatagccatattttgctgggggttacattcataaacactgctacaaaaagggtccttctggaaaaagctaatttatattacttttaatgggtccccagcaaatgaagcagttataatagtatttttaatgcttttttcctatacagaatttctacttattacatgtgaacttctttggaaggaaattactgggggtgagaaaatataaaataaatgtaaaagtataatttgttaagaattgtaactgctggatgtacacaatcagccacactcaggtgagcaacaatcacagataagcagcgcgcacctccctctccctgctcatgtcaactcccatcctcagcctcaagtgtccaccgcccattttcctggactgttgtgcatcatcgctcaaatgttgcttttaatccacaaatcaagggctgcttccctattttctaaaactagcaaaagcctaagaaataaaaacagtcaaccagcaaatgagaaacagtggccacaaatctgaagaacgctgcccagagtccctctccctgggctgcctcccagggaaggagcatccctgggagctgcggctctaggcgctggcacaagactggggggcggtgcttctctgagggcacactcctcagcctttgcagctgacttatgtcagcaagctgctgcttccccgggaccaggcctgcccttgggctctggtaagaaggtagaaagggaacagcggcttccaggagtgggcaccagaaaccatgcctgaggactaaggtctgaaggacaatccacaatgaggttaatctgcctgtggttaagaaagagaagctgtataattaaatgtgtagtctgtcagccatagtcacgctttgcttagaatttaaaaccctaaaaccttttctcagagctatgaggtttcatcgttttgaagaatctcatttc

SEQ ID NO: 322255 - DNA, 363 bp, Homo Sapiens
  misc_feature (341)..(341): n is a, c, g, or t
tactcatgattttttttaatttaacatatatagtacatgtaaacaactggcataaaattcataaaaatacaatactcctatgcaatatcactttattcctgatacatactttcattttctcattaatatcactggtcctattttaacccccatattttttttgccaagcatttttagagggcttatctttttaaaggaaatacaggccccaactttgttttcgaaaatgttgtaggcaataggctattttggatcgcttctttggcccatccttactttcctcatactaagggcaaaaatatttggtaaatggctaacaatttgggcaaaacacgggggcntttaataccgttttgtacgggc

SEQ ID NO: 322256 - DNA, 508 bp, Homo Sapiens
  misc_feature (179)..(223): n is a, c, g, or t
catttctcatgattttttttaatttaacatatatagtacatgtaaacaactggcataaaattcataaaaatacaatactcctatgcaatatcactttattcctgatacatactttcattttctcattaatatcactggcctattttaacactatattttttttgccaagcatttttagnnnnnnnnnnnnnnnnnnnnnnnnnnnnnnnnnnnnnnnnnnnnnaatgttgtagcaatagctattttgatcacttctttgcccatccttactttcctcatactaaagcaaaaatatttgtaaatgctaacaatatgcaaaacactgagctttaatactgttttgtacgcctatggaacctgctaccaatctgcattgccatcaaaggtgtggatgctccacagtgcttgggctgcgagctgtggccacggctgcatagcggagaccttcaggcctctgctccaaactggctcccctaatatatagccatattttgctgggggttacatt

SEQ ID NO: 322257 - DNA, 536 bp, Homo Sapiens
atgctgcttggacttgcttctttttcttttattgttcttcttttttcctgtcatattccattcttttagaacttgaattgcactgccatccacaaaggcttgcacggctttatccacattaaaatcaaactgttggagcaccaggactatttcattattgcttttgttgggaacaactgatctaactgcatagatcttttccttgacattcacatgagtattgagttcagccatcttgcttctagtggaataggccctgggaatccacagcaatgttcctgaaagcagcctggtttctgaagagctctctgtgtcgagcgccggctcctccgtcccgggccggagccggggcccgggggcgcggtcgccaggggaggcgccgcggcggtggcggcccctgcggctcggagggcgggccgagcgggagccgctgcctgggccgcgcgccgtccggagctcgccccgcgctgccggcgcttggcggagggcgcagccagctcggcccccggactggattccttcactgacacaacccc

SEQ ID NO: 322258 - DNA, 1071 bp, Homo Sapiens
  misc_feature (84)..(85): n is a, c, g, or t
  misc_feature (175)..(175): n is a, c, g, or t
  misc_feature (258)..(258): n is a, c, g, or t
tccccttttttcccaaccaccctttcgggaggtctaaggaaagggcgggcggcacccacaggggccccttcccctttggggggnngcatctctcctgttcaggctttctctctaggagcattggagggatccttctttccctgtcgggaaactcaaccactgtacagaactccancccattaacctttctagcttcctctccccaactgcatcgctcctcctctgttccatagatcccccggcttcatcccttctggnctctaagcaaggcaccagtggaagggagagggctggactggggggctggcagcctgtgcatcagggctgaagacacaggcagggggaaggaaaaaggtattcagtcccttccccccagcatgagatgcccaggggcctgggctggagagatgatggcacgtaccctcagatggcccacagctgaagcagtgggctgggccacagagctgcagcaattagtatgtaaccatggcaatgaagcagtcactatggtaaccatggtgatgagtctgcaactaggggatggagctgggacctcaaggttgacacttgagatctctggcccttgagcaaggtaataaaaagtataagggaaaggagaacaatggggcagagcggggtttgagaaatgggaagcgggccgcctgagctattaccccactctggatgtggctctgctcagcccccaaagcccctggcaaaggggtctgaggcaggaggggatctttggcagcttatggtaccataatttgtcttttagaaaagagaaaacaggctggggagagcaggtgtcaggtcagagctgaggccctctctgtgacagctcctcagccctggctgggcctggggcaggaccctaaagggttactgcaagttctgggctcccaggaggcagcaaagccacctctacttttcttcttctggctggttcttcaggaggccagagcccagaaactcacaggaccaagctccttacagaatattaaagtcttcttatacaaaagccccagttggctctgccggcacgaggcctcgtgccgaattcgccaccca

SEQ ID NO: 322259 - DNA, 1702 bp, Homo Sapiens
agtgtgtgaactatattattgcggcagtgtgcgtccgttcacatgttgttcgcggtgagtactattgttagttcataatgtatgtcgtcgaccctgtgcagggcttgttactatgcagcttaagggggacttctttgggtatgagccttgtccatgggggcccgacggcacttgttagtgacgtcgtgtgcgccatgtttctggtgaaggcgtgtcctaaaaagatgccattcactgggtaaaagcctgtccatggaggacttctcacccaagctctgggataaggcccaagaatggtgatcggtttcttaaggattaccccaatctctgatcacgtccgtggagccgagtggtctggtacgccctgtccttgtgctgcctgatgcaaatgagcttcctcagccgtgctgccttcgtcacacagaagcattcacctgtcatgggcctgagtgaccctatcacatccccgttacgcagccaccttcgctagtccttggtccacaacgccaagaactcacttactcaccagattggtgaaatagtagccatcctctccagtcatcagtcggcttggattgcagaagctcgtgatatactggatattagactgaaggcatgggggttgcccttcaaaacaatgtagatgagggtggggaggaagtcatctgctgacgccagctcgttctaggtgatcttgatggcatcgaagatgtgcttgctgcacttggtgatgcaggccagcttgtctcgaggcacacgcctggaatccatttcaatatctttctttgatccgaccctggaagacatactggagatttcttcactgtggtaacgttgcgggtcttcttgttggttttctttccttcgaacttggagactttgatggattgggccccttggctgctctgactgctgttaactgcctcttcttcctcccgctggagtcggtccatcatctcccagtactcctgaatctgcttctgcctggttttgtgctactcttctctggaggcacttagtcgcacagagtcttgccagtggtttcgttccaccttgtggtagtactcctgagtctgcttctgcctggctttgttctattcttcgctccagcttttgtaatgcattccttccaaaaacagcttggtctgtttatagatttcttggcctgtcttgtggaaggtcttgagaaattctatgaactccttagacactctatccgtttcaatgctggtttgccggtttatggaaggactgggagcttttgcttcctgaatttctgccttctttgatccgaccctggaagatgcactgaagaatttcttcactgtggtaaccttgcgggtcttctcgttggttttcttttcttcaaacttggagaatgtgagggattgggccccttggctgctctgactgctggcaaaggcctcttcttcctcccgctggagtcgctccgccagctcccagtcctcctgaatctgcttctgcctggctttgtggtactcttccctccagcacttggagcagaaaccctgccaggtagggttgccgtagtaaccacatcctttcttgcacaggagatccgattgatccacatgaattcctcggcgttcagacttaaggctcatcttcttcctgctaaccactcgcccgcgtctccgccggcgtccaaaccaccgctcgcccgcttcgcccgggtaggtct

SEQ ID NO: 322260 - DNA, 587 bp, Homo Sapiens
cgggggttggaaaaacccagggggaaaagccccggcaatgcccccctgggggggctcccagggcaaggggccattcccattttttccctttggggcccaaatggtgtggcaaagttggggaacttccagttccaggggtttcaaggttgggacccaacttgggggaagattccctttccagggccctgcagggaggcccttggtagaggaaaaaggcccgcctatggagttgggctcaagcagcctgccaggctgcagggcctggctggggcagctgctcaggggagcccaggggatgcccagagagtgtccgagcagcaccagctcctcggggtggcacagcttgtaggtggcacacagcttctcctggagcgctgcgccatcgccctggatcttcctcacttgctctaagcacttgagcaggaagctctggggcagggagctggcagggcccaggggggtggcttcctgcactgtccagagtgcactgtgccacagcagcagctgcagggccatcagcttcatggggctctgggtggcaggtccagccatgggtctgggtggggctgggctgcaggctccgggct

SEQ ID NO: 322261 - DNA, 1115 bp, Homo Sapiens
gacccacggggggctcacaggcggcttcatccccagtgcccccattgcagagcccaggggctggggagccagtccatagtaataaaatacttggtatttaccctatctaccttcccagtcccaggggatggagggacaggagctttttctcactgctacaggcaggagaatgaaactcagaaatgcagggaaggacacagaggcctggggctccgttctgctcttccctgtctttaaatatgaggctttaatagccataattattaaatagagataaattcctgggatgggggagggcttggctcagggctgggcaaaggtggcgtagaacgcgttacgacacctccaggaaagctctgcagatgggaggcaactaggacccctcctgcccggcgctggaaagcagaggcgaaggccggcatggcaccctgggtgggctgcagggcaggggccattcccagttcttccatctgctgccagatggtggtggcaaagtcggcgacgtccagctgcagtgtgtccaaggtgggacccaactcgggggagatcccttccaggggcctgcaggagcccctggtagaggaaaaggccgctatggagttggctcaagcagcctgccagctgcagggcctggctggggcagctgctcaggggagcccaggggatgcccagagagtgtccgagcagcaccagctcctcggggtggcacagcttgtaggtggcacacagcttctcctggagcgctgcgccatcgccctggatcttcctcacttgctctaagcacttgagcaggaagctctggggcagggagctggcagggcccaggggggtggcttcctgcactgtccagagtgcactgtgccacagcagcagctgcagggctggggacagagcgggctcaggagacatgctgttccctaccacctgaggccctctcggggacactgggtgcctttaatccccattcccagaacggggatccccagcccctctgtcacaccagcctccctcccatgccagggcaggcggctctcccatcctgggccaagacactcacccatcagcttcatggggctctgggtggcaggtccagccatgggtctgggtggggctgg

SEQ ID NO: 322262 - DNA, 1146 bp, Homo Sapiens
cgttggtggagggagtagttgagtaggtggcggtgtcgccaatacggtgggggcgaggtgaccgatgggggcgggtcgtggacgttggtggggtgtactaaccttaggtttggcgattggtgttgtcggggcaatgtcacgggactctgcaggtaggtgggtctgtgcgggtcggggttattggctggaatggggggcgtgctagggtgcgcgggatggggagtgcagtggcgggtgtaaatattatgagccgggggctttttttctccggccggggcgcggaccatatcgtgtcaaggggttgccatggtgggggccctcagggtccaggggctcgcagcgggtcattcccagtgcccatggcagaggccaggtttggggagcagttcatagtaataaatacttggtaatttccgtatctccctcccagtccaggggatgggaggacaggagctttttctcactgttacaggcaggagaatgaaactcagaaatgccagggaagggacacagaggcctggggctccgttctgctcttccctgtctttaaatatgaggcttaaatagacataaatattaaatagagataaatacatgggatggggagggcttggctcagggctgggcaaggtggcgtagaacgcggtacgacacctccaggaagctctgcagatgggaggcaactaggacccctcctgcccggcgctggaaagcagaggcgaaggccggcatggcaccctgggtgggctgcagggcaggggccattcccagttcttccatctgctgccagatggtggtggcaaagtcggcgacgtccagctgcagtgtgtccaaggtgggacccaactcgggggagatcccttccagggcctgcaggagcccctggtagaggaaaaggccgctatggagttggctcaagcagcctgccagctgcagggcctggctggggcagctgctcaggggagcccaggggatgcccagagagtgtccgagcagcaccagctcctcggggtggcacagcttgtaggtggcacactggggatggaaggatgctgagtgagactcgccgtggctgggtcgccgctccttcactcccatcccagccagccctcccgagcactgtccccaccaaggtcgtcatcccaa

SEQ ID NO: 322263 - DNA, 938 bp, Homo Sapiens
taggccctcgatttttagtggtttttcaaactaagaagcaaacaggtttattttatacagtgggccaggccgtgggtctgccatgtgactagggcatttggacctagggagaggtcagtctcaggccaagtacatgaaaggagggagcactggctcaccctgtcctagtcctgagggcccccaggtttatgctgacagttcctgttgggcatgcctggggtgaggccaccacaacgtcctttctgtgaaagaggcacgatgattcgaggacccattcctgctgggaaaaagctcagccaccagtgatgaagagggttgtcctgtctggaggctcacttttgcctcagctttttgatgaaggaaacctcgtctcgattccggatgccgtagtctcggagcttctttctgtcttccgtgagtttctctcctgcagaggtcagatggtacgtcctccacacgtaggaccagctgatgtgctgaatgcccccttcacgctcctgcttgagctgcacgtatctctggatggccttcttcaggtccaggactgtggcactctgcactacaaccacgggcattacttctccatccatcttgcacactcggaccgtcattgcctggccgtattctagggctatttgggagttgacttcttccagagtaacctggatcggcagatcgcagagcagcgggtcctgcaccaccatagccagaccctcctggaacacgtccatggcctcggagtgcggcagcgcctcttcttcgtcctcatcttcctcttgcgcctcgggcccacccgcggcctccgtctcctccagggccgcccctctcagccgggctctgcccgcactgccagcccgcactagggaggccaagcgcgcctcgtgccgaattcgccacccaggcctcgctaccttataaccgttatgagtactgcctgt

SEQ ID NO: 322264 - DNA, 1968 bp, Homo Sapiens
ggtgggacttggccacgcgcatcccacgtgcccatagcccaggcagagggacaggagaaatggatgggagcacagagcagctccaacaagacaagtgcctgctgccaacccaccatgatccactctgactttggtccacaaactcctgccaaaaaaccaattgctctaccgttcactgttcccaagggtcattctaaacagtggtggccaccaacccctttaggagcaagagaaaaagaaaaaaggcaaataaatgcagaaggcagccagagcctcccagatgcccctgctcaggacccttccccgcaggcttggcagtggccactcagggcttggccacaggcagggcttggctcagtatcctgtcaggggcaagagccaagctgtctgggagggtcgggggatgcaggaaggatgtgtgggaatcaccaggccattgctgcatttggggtgacaggctgagtctgccaagccggagggagccctgaggcctcatcctcactgggggtcctattcctggaagagtgctgaatgtcaactcccaggcctcctcttccagcaataaggaagccatgtctgagaggggaagggcaagatgtgccctcagcctcactcaatgagctccacgtagttggcagggaacatgcccaaatggccatccggcccatagccacgccaccagccttcgtcgatcacctcgatgccccgtgatgaggttctcggggtcaaaggagatctctgtgtcgtcggctgcctggtagtcgtacagggcacgggcacagagcccttgcccactgagcccctggccctgaatgtggtggtcaatgtgctcagagccagcaccttgctgctgcaccagtgggggctgctcgtagaaggtctcctgctctggaggttcctcatacacagcctcctcttctgcctgcaccagacatggaggagtgctgggcgccggctcctcagcagggagatctgccctgggccttgagatggcagcagctggctctctgccaaagtgggtctctggttgggtgagctgcttctgcaggaaggggctcctcagcttgccaggctgaggactggagatggaggtggtggacatggccctctccttctgcttgaaaatctccctcgggtgcacggcagactcctgctcatttcggttccttgaaaccacttcttgctgctgctcccacgtcctctgggggctggcctcgccaccctgctcctgatagcgctgctcccggcgtgcagcctcacgcagctcacgctcccggcgctcctgctccagctgccgctgtgcctcctcggcccgccgcttttcctccagccgacggttctcctcctccttctctgctttggcccagaagctgtctttaccaacccttttaatctcagacacggcattggtcttctggtacacagagcccactggggcctggggtcccacgtcctggaagcggccactctccttgtgaaagctgtagttggcacctgaagccttggccaccttctccatgatgcactcaggctccacatcctcctcggcccgtgcgttgatggtcacatgggcccccttcaggaagctggccatggtgctgacgtggctggcacaggctcccttccgcacatcgttcacgccctcgcctgtccagttgatgaggacaaatttgggcagtccagagttggggtccttcactctgcagaaggcgtacatcaccttcccgctgttgagctcctccaccatctcctccaggccaccctcccctgtgccagccacgcggatgtcattgctgttgccttcataggtaaagagagcccagtcggtcggggacttctcggtgaccacccgcacgtaggcctcttgcagcgctggcccgttccggctcaggttcgccgccatggcccgccccgcagtctccgcgccgctgctgtagcttccgggccgggccgggccgcccctttgac

SEQ ID NO: 322265 - DNA, 504 bp, Homo Sapiens
attcattgcaaattcccggactgctaggcgaggagagggaagggggcggaggagacaggtctactgcaggcgcagagctgggggcagccgggggcccgagtggctgaggctggtcccgcagcggccgcttgccggcgttctggctcctgtggcctcaccaggaagcgtcagagtcccgacactggggaagctcggagcgccgcctccgctgccgccgccttctgcctggctctgggtccccgagccccctcccctggcccagcccgactccctcctccttcccgaaccatccggctcgggctccttccctggcgatggctggccgctgagccatggctcagtacggccaccccagtccgctcggcatggctgcgagagaggagctgtacagcaaagtcaccccccggaggaaccgccaacagcgccccggcaccatcaagcatggatcggcgctggacgtgctcctctccatggggttccccagagcccgcgcagtttcgttct

SEQ ID NO: 322266 - DNA, 916 bp, Homo Sapiens
ggattaacaagcattgtgtaccaaaggcgcccagcccataagccgccgagggaaaaaaaggcggggaatgccccagtggcgaaaacaaaaggtggaaggcgggtgctttgaatttaggtgccccataggcaagaagggccccgggctgacagttggtggaccagggaaggtgtttggaacaaggaaagtgtggggacacagggagcggtgggccggcccttttcccaggccagctgttaggggtgtgaagcaggcacagggcctggccacagacaatgggcaggggcttttcaaaaaagcccacttgagtagagtgagggtctggcgacacaggcagagttccgcaccctgtttccatggtgggctgggccacatggaaaccttgccaggtgctttttcccaggtgcccactggtaccctttcacttgggggcacctctccctggcaggtactagtcttaccaatataggtgctggagacagaagagacctgagcacaaagagaaagtgatctgtacacctcccattcatggaatggtggccctgctgtgtgtcttccctccgatcacgcttaaagagcaccatggtcccacctgaacagccttggctggagtccaggggaacctaaagcctgtattcaggcagttgttcagcagggcaattgggctaacagagttgatggtgagtgggtggcagtagtctgcggaccccagcaaccactgaatgtccttgaccttgcaaggcagcggttcttcagaatcgcagtcacttttcccagcatcatcaaaactcttaagaagccaggcccaaggacccaatctctgggatcccaagacatatacatgtctttaggtgggtgcggaggttgtccttctgcaatcaagccaggacccttcagacaggggcagctgagcccc

SEQ ID NO: 322267 - DNA, 634 bp, Homo Sapiens
  misc_feature (25)..(25): n is a, c, g, or t
  misc_feature (47)..(47): n is a, c, g, or t
  misc_feature (56)..(56): n is a, c, g, or t
  misc_feature (66)..(66): n is a, c, g, or t
  misc_feature (102)..(102): n is a, c, g, or t
  misc_feature (124)..(124): n is a, c, g, or t
  misc_feature (152)..(152): n is a, c, g, or t
  misc_feature (159)..(159): n is a, c, g, or t
  misc_feature (174)..(174): n is a, c, g, or t
  misc_feature (225)..(225): n is a, c, g, or t
accttaaaagacacacctcaagccnacaagaatacccaaaaggtatnaaaggacantcctaggtcntcagacactattaatgccagattgtagcctctaggncctgaagattttactagatacnggttactgaaactgagctttccttgaantcttttnccttccactgtggtntcccgcatttcaacatatcacctatttttgtcctcaaaggttacttaaatnttttccacagaattaaattaaatatgaatcatccctcctctgatttttgaaatgaccctttgcttcctatgataatgattcttctggtccgttttgtagttatatgttagagtttgtaaatagtcacacattttgcaactgcatgtaattttcttattattttttcctcttcctctaaaactgctgttatttcttttaactttttgtgggaaaaattaaacccatctttcactttgttgatatacttatttataattgaactccttgatttttgctcgaattgcttttcaagttacccacttttagggaagacattatttgggttttgtttagtgtatcaagctttttttagttagttgtatcaagaagtgtagacttttctatacataatatcctttttcccacagta

SEQ ID NO: 322268 - DNA, 1097 bp, Homo Sapiens
caaaaactaccaggtccaatttgttactctcaaaacctttgaagaggcagctgctcagctcctggaatcttcagttcaaaacctttttaagcaggtagatttaatagacctagtacgctggaagattttaaaagataaacatatccctcaatttttacaagaagctttggaaaaaaagattgaaagcagtggagtcacctatttttggcgttttaagcttttcctcctgaggattttatatcagtcaatgcagaaaaccccttcagaagccttgtggaaacccacccatgaggactcaaaaatcttactagtggattcgcctgggatgggcaatgctgacgatgaacagcaggaagaaggcacttcttccaaacaggtggtgaagcaaggcctgcaggagaggagcaaggaaggagatgtagaggagcccactgatgactcgctccccacgactggagatgctggaggccgtgagccaatggaagagaaactcctggaaatccaagggaaaatcgaagctgtggagatgcacttgaccagggaacacatgaagcgagtcttaggagaagtgtatctgcacacctggatcacagaaaacactagcatccccacccgcggactctgtaactttttaatgtctgatgaagagtatgatgacagaactgcacgggtgctgattggacatatctcaaagaagatgaacaaacagactttccctgagcactgtagtttgtgtaaagagatcttgccattcacagatcgcaaacaggcagtctgttccaatggccacatttggctccggtgcttcttaacctaccagtcctgccagagtttgatatatcgaaggtgtttgctccatgacagtattgcccggcattcaggtcccagaagattccgactggattaagaggttactgcaaagcccctgcccctttctgtgattctcctgtcttctaaataatcagtgaccggggaagatggaaggggcatggatgaactctgccatagaaaacttcctcccagcctgaaaagaaggatgccctggaaggaacccccggaccctcccgaatgggagaaaaaacccttgggggaattgg

SEQ ID NO: 322269 - DNA, 877 bp, Homo Sapiens
cagctatgaagatttttgtaacaactaaaaactcaaaaaaccaaggcatagaggaagctttaaaaaatcgcaattttactgtagaaaaaatgagtgctgaaattaatgagataattcgtgtgttacaactcacctcttgggatgaagatgcctgtgccagcaaggacactgaagccatgaagagagcattggcctccatagactccaaactgaaccaggccaaaggttggctccgtgaccctagtgcctccccaggggatgctggtgagcaggccatcagacagatcttagatgaagctggaaaagttggtgaactctgtgcaggcaaagaacgcagggagattctgggaacttgcaaaatgctagggcagatgactgatcaagtggctgacctccgtgccagaggacaatgatcctcaccggtggccatgcagaaagctcagcaggtatctcagggtctggatgtgctcacagcaaaagtggaaaatgcagctcgcaagctggaagccatgaccaactcaaagcagagcattgcaaagaagatcgatgctgctcagaactggcttgcagatccaaatggtggaccggaaggagaagagcagattcgaggtgctttggctgaagctcggaaaatagcagaattatgtgatgatcctaaagaaagagatgacattctacgttcccttggggaaatatctgctctgacttctaattagcagatctacgaagaacgggggaaagggagattctcccagaggctcgaggcttggcccaaccaggtgggcaccgggcccttgcaaaacctgcagaacaaaacccaaccggggctgggggccaacagcagaccgggccaaagcaactgtgacacctttgaggg

SEQ ID NO: 322270 - DNA, 1138 bp, Homo Sapiens
  misc_feature (18)..(18): n is a, c, g, or t
  misc_feature (31)..(31): n is a, c, g, or t
  misc_feature (63)..(63): n is a, c, g, or t
  misc_feature (124)..(124): n is a, c, g, or t
cttgtctggtctcatccnaaagagtaaggcnaaaaataatcaaggtcacaaaggacttatganccaaggtgtaactctgcaaatatctttaactggtcatggcttctttgttggatcccttccnacttattagaagactcagatgcttcagcctagttcaaagtagtacacttcatacctcagcaaagtggaccaaaaaagaggaaaacacagaatacaagaaagagttgacaaagcaaatgtaataaaaagtatggttggtttgaacagtcactggtatgatttgaacagtccttatggtttgaacagtcaatatgattctactttgagacaggctcctccttttgactactgagcaattaggatattttcagtggtttcgattcctttttccccattttctttaatgttctgtagttttctggagttctgaaccagggatactaaactctccctaaaatcactagtcccatgatctctgccaacattatgaagctcatcaaagaaagtcaacgtctgtttgagtttggcctgaacaatttttgctcttctaattctgcaagaagggcctgcttagtacataattcagtctggtacttctcctgtaactgttcaatttgtttttggagatgctgaaaatcttcctcactataaggtgtctccttacatttatcttcaggaagccaagatgtttgaggggaatacgtaaaatcagctgcaaaaacagttgctccattttgctaaaaaggttatcaaaatgtcctttcatgaagcaaagaaacttctctgtgcatttgcgaatctgcactgggctaatgtcacagtctgggatgccatccagcttcttcagaataacctgttcaacggcctgcatcacttcaaataggtagtcttgaaatgcaatgtagatccgaagcatgcacgtttgtggcgtgaagccaaagaactgggcctcgtaggtcattggatccacagacatcttggcttattttgctatgttgttttcagtcgtgaaaaaccggagcgaccatgagggtgacgatttgaagcacacacaggcttcccgccacctcctttaaaccgccgctggcttgccagggacagacggcgcggttggctccccaaaattccgactccc

SEQ ID NO: 322271 - DNA, 872 bp, Homo Sapiens
  misc_feature (205)..(205): n is a, c, g, or t
atgaaaagtgcgaagcctccctttttctccttttgtctatctggagggcagcgatgtggatatctcactttgggtgggagaagaggagcatgactttttttctgacatttctgattcttcctgtagctcatcctgctgctcggatgtactgccttcacttagggaatcatcatccccttcatctgggtcatcctcatcttcaccncccacttccctggggagagcccgctggggtattatcaccagatgcagaggagcgtttcttcttatgaacaaaaacatttttccgcctctttctcctcttactggcttttttcagggcacaagctaagttactatgcccaccaggtggcctcccaattcttttatttttcttctttccgtaatagtgtgtgtatttggtctttgtaagtacagaacagttctcagaacacttatccagaaccatccgtggaccgaagaggttaggacagcattccagtttgatacaggtttgccggcagaattcagtcacccgatctgctgttttcactatctcaacagtagcccgataactctttcctttatatttggctctttaggacttccccacatccgtgccaccacagagtctttgtccagctggagctcccgaaggacacggctgggtttgtaggctgcattgataagtaaagtgaggacctctctaaggaccagaacacagttcccaggtcctacacattgaggcagctcagcaattcttcctttgttaagatatggccctgagaagcaacggtggttgaagtatatctttggacagcaatattttccattaatcataactgactctgtggagttcagctcctgattcctcaggccctcgtggacagtcc

SEQ ID NO: 322272 - DNA, 1155 bp, Homo Sapiens
gggccggggatttcatccgggtgaagggacccttggccctttcagggaagccgtccccgattgggaacttagccatttagcccgggagccggaggggaatccaacccggattttcccatcatctccgtgttccctcagccggtctggggaatgggtctttttaaacacgggataacctgctgaaagaagccccatcgatttccctcccagttcccccaaggcaaattcccggttttcatcattgtcctgggagcaatatggcccagcacttcacgccaatacagtttgttggcatcaaaaggcatctttgccttcagctttttcaacagccactgtagaagaccctgctgggccccctctgtacccatctcaggccggagctcagccatgtttttccccaatagccagagtgttgtggacgccatctgcctccttctttcacagactcatccaggcgctccagattctgtaccagcagtgctaccacctgcccatccaccagagcatcgatgagcacttctgctccctcttcactctcatggaggggtgtctatatctgttaattcctgaagcaaatcgaccacagctatggacacatctgtattatcgtgtccgagcaagccgagaagcgactgtacagcattcagctccaccagaaggtggtacaggtctggcatggtggccaccacgtgcatctcctgaatgatgtcatttaggtccagctcggattccatgaacttctctggattgtctggaaacttaatccgcaattcttggtttttatatgatctcttttcaaatgtgaggatcattttcttcactgagctttcatccaatggctcctcctcttcctcttcctcttccccatctctgtcaataatctgcagcagcctttttttgtcatcatccgcttcctccaccacagtcatttcttcttcccgatagcggccgcgttctcgagtaccagtttgtttccgacgcatcttctgctcctcctcttcatcatcccggggacgttttgtgcccctattgggctggtagctcagaagttcgcccacgtccatggtacccggcccagcaaatactccacttccctgcactcacgcccagaccgcgggcccgtcagccgcggctccagccacactgccgtaaagt

SEQ ID NO: 322273 - DNA, 1414 bp, Homo Sapiens
cccccggatatttaaaatgcaactcccattagtcctgtcaactttttccacggtcattttcagtgaatttattccagaaagccgggtcccgctgctgccctccccagtttccgcaggagggaagccagggatcgaccagacatgcttttcatgttccttttcagtggttcccactttcttgatcttcgtgggagatttcataaagaggggaaagatggttcgtaagccaagaatgtcaacaaacttatggcagttgtctgtgccttcgggggccaatcatggcatggtccagcactttcagggcactgctccgggagatcttcttttccctgagcatgagattcatcagctgaagaccctcgcccttcaggaagcgctcacgattggaactaagcattagacaggagccagagggaatcaaacagattctccatcatctcctgctcctcagccgtgctgggattgtgtcttttaaacacggataactgctgaagaagcacatcgattccatccagctccccaagcaattccctgttttcatcattgtcctggagcaatatggccagcacttcactgcaatacagtttgttggcatcaaaaggcatctttgccttcagcctcttcaacagccactgtagaagaccctgctgggcaccctctgtacacatctcaggccggaactcagccatgttttccacaatagccagagtgttgtggacgccatctgcctcctctttcacagactcatccaggcgctccagattctgtaccagcagtgctaccacctgcccatccaccagagcatcgatgagcacttctgctccctcttcactctcatggagggtgtctatatctgttaattcctgaagcaaatcgaccacagctatggacacatctgtattatcgtgtccgagcaagccgagaagcgactgtacagcattcagctccaccagaaggtggtacaggtctggcatggtggccaccacgtgcatctcctgaatgatgtcatttaggtccagctcggattccatgaacttctctggattgtctggaaacttaatccgcaattcttggtttttatatgatctcttttcaaatgtgaggatcattttcttcactgagctttcatccaatggctcctcctcttcctcttcctcttccccatctctgtcaataatctgcagcagcctttttttgtcatcatccgcttcctccaccacagtcatttcttcttcccgatagcggccgcgttctcgagtaccagtttgtttccgacgcatcttctgctcctcctcttcatcatcccggggacgttttgtgcccctattgggctggtagctcagaagttcgcccacgtccatggtcctcgtgccgaattcgccacccaggcgggaccgccgcatccgggaaaggt

SEQ ID NO: 322274 - DNA, 1641 bp, Homo Sapiens
  misc_feature (104)..(125): n is a, c, g, or t
  misc_feature (181)..(181): n is a, c, g, or t
  misc_feature (187)..(188): n is a, c, g, or t
  misc_feature (232)..(232): n is a, c, g, or t
  misc_feature (234)..(235): n is a, c, g, or t
  misc_feature (242)..(244): n is a, c, g, or t
  misc_feature (246)..(248): n is a, c, g, or t
  misc_feature (250)..(253): n is a, c, g, or t
  misc_feature (255)..(275): n is a, c, g, or t
  misc_feature (277)..(277): n is a, c, g, or t
  misc_feature (279)..(309): n is a, c, g, or t
tttttattgggggggagaattcccaggccccttatgtttattccccgggttttttcctggggaaaccgtgttgggccccagtttgcccgttcccttacgggggnnnnnnnnnnnnnnnnnnnnnnggtttttagaagaattttttaaagggcccgaagggcgccccacaaaagggaggagnaagggnngggggaggagggtttcaaaggggaaaagagaaggagggggggangnnaaagggnnnannngnnnngnnnnnnnnnnnnnnnnnnnnngnannnnnnnnnnnnnnnnnnnnnnnnnnnnnnnaccaaaactagctttaatttgtccaaaagccacacagagttgtgtagaaactgatcctgggagggaagctgagagagtccatgatgcgcagggccatggtgcctctagaagttctccagcaagcccaggatgcgcttttgctcgttctcccggaactccgggctccggccgtccccgatgttctctgcatactccttgatgatatgcctgacaattttgatggagcttcctcgcatgtttaggatctggtgaaccctctggcgaatctgggggacattggcattgcagatctcggccatgatgtagcagatgtgctggagaacaaagagccccgcatccaggcgccggaggtagaactcctcctcggtgtcattgtcgatgatctctcctcgccggaccatgtcgtgtttttccccttcaatcttcttgtccgccacctgcattgcacccagatatttaaaatgcaactccattagtctgtcaacctttctcactgtcattttcagtgaatttattcagaagccgggtccgctgctgccctctcaggttccgcaggaggggaagccaggatcgaacagacatgctcttcatgttccttctcagtggttcccactttcttgatcttcctgggagatttcataaagaggggaaagatggttcgtaagccaagaatgtcaacaaacttatggcagttgtctgtgccttcggggccaatcatggcatggtccagcactttcagggcactgctccgggagatcttcttttccctgagcatgagattcatcagctgaagaccctcgcccttcaggaagcgctcacgattggaactaagcattagacaggagcagagggaatcaaacagattctccatcatctcctgctcctcagccgtgctgggattgtgtcttttaaacacggataactgctgaagaagcacatcgattccatccagctccccaagcaattccctgttttcatcattgtcctggagcaatatggccagcacttcactgcaatacagtttgttggcatcaaaaggcatctttgccttcagcctcttcaacagccactgtagaagaccctgctgggcaccctctgtacacatctcaggccggaactcagccatgttttccacaatagccagagtgttgtggacgccatctgcctcctctttcacagactcatccaggcgctccagattctgtaccagcagtgctaccacctgcccatccaccagagcgtcgatgatctctcctcgccggaccatgtcgtgtttttccccttcaatcttcttgtccgcccctcgtgccgagatgccacccaggcctcgca

SEQ ID NO: 322275 - DNA, 931 bp, Homo Sapiens
  misc_feature (82)..(82): n is a, c, g, or t
  misc_feature (86)..(86): n is a, c, g, or t
gcccccaaacgaatggttctgaaaaatttctcgagggcccgaggccgaccaaaaagggggggatataggtgatggaggtttnggtnggagtcctctgagaatttattacttgcggatcacagcagcaacgggcgggaagggcggcgccagactcatttgccccggcaggtagatcttgggggtctgccagctttcgggggcttcctttagccccgctttcagccagatgcgcctcaggtctttctcgaacttgatctgcttgcgtctcaggcgtccctcctggaccttcctccgcaggaaccgcgtcttcttcaccagcttccggtacttgtggtggttcatcttccgccggcggatcttcagcacgtttttgcactgaatttgaggcgcatccgcgacgccttcatccccctgctcggccccttcccctatctggctgggcggacactggtaggattgcggtggagccacagtccctgcggtcccggtatccagtctgggcaggaagcagcgggccgtgagccagctctccagggggctgacggacatcttcctggggaccagcatctcctccagctccagctgggcccccttgcgagggagagaggccgccctacctgggccggccggcgatgtgctgtaaaggggcccgcagacccggctgcccagcactccagagacgggccaaggcgggcggccgcctgcccaaggaacggccctcaacagctgggaagtcaggcgccccaggagcatggtctgtgggcggcggccacaggtcccaggggagctcgacgcggctcaaattgaccgttctgcggccgccctcgggcacttccggtccgtccccaagtcggccccgatcggcagcggccacccggcggttcctacgcacagcgcccgctggcgtcctcgcggcccccgcttctgcatt

SEQ ID NO: 322276 - DNA, 877 bp, Homo Sapiens
cttgtcgaagttcctgtgcggaatttattcttccggtccccagcagccacgggcgggaagggccgcccccaaactcatttgccccccaggtagatctggggggtttgccagccttcgggggcttcctttagccccgcttcagcccagatgcgcctcagttctttctcgaaattgatctgcttgcgtctcaggcgtccctcctggaccttcctccgcaggaaccgcgtcttcttcaccagcttccggtacttgtggtggttcatcttccgccggcgggatgttcagcgcgtttttgcactgaatttgaggcgcatccgcgacgccttcatccccctgctcggccccttcccctatctggctgggcggacactggtaggattgcggtggagccacagtccctgcggtcccggtatccagtctgggcaggaagcagcgggccgtgagccagctctccagggggctgacggacatcttcctggggaccagcatctcctccagctccagctgggcccccttgcgagggagagaggccgccctacctgggccggccggcgatgtgctgtaaaggggcccgcagacccggctgcccagcactccagagacgggccaaggcgggcggccgcctgcccaaggaacggccctcaacagctgggaagtcaggcgccccaggagcatggtctgtgggcggcggccacaggtcccaggggagcgaaaggtcccagaacggggaggccggccccctccccgggttcacccccgcgcgaatcgcgttgcctggcgcccggaccctctcggctggaccccgggcccgcctgccgcagcgcccggcgccctcaggcctcccgctgaccctcgtgccgaattcgccacccaggcc

SEQ ID NO: 322277 - DNA, 885 bp, Homo Sapiens
caccaagctttccggtacttgggggtggttccatcttcccgccggggggatctttcaagcacggtttttgcactgaaatttgaggcggcatcccgcgacgccttcattcccccctgctcggccccttccccctatcttggctgggcggacactggtaggattgcggtggagccacagtccctgcgggtccgggtatccagtctgggcaggaagcagcgggccgtgagccagctctccagggggctgacggacatcttcctggggaccagcatctcctccagctccagctgggccccccttgcggagggagagaggccgccctacctgggccggccggcgatgtgctgtaaaggggcccgcagacccggctgcccagcactccagagacgggccaaggcgggcggccgcctgcccaaggaacggccctcaacagctgggaagtcaggcgccccaggagcatggtctgtgggcggcggccacaggtcccaggggagctggaacacaagtgcccgttcaggtcaggcggcagcgccttcagtagtcgcgggcgggccgggactggggcgtctggtcccgccgcgaccctcgcttcccttctccctccgccaccccaacccacaaggaggactttgcttccaacacagctcgcgccccgaggctcccaagcccccgacgcgggcggtgtcgcgctcggacgcaccgaaaggtcccagaacggggaggccggccccctccccgggttcacccccgcgcgaatcgcgttgcctggcgcccggaccctctcggctggaccccgggcccgcctgccgcagcgcccggcgccctcaggcctcccgctgacccttcccaagcccgacctcgacctcgtgccgaattcgccaccca

SEQ ID NO: 322278 - DNA, 872 bp, Homo Sapiens
cgcccaaaattcctcggattcggttcgcataagcgctttcggcagcaagaggcccttccggccctatgcacagagggtggctcacctcctcctccttctgcctgggcttcttctccgggattcgtgcccccggcactgaaaaagagttttgggctggcccttccacagccccggtaaagccacagcctgcttcgggatggccccgcccgttggttggccccggccaatgactgcttctaaggcggcctggttcacataatctgtaatcaatggcccccttctctaccaccttctgtagcagaggctcccagacgaatgacaataagcagacaatttttctcccgggttctggataagtgttcagaaattttgatctgggcatccctagagcttctcaacgctcccaaacacctgctcaagcgccttcaggcattcggcagtggttatccgggggtttgtttggacttaaggatgcgaataacatcagcggcggggcctctaagactctccatcaaccgccgcctcttttctacatcggacacctgccactcctctaggacctcattagtgtgctccagccagggatcaaaggtttcctctccaggccctgggatgtccctccccgagaaaagtgtcagcctcttgtaccatatggactcaacaagaggctgaataacattatccaaaatatagtttagcatctctgctggcatctctgggcccggggtcggagtagggttctgaaacccaaggacacgggcaacatcttgcacggtccacccctctctagctaggaagaggtgcaatctttctaaaaattcagccgacgcgtgggtcgacgatatcccgggaattccggccgtaccagcctg

SEQ ID NO: 322279 - DNA, 468 bp, Homo Sapiens
  misc_feature (117)..(117): n is a, c, g, or t
ttgagtgaacaccctcaaaatatctcccacgagggttcccttacctgggcccagttccaccagctggaaagctgtgctttttccagtggccatccattcactaatgaaccatatacntagtagctccccaaagatttggcttatttcaggtgaagtaatgaaatctcctttttcgcctagcatgtcacggtacacataataacccttggctggattagtcaacacctccttcatgtactcggccacagtgatgggaccagtagactttattttgtacataagatgccgcagcatcggcgtcaccgggttttctgcaggctcattcccggagctgaagtatttccctctccaaataaaaggaatggctgcgcgcgccacggcacacaacggccccaaacctgacctcagcagtacactcatgctgaaattcgcaggctagctcgctccgccaggagctggggcttagac

SEQ ID NO: 322280 - DNA, 1120 bp, Homo Sapiens
atgtgtggctcctccctttaaaaaaagacttgctgcgggctggagagttctgagattggaaatcataatgcattcaggttcttgagaaagtaccgagaaaaatattgtactttcaatgatgatattcaagggacagctgcagtagctctagcaggtcttcttgcagcacaaaaagttattagtaaaccaatctccgaacacaaaatcttattccttggagcaggagaggctgctcttggaattgcaaatcttatagttatgtctatggtagaaaatggcctgtcagaacaagaggcacaaaagaaaatctggatgtttgacaagtatggtttattagttaagggacggaaagcaaaaatagatagttatcaggaaccatttactcactcagccccagagagcatacctgatacttttgaagatgcagtgaatatactgaagccttcaactataattggagttgcaggtgctggccgtcttttcactcctgatgtaatcagagccatggcctctatcaatgaaaggcctgtaatatttgcattaagtaatcctacagcacaggcagagtgcacggctgaagaagcatatacacttacagagggcaggtgtttgtttgccagtggcattccatttgggccagtgaaacttacagatgggcgagtctttacaccaggtcaaggaaacaatgtttatatttttccaggtgtggctttagctgttattctctgtaacacccggcatattagtgacagtgttttcctagaagctgcaaaggccctgacaagccaattgacagatgaagagctagcccaagggagactttacccaccgcttgctaatattcaggaagtttctattaacattgctattaaagttacagaatacctatatgctaataaaatggctttccgatacccagaacctgaagacaaggccaaatatgtttaaagaaagaacatggccggagtgaaatatgattccctgctgccagatgtgtatgaatggccagaatctgcatcaagccctcctgtgataacagaatagaagcactcccctgataaatactttctgtgctccagggaaccccttttttcagacaagaagagataatgtcttcagt

SEQ ID NO: 322281 - DNA, 626 bp, Homo Sapiens
ttgacttagaaatttaactttatttacaaatgttctcctataaacaaagatgccattctacacctttaaaatattgtaactgataatttccataaaaaccatttacatagtttcaacctttctgcataaaactgtattatgagataggcaaacaatctcacaagatggtctgagacataaaaacaaaagacaacctatccagcatcaatgtcctattgacaaactcaatgaagaattaagaatcacactccacaatgtgctgctccaccaagaaatagaaatgtaatgattttttgaaaggtaaatgcttcacaataaacagtcttcttgggtagtacagtgtaattgtgattgtttaggactgctcttgtgggctaatatttacgctgttgttttttttaaatcatcattgtaaaaagggcagacttatagatttttctgacaatgaaaatctgtagacactggtctggtctcatcattcaggcaaattaataaaataacaagtgcatggaaagaatgttaaacaaaaacataatcatcatgtgactgacagaattctccctgaaatcagagaatattaatactcaatagtatgtataaatttgaatttatagctgagacaatag

SEQ ID NO: 322282 - DNA, 564 bp, Homo Sapiens
ataaacatttccccaaaagaaaccatttaactagtggaagaccttacgccaacaggttctttctgctctatgaatgaatccgccttttttgccggacaaatacaatccattgtaaatgtcaggtttctctagaggggggtgagaggccacccgtcagcggacacctcaggcacctagagaggaaggccattccacaccagacgccacaagaaacccagagatgcttccaacagcgagaagtaacgagagtaaaatcagacacgattaaaagatgctgagctgacatacacacacataaagcttcccagctaccgataccagctttaaaattacaataacaaggttaagtggatcaaccttggccttcctatgtgtaggtagaattcctgtctcttcccagtggaaatcgtattgatcccgctgctgctgaagcacctccccactcagctctgatttgtaatttatgcacttgatgcatattttagaaaatcaggctctttccaatgctgcctctcgacacacaataatgtgtgttgtaatccaaatgctgactttaaatccatg

SEQ ID NO: 322283 - DNA, 899 bp, Homo Sapiens
  misc_feature (48)..(48): n is a, c, g, or t
ctccctctgttggtgatctgatctttgagtggggaaatctgttagaancagcctcctcgagggagccctccccctggcactgcccctgggtttccaatcacatccacggagacgtgctggtttcatcacgctggccactgagaaggcgcgaggacaggtgtcagcgttccctggacacgtcctgtcctggtaccacggctggtcaggcctcttcactgtgtggacagacacgtggggagaggagggaatgctgggagtagtaggcatgaaagactggttactgggctgaaagctagatcgccacttcccagccacaatttgtcaatccagaagagggttgaagactgtaattttctcgtcgatgctttataagcaaggtcagacagaaaagaacttccgtaaaaatggctgaggcctcagtcagagactgaaatgcgacccagttaccatctcctgagactagagaagggtaggaaggaatgtgtctaaacaattagtgaggctgagcaggagtccctctgtgtctgtcctcaggaacggaagtcatcccgtctagggctggctggcccctatgtcaacggcagacaccgaggggggagacagacaggacaccatcactccccatatccaaaagcctccgcaggcggcatgtgcagtgatgaacagcaggtcctctggctgcagagtgaccgccgcactgccggggtacgacggcgagatgtgcggccaatggcaggcggtgtgttgcagccaccggatagataattaatatgattgggaacacacagagcgagcatgcttttgctgactgaaaggcccactagcataattactgttttcttaccagctcactgtctgtacacatttcaaagcgtggttggtgttagactgctgcgtaa

SEQ ID NO: 322284 - DNA, 893 bp, Homo Sapiens
aggtttcccaataaattaccagtattattataacttagtaataatattattattgtcatccctataaaattttctacagatcctaagaatcaggtgtgtgatagttttacattaccaggattaaaacttgaactagacagcagaaatgataagcatgcactaattctcatatatggagatgctaaaaatggacatacattatctctaccagctcctgtctgtcgataccacctgatctgctcttccagcttcataaccatgttccttaagtcattcttctcttcagtcagttgactgatatgccctgtcagctcagcattttgtctcagtagtctttcagtcaatgagccacaagaagtacttggggacaccaagctgggctcttcaccttgctggccagttaatttctgtagttgtaaaataatttcatcaatattttcctgaacccaaatgaaatcttcatcatctgctgtttcaaactgtagtctctcagaggctttctggggtagaacctgtagttttgaagctacacattgaagcttttgtctgatcatttctaattcatgattacagccggttcctcctccattcatttcaatcaatttagcgtagtttgattcttttgtttctccttctattttctgttgaagaacccaatttctagttctatcactggttaagctccacgtggttggctcattaaggttctgatacagaattcttctactttctcgtttttcttctcgttctagttcttgcttctggaattcctgcatgattccttgtagtcgctgtccttcaaggtctaacttataaacttgttgtcttttctcttccagctggcgctgaagatcttccactttggactggagctcatgcatttttttctgtcc

SEQ ID NO: 322285 - DNA, 1438 bp, Homo Sapiens
tacgaggccgacagtgcctgcagagctgcacagccgagaagttagctcaaagctctgtgggagccccagcctgggccgataagagtgtggtaccgggagaggagccctggaactggtacacgcgatgaggtggtgaattggctaagggctggatcgtgcagtagcaccctgtgcagattcgtgggacagtctgcaaaccaagcgcgttgtgggtggattccgtcccattgtgttcgagagggccgtttatggggcaggggtttccaggagaatctctctgtttccatttctgataaagagggacatgaatgagaagagcatctgggcaccgactaactcccccgccaagactggcttttcagacaaacccatcagcggtttcgaaacctgaaccttagcacatccacttccctctgatatcaaaggaaacttcaagtctgaagcggacttggcaagcatgttattaataactgtcatgcttattaacgaatttaatccggcctgctgcagaaatgagttgcagcaacgtgacacagtctcccgacacacttcattgatgtacatcttaatctggccctgactttcaatactcgcatttaagttatccggggcaaacaagcctctctaacagtggggtctggagtggggctcgtgtttctagccattgagaggctggccaaatggctattgatatcctggctaaatggaaagcccgcatccttgggctcggcaacaacagttttccctgaatgaaaagacacttggagaggtccagaacacaactgccatttttacaattttgagcactccaagtatttttatgttcataggggaatggccgctgttttattgggtgtgctcggttggccttgcctccccctgagggcctgtcctcagtgccacctggggccgcaggttcagtccaatccccatcctcagtccagggccgagccatagtttcaaaatcaaaccaaatatcaggctcctcctcatccagctcctggtcatcgtcccactcctcttccccctcctcctccagcttctcactgtcatctcttcctatggtcagtttgtaaacgcagtagcaggcaccagccccaatcatcagtcctgccgccatccaacccacttcccgagcccggcccatgctcaagtctgtgccagccttggggcaggacaggagagggccttgctccacctgattgaagaggtctctcaggtccagggtgagtaaggatggagggtagcagtcttcagcttcttccaggctcttgtagctctcttgtgatgaatctgcaaggttccaaccaaggcagttttctccttctctcgctgaaacttgtgccgaaacctacaggccaacagacctacaaacctgcacggtccgagctagtttccttctttcttcacacgcctgcagagtaatagggggctcccc

SEQ ID NO: 322286 - DNA, 434 bp, Homo Sapiens
tttttatcaatcaaagcacacaactttattgatgatacacacagatgcggacttgggtggaagaggttaagtcggtacaatagacagaagagcagtgcacttttttgatgaataggttcactatccatcaggcgcgtgtagaagaaagagcaaacgaaaaataattcaacctaagctgcaacaaatgcattttcagctcaagccgcgatatgcgtctggtctctgcaaagcgggtcccgcttgggacagggagaccaccacagggcaacaataggcactcgtgatgctgtaatttgatgttctttgtccacagcagggcagctgaaggtgatccccctcaccacatgaggggggctgcaggggaggggttttacaatggccaacattgcctgcaggcttgcacaaccaggaggttacttcaaggttttttgggg

SEQ ID NO: 322287 - DNA, 485 bp, Homo Sapiens
  misc_feature (349)..(349): n is a, c, g, or t
  misc_feature (352)..(352): n is a, c, g, or t
attttacaatgcccaaacattgccctgcaaaactgccacaacccaagaagttactcaaaagctctgtgggaagcccctgcctggcccaataagagtgtggtccctggattgagcccctggaactttccaccccaatgaaggtggtgaattggcctaaggctggatcttcagtagcaccctctgcagattctttgacatctgcaaaccaagcgcgttgtgggtggattccgtcccattgtgttcgagagggccgtttatggggcaggggtttcccaggagaatctctctgtttccatttctgataaagagggacatgaatgagaagagcatctgggcaccgactaactcnccncgccaagactggcttttcagacaaacccatcagcggtttcaaaacctgaaccttagcacatccacttccctctgatatcaaaggaaacttcaagtctgaagcggacttggcaagcatgttattaataactgtc

SEQ ID NO: 322288 - DNA, 525 bp, Homo Sapiens
  misc_feature (27)..(27): n is a, c, g, or t
  misc_feature (35)..(35): n is a, c, g, or t
  misc_feature (58)..(58): n is a, c, g, or t
  misc_feature (102)..(102): n is a, c, g, or t
  misc_feature (129)..(129): n is a, c, g, or t
  misc_feature (147)..(147): n is a, c, g, or t
cccctaaccaacataaagaaggctgcnaaggaggnaattaacaagcccaacattgccngcaaactgcaacaaccaagaaattaactcaaaactctgtgggancccctgccggcccaataagaatgtggncccgggattgagccctgnaactttcacccaatgaggtggtgattggctaaaggctggatcttcaagtagcaccctctgcaaaattctttgacatctgcaaaccaagcgcgttgtgggtggattccgtcccattgtgttcgagagggccgtttatggggcaggggtttcccaggagaatctctctgtttccatttctgattgaagaggtctctcaggtccagggtgagtaaggatggagggtagcagtcttcagcttcttccaggctcttgtagctctcttgtgatgaatctgcaaggttccaaccaaggcagttttctccttctctcgctgaaacttgtgccgaaacctacaggccaacagacctacaaacctgcacggtccgagctagtttcctt

SEQ ID NO: 322289 - DNA, 785 bp, Homo Sapiens
cttttctgccaatcaaagcacacaactttattgatgatacacacagatgcggacttgggtggaagaggttaagtcggtacaatagacagaagagcagtgcacttttttgatgaataggttcactatccatcaggcgcgtgtagaagaaagagcaaacgaaaaataattcaacctaagctgcaacaaatgcattttcagctcaagccgcgatatgcgtctggtctctgcaaagcggtcccgcttggacagggagaccaccacaggcaacaatagcactcgtgatgctgtaatttgatgttctttgtccacagcaggcagctgaagtgatcccctcaccacatgaaggaggctgcaagggaggaatttacaatgccaacattgcctgcagactgcacaaccaagaagttactcaaagctctgtgggagcccctgcctggccaataagagtgtggtcctggattgagccctggaactttcacccaatgaggtggtgattggctaaggctggatcttcagtagcaccctctgcagattctttgacatctgcaaaccaagcgcgttgtgggtggattccgtcccattgtgttcgagagggccgtttatggggcaggggtttccaggagaatctctctgtttccatttctgattgaagaggtctctcaggtccagggtgagtaaggatggagggtagcagtcttcagcttcttccaggctcttgtagctctcttgtgatgaattctactgactttccggacgcaggcctcctccgccccacttgtcgtccg

SEQ ID NO: 322290 - DNA, 796 bp, Homo Sapiens
tcaaggaaaggcctctttttccaagacccaagtaacgggggtgggttaaataacgaaaagaaagtttaagcgtttcttggcaaaaaacgtatttccggggttaattggcccccggggggtcttcctgggaagaacagcttcacggaccttgtcgcgcctcccctacctagcaccaattgtgatccagcggaaggaacttgtccgcacagttaagggcaaactccaccacaagccagactggtacaccacccgccaatcgcttgttagcgcttcttgggcttggccacaagtttgggcatccatttggcatgaattcaagtcgtggcttgcctccaccaagggactgcatgggcccatcactccctcttccggttcactccctcgcccagaagcccactttaccccccaagggtggcccccccagcccaacaatccgccggagccaattctttctcccgcgcccaggcctggatacaaggtcccaactttccgccccacaagttgaatggcctttaacaagctcctcaagcaaacttgcttttggccccaggcccgagtccatcctctccccggcctccgactcttcttcaagacactactaggatcctgtggggtgcgggggtcccgaggaaaagaggtgaaaaggacgacgtggagctggggatagtgttgatggaaataatgcttccaggcaaccacaagagctggcggggccagatccaccttgttcaaaaccagcaccagggccagtccaagttctccaggtcacatactcataaagtgctggcgggaaatt

SEQ ID NO: 322291 - DNA, 1199 bp, Homo Sapiens
  misc_feature (762)..(762): n is a, c, g, or t
gcgagcgcggctggagtttgctgctgccgctgtgcagtttgttcaggggcttgtggtggtgagtccgagaggctgcgtgtgagagacgtgagaaggatcctgcactgaggaggtggaaagaagaggattgctcgaggaggcctggggtctgtgaggcagcggagctgggtgaaggctgcgggttccggcgaggcctgagctgtgctgtcgtcatgcctcaaacccgatcccaggcacaggctacaatcagttttccaaaaaggaagctgtctcgggcattgaacaaagctaaaaactccagtgatgccaaactagaaccaacaaatgtccaaaccgtaacctgttctcctcgtgtaaaagccctgcctctcagccccaggaaacgtctgggcgatgacaacctatgcaacactccccatttacctccttgttctccaccaaagcaaggcaagaaagagaatggtccccctcactcacatacacttaagggacgaagattggtatttgacaatcagctgacaattaagtctcctagcaaaagagaactagccaaagttcaccaaaacaaaatactttcttcagttagaaaaagtcaagagattcacaacaaattctgagcagagatgtccactgaagaaagaatctgcatgtgtgagactattcaagcaagaaggcacttgctaccagcaagcaaagctggtcctgaacacagctgtcccagatcggctgcctgccagggaaaggggagatggatgtcatcanggaatttcttgagggaacacatctgtgggaaaaaagctggaagcctttacctttctggtgctcctggaactggaaaaactgcctgcttaagccggattctgcaagacctcaagaaggaactgaaaggctttaaaactatcatgctgaattgcatgtccttgaggactgcccaggctgtattcccagctattgctcaagagatttgtcaggaagaggtatccaggccagctgggaaggacatgatgaggaaattggaaaaacatatgactgcagagaagggccccatgattgtgttggtattggacgagatggatcaactggacagcaaaggccagaatgtattgtacacgctatttgaatggccatggctaagcaattctcacttggtgctgattggtattgctaataccctggatctcacagatagaattctacct

SEQ ID NO: 322292 - DNA, 933 bp, Homo Sapiens
atagaagggagtggagacacacttcaccagcagcttggcatccaggagcagggaaagaagttcttggtcacaattggaatcattcaccgtagtgactgccgtgatttgctccagtgccatctcgtgcagatgctcatctcggctctcgaggagaagtttcagagatggaagcaggagggcctgtttaagcagcagcagacacagctccttcacacccctctgcaggcagcatctgcttggtgttatacaaagagcgacacattttcaaaacttcattccccaatccttccttgttctccatcgtacatctggttagcatcactgtagctagtctcacccatggattattggttatgacatattcacttttcataggtggccaagcttgcaaaagtaaaaccaagtgctgaaattcagcctcgtggtgactagattccaggagttccatgaatagacagtagcggttctcttcattctcaatgtcagctatgtctacctgtctctggggccaggaggctttgagaatggcttcagttctaaagaacacgaggagcttgctgtcctcctcagtcaggtgaaatgattgccccaaaatctgcagcacgtgaatgcggggccgcaccggccaggcgtcatcagcacagaaaggccgcagccactccagcaggtcctcaggtgaaaccagctcctcacccttgtccacactggcgtggactgctgcaacaacaccttccaggaccttcagtgggtcccttggcccaccaaggtcagcactgccaccactcaatgcagaaattattttcatgattgcactctgcactatatccttgggtgagatgtcaagagggccaactgccacctctagcagctgctgaatcattgctagaggctgaccatctaaacaaatagccacagcttcatcatgaagtttct

SEQ ID NO: 322293 - DNA, 644 bp, Homo Sapiens
tttgctcatcgtttccatacagttttatttgcaatttgttggaaccatggagaacaatcggcagatacacatgttgcttctgggaacagcattcaactccagatgctttttctgctaaggagcagggccacaggtggcgctcacacccagtgctgtgctgcgcggagggctgtactgaaggttctgaaggcctggtgagtccccctcacggccagaaggagagacccggcttcggcttcatggccggcctcccgcaggtgtctgcccagctcctctgcatcccagcgcccttgctggaggctagccaagaggtggtcaacaatacgtggatagaagggagtggagacacacttcaccagcagcttggcatccaggagcagggaaagaagttcttggtcacaattggaatcattcaccttcaagaaataagacaggcacagcgtgatgggggtgtttgctttgttcgcctcccccttggatccctcgctctccactgggctgccttcatcatcattcatgccctggcctgggtttaaaagcgtgtgtgggtcacgagcacctctgaggtaggtcacagattgggatgacagacggggctcctcttaacataagaagacacaagaaccccactgcaatcatcacta

SEQ ID NO: 322294 - DNA, 828 bp, Homo Sapiens
gtaagagctagtgcctacgattatttcaaaggaaatactcaaggcgaagataaaaataaacaaatctttaaaagagcactaaaaattttaaagataattttttatttctgtatttttggaattactcttacagggtgtattcagtcttttgttattaaaacttcaacatcttcaggttctggaacagaattttataaaaataaagaagacattattccaaattacacaatttttgaagctacaaataaagcaggtaaaaacgaaattaccaaagcaacaaaaagtaataattatttaatttctgaaaaagatgctccagttttaaagcaattaagagtttactcgctgctgtgcccatctatcagcaggctccgggctgaagattgcttctcttctctcctccaaggtctagtgacggagcccgcgcgcggcgccaccatgcggcagaaggcggtatcgcttttcttgtgctacctgctgctcttcacttgcagtggggtggaggcaggtaagaaaaagtgctcggagagctcggacagcggctccgggttctggaaggccctgaccttcatggccgtcggaggaggactcgcagtcgccgggctgcccgcgctgggcttcaccggcgccggcatcgcggccaactcggtggctgcctcgctgatgagctggtctgcgatcctgaatgggggcggcgtgcccgccggggggctagtggccacgctgcagagcctcggggctggtggcagcagcgtcgtcataggtaatattggtgccctgatgggctacgccacccacaagtatctcgatagtgaggaggatgaggag

SEQ ID NO: 322295 - DNA, 863 bp, Homo Sapiens
cccagtgcttgggctttatttcacaccacttacgtgccaacaagctggcctagagcccacatcagcaggcaggtggcccacagtgccccaggacctaccctgcccccaaacaggccatggggcccattaggaagatgtggggcttcttgagatcagctccagtttttctcagagcccctgtgaaaggagttccatctgtttcctttggaaacctggactctggctgggtcagagtggactcctagttgctcctcttcttttttttctgtttaagcttgttccaaatcctttccagggccacttttcccatgaagaaggtgatggcaaaattgcgcttgtaccaatctctgttataatacatgtgcttctgaaaatttttacttaaaaattccttgtagaagtccgccatttcttctgcattcaatgttgctttctgacctgattcagttctcaggcccaggcctttagtttttagtcttgagtgaataaattcttctttttccttactaaaagtcaaattctggtttgcccagaactgttgattccattcttgtgtttcttgtcttaattttctaagcttttgttccaatggagattcattttcaggtatgtaaaagtgaacaggtcgaaggtttgaatatttatctgggggtcctatccaatcatggcaagactttcttggagggcagaatcttgagaccccgctgggcgctgtatccctgcgctcggcgccgcgctccggagcgagttgacagccgcggcaggcgaaggcgcggcagagaggggggagaaaggtcttcttccccgcccgcaagaccaccatggccccacgccccctggctcccgcggcgcacggcagcatt

SEQ ID NO: 322296 - DNA, 795 bp, Homo Sapiens
  misc_feature (20)..(20): n is a, c, g, or t
  misc_feature (26)..(26): n is a, c, g, or t
  misc_feature (476)..(484): n is a, c, g, or t
gggccaagggctcggtctcnaaaaanccaaaaccaaacccaaattggattggtttccccccctgccaccaatctggaattacccatttcttccggagccacataccaggcatttcatctttcaacctgtaatttctcctaactcatgttttcatgtaaattaaaaacacatgcactaacaaataaatatacagcatatatcaagaacacaatataatttgaaagtgtcgaagaaaatacttatacaaaatttaaataaagaaatcattttgtcgaactctagtccatcttattgtctaaacacatatttgcaaaatattttcaaaagattgtatgattatgtgcaaagttcttagtggtcttcatccactggtttggtagtttcagcattttgcttacaacaagtaattctttatgcaatgtgaactaattctgaattgcagtaactaactaggtcatagaaagatatctatgtgnnnnnnnnntcactacaattaacctttagcctgctagatttagtttcttaattaaaaaaacagtatagaaccttctataattaattttccaacctttttaaaaaaaattaccaaacatcttgttgacagaacatttgatgtgatgggcagacatgcatattgaggatatatagtactcagcaacaacttaagtgttttatccttacggtcagctttggttaaaacagtaacataacaaaattaatagaatcatgcatcgcaggtgataaatgattcaaaatgacaggaaatcaatttaattaagaaatagcaacacttaa

SEQ ID NO: 322297 - DNA, 391 bp, Homo Sapiens
  misc_feature (35)..(35): n is a, c, g, or t
  misc_feature (45)..(45): n is a, c, g, or t
gccccatacggggccattcccacccttccaccccngtaatttccncccctacctccaggttttccatgtaaattaaaaacacatggcacctaacaaataaatatacagccatatatcaagaacacaatataatttgaaagtgtcgaagaaaataccttatacaaaatttaaataaagaaatcattttgtcgaactctagtccatcttattgtctaaacacatatttgcaaaatattttcaaaagattgtatgattatgtgcaaagttcttagtggtcttcatccactggtttggtagtttcagcattttgcttacaacaagtaattctttatgcaatgtgaactaattctgaattgcagtaactaactaggtcatagaaagatatctatgt

SEQ ID NO: 322298 - DNA, 1375 bp, Homo Sapiens
cccccgggaggctccagcaacccttgccgggcctcccggagagaaaaccggtttcccatcggggatgaaaaccgaaggtggggtgatccccccctgggggccctcccaagcaaggggagaggggagccatcatcccagggcatacagccccagggaagcgcccgtaggagccacaggcatagaggggctgggctgggctgaaggctatgcaggagatgatgccgctctggccctgcttttttgcaaatgtggctcggacctcgcagtctcggccaggccgggccgtgaaaaaacacgcccagtccgttgaagccacagaagagctgggagccatccggggagaagcagagcgaatgggctgccgtcagctcatccaggtggttgtaggcgcgaaaggaagcccggagctctccagtgaatgcgtcccagatatgaatcgggttctcccggctgctgctggccacgtaggaggtgtctggctgggctgaggacatcagagaataccagcagtaatcatagatggtatccccttcccccattcgaagggccaggggccattttctgcatattccccctgctccccctccatggtccagctctgggggcaggttataatttcgcaagatgttatcagcactattgttcaagatgcaggaaccgtcaggagcccacttacagcctttcaagaagttctcaggttgggtgctgaactctgaccaggaaccactgagaaatcgaggcagctgggagaagctgtagttccaagcggtgtctccctcgtcctctgcagcgggttccccagaggtatcttccatggcttttccagaccccaactctggcccgttcgcttcttcttcagaaaggctcccgtttgcttcttctgcaggaaggcttgtattttcagaaagttcttgctcctcgattcgaggactcaactcactaggggaaccaaactctgtttccaggggagtggagagagaaactgggtccccctcccgtagctcctgggacacagctgagccagccacaggatctggggacaaccggggcggatcccccctttcgggaggcggtggcatcagttcagagtccgcatttttattcatcggggaagcgtggggagaaggatgggctggagctgggtcctggtctgaaggacagcagtccggagctaacggttgagtctccaaagtcttcatactgcagaggaagcacagcggagattagcctcagccaggatggcttcgaagttctcagggatccgacgcagagctaaagaaacccacctgtgcttccctcctcttctgggagtaggcagaagactcccgggaggagaggcgaacagcggacgccaattcttttgaaagcacttttt

SEQ ID NO: 322299 - DNA, 1010 bp, Homo Sapiens
  misc_feature (967)..(967): n is a, c, g, or t
tggcgcgggggggtttacaagggccccaatttggggtggccagttccctttttgtggggggcaggaaaaaacctcaaacccccgggggcttccgggctttccccatccatttgcccagggcccggttccggggttccccacaccagaagacaagccccgcttcgtggtgcccccctcacttgggaatgccccggtcgggtccagatcggaagttgattcgctgattgggggtcccctctggacccaggggcccacagtgggtaaccagactgcgggagatcccagcccaggagctcagcatccttgcgggctcctgagaagaagcggttgccatcgggatgaaagcagaggtgggtgatgcccccttggtgccctcccagcaaggcgagaggggagccatcatcccaggcatacagacccagggagcggccgtaggagccacaggcatagaggggctgggctgggctgaaggctatgcaggagatgatgccgctctggccctgcttttttgcaaatgtggctcggacctcgcagtctcggccaggccgggccgtggaaaaaacacgcacagtccggttgaagccacagaagagctgggagccatccggggagaagcagagcgaatgggctgccgtcagctcatccaggtggttgtaggcgcgaaaggaagcccggagctctccagtgaatgcgtcccagatatgaatcgggttctcccggctgctgctggccacgtaggaggtgtctggctgggctgaggacatcagagaataccagcagtaatcatagatggtatcaccttccaccattcgaaggacagggaccatttctgcatattccacctgctccccctcatggtacagctctgggggcaggttataaattcgcaagatgttatcagcactattggtcaagatgcaggaaccgtcaggagcccaccctcgtgccgaattcgccacccagcccncatacggaagccgcacgcatgacccgttgaagcggaggggggg

SEQ ID NO: 322300 - DNA, 955 bp, Homo Sapiens
  misc_feature (96)..(96): n is a, c, g, or t
cgtcagaagcaccatagtgatgactgagataagaaacaaatatggtataattctggaaagaaatgtaaaacatggaagattatttcctcacagaanaatggaaaaaggatttcaactgcagtttttcttcagaagtcttttcaaatattgaaaaggaagttacacaagctataaaaaatgccattgttgtcacaacagagggcattaggagttcatccttcaatagaagaggtagcatactaaatgttgacacaagtaaaaaccaagtagacataaaaggaatttcacttaaaactaagcagactggtagtgacaccaagagaatggatttttcatgtacttggaaagaaaataaaaagaatgatagcgcacagctaaccagtgtaaatttgaatcctttggaagagggctgaagtattaattttatgcatgcaggaagcaggctcaaaaacgtagaacaaaagctcattattaattggatgtgacgtggcaaaatatccttaatcttcagaaagacattgaagctgcaccaaatattggctactttatccttaaaagagatttgttagctttacattctggtataattgaaagaaatattaaaacccatgaagtacagcccataatctctaataaactttttgagatgtgaaacttttagtcacaattataactaaatagattaaatcctccaggaataaacatatacgcatacactgtctcaagcatttttcatttttgtgcagggcagttgatcaaaagcattggcccaccataatccagacattcccaaatacttaatagttttcaaagagcagtgcactatccctgaatactaaagtccttcatctttggaaatttttctaagaaatgttttttctacaatttatagaatacatattacatttgacccatttttatcacacaactgaatttacttagagtaacagagtaa

SEQ ID NO: 322301 - DNA, 985 bp, Homo Sapiens
  misc_feature (46)..(56): n is a, c, g, or t
  misc_feature (73)..(194): n is a, c, g, or t
  misc_feature (276)..(289): n is a, c, g, or t
  misc_feature (297)..(417): n is a, c, g, or t
gagaagtttttaataaatttccccccctttttccaaaaaatgcccnnnnnnnnnnnaaatttaataagaagtnnnnnnnnnnnnnnnnnnnnnnnnnnnnnnnnnnnnnnnnnnnnnnnnnnnnnnnnnnnnnnnnnnnnnnnnnnnnnnnnnnnnnnnnnnnnnnnnnnnnnnnnnnnnnnnnnnnnnnnnnnggttttcctggggaaacatttggccccttttcccttccctttggggcccccgcccccaaaaaaagttttaaaaaattttttnnnnnnnnnnnnnnccccaaannnnnnnnnnnnnnnnnnnnnnnnnnnnnnnnnnnnnnnnnnnnnnnnnnnnnnnnnnnnnnnnnnnnnnnnnnnnnnnnnnnnnnnnnnnnnnnnnnnnnnnnnnnnnnnnnnnnnnnnnctgttcagaggattttatttcaagataaatcataacttctacccatactatgattccaaagggtgaaaaaagtgttttgcctcttctaccctccaaagagggcatggcaatgccaatgtctctaaaatgcctctgcatagttgtcagaagctatatttcagtcattgaaaatacttgtccattttcagctgaggtaaggtttgttaggaaacctctgtaacaacttattcaatttatttggaagtaaactcccagactctcccagggtttcctgtattgatctcatctttcgggcttcctgagccctcgcggcacaatcgaggaagccctggatctcttttctgcacgcatcgtcgcggaattcattctgcttccagcaagccatcatcaccgacatctccgtgatgcaagtcgcctcgcccttctcccggcgccgctccccgacgcggttagctagaatgagaggtttattgggcttcagcacaggcttccgcgggttcccaaaccgcgccagacgaccccgcaggctgggtgtcgccatagcgcaccaagctcccggcaggctttt

SEQ ID NO: 322302 - DNA, 1260 bp, Homo Sapiens
  misc_feature (569)..(659): n is a, c, g, or t
  misc_feature (668)..(679): n is a, c, g, or t
agacaaaaccagaatgttgaatgtttattgcatcaaacaacttgatcattatcattagtagcaagctgccacacaattgcaaccgctgtgtttttgccataggcgcccgctgggacacccaagcaggaaccattgttgaagcccgtctcaaggagctggcatgccctatgccggtcatctttgcaaaagccacccccgtggacagacaagaaaccaaacagacctacgagtgccctgtgtatagaaccaaactgagaggccccagctacatctggaccttcaggctgaagagcgaagagaagactgcaaaatgggttctggctggagtggctctgcttctagaaagcgtaaggtaacactgggcattcctctagcctctgcttggagtgcagtgaggattttctagcatgttgctgcactgttcccatgcacattattctgactttttagtaactcacacgtgcattcttttttcaacgctatccttagagtgaaagtcagaaaaaaatactagaaactaactcagggctgagcgtggtggcacacgactgtaatcccagttactcagnnnnnnnnnnnnnnnnnnnnnnnnnnnnnnnnnnnnnnnnnnnnnnnnnnnnnnnnnnnnnnnnnnnnnnnnnnnnnnnnnnnnnnnnnnntccatctcnnnnnnnnnnnngtacatcataaaagtacatcatatgtgaacatgcaaaagcaatgcagccggaaagaacggagattttaatttttaacaaacaacaaattaaattattagcccttaaactctttcaaaatataaaagcagcaggccccaggtgagtcctgaaggaagaggctagcactctgtaaggcctccagtgtctacaatgttgatggtccccttttgttcagtcaagttttaataaaaataaaactgttctacagttaattgcactttgttcagtgtaaatttccaatgaccaagagcaggttaaacgatgtgtgtggtctattaaactgtggtcactcgtgctaaggcacacttggcctggagtgagttactgtttgggaagccaaagatagatagatcaagtgcaggagctgatcatacaatgttttctctctaacttacttacctgaactttaaccccacccatttaaactgtgctttttaataactggcagatatttttaacaaagttcagcatacagacaggtctgtgcatacatctatatagattcctctgctctgctgtcttcctgagaaatctttgttaa

SEQ ID NO: 322303 - DNA, 1266 bp, Homo Sapiens
  misc_feature (947)..(979): n is a, c, g, or t
  misc_feature (1114)..(1114): n is a, c, g, or t
  misc_feature (1117)..(1177): n is a, c, g, or t
caggtgggccaggaggaatggagtagacgtagagctcccgtgaccaggactaccagcgaggctgggaaaaggacagatcataggtggggaggctaggcacgtgacgttattcaagtaacgatgacctgaagggtaacgtcaatcatacgcccagcttggatttctcaaccagaagccaatcccagctggtaaacccccagggcagtgtagagaacctgggattagagggagatggtagctaggcccaagcaggaggaaaagctcccacaggacagccccagggatcaggaacaagtacccaggcagttgggggacacacacaacatcccctaaccactacatgtggccatcacatttagcacccaggacttcctgggctgccagaatggagtcagtcactctgcagaaactgtgggagatgtaaggctctcaccaggaatacgcaactatccaaggtaaagcctttagtcagttccagtgcagccacactgggaggtgactttgcccccggccagccctcttcttggatctcgctgtctgtatggtgggaagatcctcaaagcagcagcccggattctcaataacctccggaggaggaggtctccgtcccaggaagagccctccgccttctccaagtgaaaaacaactcacctcaaacatatttcctctataaaatatctggtttctctgaaagtaataaatatttaccatgttctataaccaaggagcagcaacggggggacaagaggaagagaactttgctgtgactccaagtgacaaaatcctagagattcagggtgccatttttatttcccatggagctgaggacctgagcacaggcagccaccagggctgctcagaccctcccgaccttcaggggtgggagtggttttggagttctgatcttgggtaggcaggcctgtcatattgccagaaatacaggcatnnnnnnnnnnnnnnnnnnnnnnnnnnnnnnnnntagcaggaagtaaaggggacaatgaagagagctaagggactccttccttcttcctcctggcactgtctccttcctctttctgcctccacaccaatctcttggccaccagctggaatgtcaaacagtggattggtngannnnnnnnnnnnnnnnnnnnnnnnnnnnnnnnnnnnnnnnnnnnnnnnnnnnnnnnnnnnnaacaggatgacacccttgggaaagcagttggtgatggggcagggcacacagatgggcccgctgaaggcttttttcgtacgaaggttctt

SEQ ID NO: 322304 - DNA, 398 bp, Homo Sapiens
ttttttaactttgtatacggtattttctttttctgtatagaagtcaaactattttccttcatggattctggtttttgtctcttcattccaagaccatttaaaaaaatgtgttcacattttcctctgatacttttaaggtgtctttctgaagataaaacctgatgtgtctgcaatgctagagtgaggcttgagtatgggcaagcttcctgagtgcacgtgtgagctgaggacagcatggcgtgtgaggaaggatcagtccacacagctcatgtaagctcacgagagaggctactggcttcactgcacgtgtctactgggtgttttgacaacgtggagtgaatacttcatgtcctcacaaattcaaatgctgtttttatcatgtataaatattatattgg

SEQ ID NO: 322305 - DNA, 856 bp, Homo Sapiens
cagaaggactgcccatatatgtgtgcatacaaactggtgaccgtcaagttcaagtggtggggcctgcagaacaaagtggagaacttcatccataagcaagagaggcgtctgtttacaaacttccacaggcagctgttctgttggctcgataagtgggttgacctgaccatggacgacattcgaaggatggaagaagagacgaagagacagctggatgaaatgagacaaaaggacccagtgaaaggaatgacagcagatgactaaagccgcctttcccctctgcactttttgcaagacatggtcaacaggaagacccagcagctccaccctcccaagtggacaggccattttcgggacgcagccgttctgtgcccattcttcaggcaactttcgattccttactgtagctaattctagatgcccttcagtattgtgaacaaatagaccgtctggtgtcacagagcccgcgtgtgcaggagcctgctcctccgagatacgtggcgtgtaggttgctgtagttacatgcgcctccgtctctctccattgtgttccgatccatttctgtgtgttcccccaacctttatttccaagtgacattttcagtctttcaaatagctgccttttgtgatgtggtgatttaaatgatttaagttcatttgttctcaaccttggggtaaactgaggtattttgcttcctgggaagatcttcgcaattttgagtgctcctgtggggagcggggatgagctaaagatacaatgtttccctgccccgcaccgcttccacaaaatagcaatgtggttttgcagctctgacttctgctcccagtaacccatcgttagggcactctagcactat

SEQ ID NO: 322306 - DNA, 773 bp, Homo Sapiens
  misc_feature (133)..(163): n is a, c, g, or t
tttctttgggtacacccaggtttatcgacccccatgtttctcactttccccttaacgggggccccggggccccccaaaccgaaaggtttctaggaaagcctttctcgaccggcccgagggcggcccgacatgnnnnnnnnnnnnnnnnnnnnnnnnnnnnnnngctccccacaagacctttagttgagagaacatgcacagctgcctgccctgaaagccccaggcgtcccattcaggaagaggcaaccagaacagaccgacggccccaccacagtcgtgcgcgggctcctctgcgatggctggcagcacagctcactcagcacacctgtatcatcatcgacgtcaccatgttatcaaaggccctggactggatgcggtcccccgggttgtagaaggggttgcacatcacgtctgtgtaggagttgtgtagcttccggaacatgctgcgaatttcgttgtctcgaagggctgtgttggaggaatctaccaccatgacaaacttcaccttggagttggtgacgtagccgtataccttgtagtcctccgtggggtagagcaggcccaggtacagctccctctggtcgaccagggccttccccattgcggagatcttctcatccaccacgtccagagatgtgtgcaccatgtagtggaacttcagctcgttctccgtaggggtgctgcgaatgtagagggggtaattctccttggcaatcaccgcgatgcacaccgccatcttgggaggctcggcgccaggcaccgcgtcacgtccc

SEQ ID NO: 322307 - DNA, 1039 bp, Homo Sapiens
gcagagcattgtggttccaccggatgccccaggacccggaggtaggagcttggattgccccacggccccccctttttcagggggccctgttggtagtcaggccaaatttcttgatggaagtagatgcccatgatggtacccctgttccccggggacgaccttgtcaccacaggtacctgtcgcagtagagctgcatgtgtctgggcatctccccgtgggggactgcatcaggcagctcctgcagcttcagggtctggaagtccacggcatttgcatttgtcgggcatgatgaagtacgggtccaatgggcatttggggcgcccagcctgatctgtgttgcacttcctgggcagggcatagccctcgaggccagggcgcatggcaatgttggtgagggtgttgcggcagctgcggcactggatagagatgcgggtggccttggcacggaccgcagaggccgcgatgatgatgccagggatcttcaccaggtgtgacatcatgtccgacttcaggctacgaatgctggaagggctggcgtccgacttgagcatgacctggatgtcctggagcacctcctccccagaaggccggggccgggtcacctcatcagctacctccttggcagcttcctccagcagctgcaggtgctcggctggctgcttgtacaagtagtcggccaggtcctcatcaaagctggccagatcctccatctccacctcaatccagtactcccccaggttgtaatgccgcttgagttcatccctgtatttgaaggtgaagcccgtgcggtcggtgcccactcggtactgccgcaggaactccttgaagcgcctctgcagctgcgatttgcgggcctgcccctcgtcggcctgggcgtcgcccccgaagctgtcgctgtagaaaatgccaggatcgtcgaatcccgacatgactgcgcctctggttttccgcacttcacaaaccaggggagacaagaacctcccctcgtgccgaattcgccacccaggcctcgctaccttataaccctgagattactgcc

SEQ ID NO: 322308 - DNA, 1119 bp, Homo Sapiens
attgaagggggcatgctcttggaagatgaccttatagacattgggaagggcagccaggcgaccgaactcccttctccttccggggggctcccgcccccagcaaaagctgcggccagagccatctgtgtccaccctggatgcccaggacacggatgtaggagctttgggatgcccacggcccaccccttttcacgggcccctgttggtagtcaggccaaatttcttgatgggagtagatgcccatgatggtaaccctgttccccagggacgaccttgtccacacaggtaccttgtcgcagtagagctgcatgtgtctgggcatctccccgttgggggactgcatcaggcagctcctgcagcttcagggtctggaagtccacgcatttgcatttgtcgggcatgatgaagtacgggtccaatgggcatttggggcgcccagcctgatctgtgttgcacttcctgggcagggcatagccctcgagggccagggcgcatggcaatgttggtgagggtgttgcggcagctgcggcactggatagagatgcgggtggccttggcacggaccgcagaggccgcgatgatgatgccagggatcttcaccaggtgtgacatcatgtccgacttcaggctacgaatgctggaagggctggcgtccgacttgagcatgacctggatgtcctggagcacctcctccccagaaggccggggccgggtcacctcatcagctacctccttggcagcttcctccagcagctgcaggtgctcggctggctgcttgtacaagtagtcggccaggtcctcatcaaagctggccagatcctccatctccacctcaatccagtactcccccaggttgtaatgccgcttgagttcatccctgtatttgaaggtgaagcccgtgcggtcggtgcccactcggtactgccgcaggaactccttgaagcgcctctgcagctgcgatttgcgggcctgcccctcgtcggcctgggcgtcgcccccgaagctgtcgctgtagaaaatgccaggatcgtcgaatcccgacatgactgcgcctctggttttccgcacttcacaaaccaggggcctcgtgccgaattcgccacccaggcctcgctgcct

SEQ ID NO: 322309 - DNA, 1010 bp, Homo Sapiens
tgtttcacgggccccctgttggttagtcaaggcccaaactttcttgaatggaaggtagatgcccccatgatggttaaaccctgtttcccccaggggacgacccttgtccaccccagggtaccctgtccgcagtagaagcttgcatgttgtcttgggccatcttccccgggtggggggggctgcatcaggccaagctccttgcagctttcagggttctgggaagtttccacgccatttgccatttgtcggggccatgatgaaagtaccgggtcccaatgggcatttgggggcgccccagccctgattctgtgttgcacttcctgggccagggcatagccctcgaagccccaggcgcatggcaatgttggtgagggtgttgcggcagctgcggcactggatagagatgcgggtggccttggcacggaccgcagaggcccgcgatgatgatgccagggatcttcaccagggtgtgacatcatgtccgacttcaggctacgaatgctggaagggctggcgtccgacttgagcatgacctggatgtcctggagcacctcctcccccagaaggccggggccgggtcacctcatcagctacctccttggcagcttcctccagcagctgcaggtgctcggctggctgcttgtacaagtagtcggccaggtcctcatcaaagctggccagatcctccatctccacctcaatccagtactcccccaggttgtaatgccgcttgagttcatccctgtatttgaaggtgaagcccgtgcggtcggtgcccactcggtactgccgcaggaactccttgaagcgcctctgcagctgcgatttgcgggcctgcccctcgtcggcctgggcgtcgcccccgaagctgtcgctgtagaaaatgccaggatcgtcgaatcccgacatgactgcgcctctggttttccgcacttcacaaaccaggggagacaagaacctccacgctccctcgtgccgaattcgccacccaggcctcgctacctaggacg

SEQ ID NO: 322310 - DNA, 808 bp, Homo Sapiens
  misc_feature (279)..(287): n is a, c, g, or t
  misc_feature (558)..(558): n is a, c, g, or t
ccgcggtggggggggtgcgccgcgaaaggctgggtcggagttgtggactctggtggtccgcgggcgtgccggctacagcgcccgggggcgcgggcgttttcttgtcatcgccgcgggggcgcggtgaagtagggcggggccgtgacgtgggcggggcgggggtcggcagggacttcgcgggggattgcgtgttcaaggaagcctagtgggtggcgcggggcatacttttcggaggtggatccgcggggcgaggtcatggcggggatagggttggggacnnnnnnnnncatgtgcccgtggcctgggtggcccgcggcccaaagggaggttcgggaaggcttgtggagggccggggcggccggcaggattatgccgcgggttggggcctcgtcgttgtaggggtggtcatctgtcactttattttgcccgtcttgtagcatgtgggtctttcgcagcaggaagtgtgttttacaaccagagcccccgccctcctgcagcgcaggcgcagctggctgggctcctgcttcccactctccacctcatccatatttgtcctcngtccctgccagtctcgaaaaggcactctgtcacgtgtacacaggaaagggccctgacaagaggatgggactgcaagttgtggctgccaggtctcactctcccttggatgggtcggcggggtgggggtggaggccagggctgtagtgcagctcccgcaggtgctggctcagggggagcaggcaggctccggttttcggtaatcctcctggatggggatggtgctgccctcctcctccctggggcagctgcc

SEQ ID NO: 322311 - DNA, 602 bp, Homo Sapiens
ggaattcatagctgtcaagatgacgtgatgctttgtgaggaagtcctgtactcttttcaaacagtttttgtttattcacttttgtcattagttctttggttttctgcatttctctttttaagaaatgtgatgcacaggagattccaatgagattttcaagctctctactgccctccaaagcctgtatactacttaaattttgcattatctccatgatttcttctgacaatttctcaacttttgatagcaacatcatgaattcatcattgtcttttgttgtagattctttgctttcagttaaactggggtgattcaatttttttctcttttcctttgatagtccatttctgtgcttttgctcttcagaacttgtgggagaagcaaatagactcatttgacaagttccagttgttggagaataagttataacacttttcttccttgtgatttttgaaggatcaaatgaattttcttctaacagaccatccaacttcagtgatcttttaacaggcattctgagattcgggaaagcaccactgccgctgaataaaacgaacccagcaacttccgaaaacagaaaatccgccaaaggaaacgccaag

SEQ ID NO: 322312 - DNA, 1287 bp, Homo Sapiens
  misc_feature (1165)..(1165): n is a, c, g, or t
  misc_feature (1196)..(1196): n is a, c, g, or t
  misc_feature (1239)..(1239): n is a, c, g, or t
  misc_feature (1254)..(1254): n is a, c, g, or t
  misc_feature (1271)..(1271): n is a, c, g, or t
cagaagcgagctatctctaccccagaaacccccctaacaaaaaggagtgtgtcaactcgtagcccccatcagctactctcaccgtcaagtttctctccaagtgctactccctcccagaaatacaactcacgaagtaaccgaggagaagtggttacctccttcggcttagcacagggagtatcttggtctgggagaggaggagctggaaacatcagcctgaaggtcttgggatgtccagaggcactaactgggagctacaaatccatgtttcagaagctcccagacattcgagaagttctgacctgtaagatagaagaacttggcagcgaactcaaggaacattacaagattgaagctttcactcctttgctagccccagcacaggagcctgtcactctgctgggccagattggctgtgatagcaacgggaagctgaacaacaagtcagtgattctcgagggagaccgggaacattcctcgggtgctcaaattccagtggatttatctgagcttaaggaatattctctgtttcctggacaggttgtaattatggaaggaatcaacaccactggtaggaaacttgttgccaccaaactctacgagggtgtgccacttccattttatcagcccactgaagaggatgcagactttgagcaaagcatggtcctggttgcctgtggaccatacaccacatctgacagcatcacgtatgaccccctgcttgacctgattgctgtcatcaaccatgaccggccagatgtctgcatcctgtttggccctttcctggatgctaagcatgaaccaggtggagaattgtctactgacaagtccatttgaagacattttcaagcagtgtctacgaacaattattgaaggcacaagaagctccggctcccaccttgtctttgtcccgtcattgagagatgtgcaccatgagcctgtgtacccccagccgcctttcagctactccgatctgtctcgagaggacaaaaagcaagtacagtttgtgtccgagccctgcagcctctccataaacggagtagttcttcggcttgacatccacagatctgcttttccacctgggggggccgagggagatcagtagttcttccgggaacttcagacagattcagccgaatacttcaaggcacatctttgacccagngggaggttacttaccccacttttaccccggncccaaggaaggacatggggccatttgattatggaggtcgtttntatggtttttacggnacagcttgccttgtttnaaccccaggatgttcc

SEQ ID NO: 322313 - DNA, 1161 bp, Homo Sapiens
agtctttattaggatccaaaaatcatgactataatgaagtacggatatccctaatctattcccaagtccttgaaatggcatgtcaggattttacctttgtttcccttttcttttcagcaagcaaaatactagcatagtcctcctgagtattcatcttcctcttcatcagcagccgtggcagtgacaccatcaggcttggcctgtggtgttgcaggtgatttcttcttgattccccctcctggaaccaccaaactcaggcccagcttagcataatcattgtccatgtacttgaaaagcggtgagttgcagacatctgacacctgatcttggtcttgctggtcataaccttcaagaagctgttccagggcagcacagtcttcactgccattgaacccagggatgctatagctctcccggacacatctttctgcagctacatagtcatttctgtgtagatgaactaagacttgagcaattgttttcttataacaagttggataattctcaatttccttataaatatttttttctttctgaatagagagtgccgcctcatcaaacctacgtcctcgtactagtagtctggaggcttttcctagtaattcaactgcctgtcgtaagcgttcttcattttcaaacacattagctgtctgttgatataactgtacagccttctctggatcaacattttctataagctttccagctcgctccaaagccatggctgctgtgtctggggtgccgttttctagatacatcatgctggccttctccattagctgaacggcctctggtagtttctgcatctccttcaacatcattccagcttgctcataagctttggcagcatgaaaaagactgaatggaagtaagccctattattttcatgggcaacagcttccctcaggcaggcatcttttgcttgctcaaactgtttggcatttttaaaagcaacagctgcttttccatattcagaagcggcactgtcataatctggcttccattttaaaaaaccagttttcaggtatttctctgctttggcgaggtgttccagcccctcgtttatcttctgagccgccatctccacagtcaggtctctgacgtggagagagggtgaccctgcctcttcctccggcgccaagaatccgcccaaataggcgt

SEQ ID NO: 322314 - DNA, 1293 bp, Homo Sapiens
tttatgctgagagtgggatcaaaggagcttccgggaggatgtttccgaactgctgagggagccgaggcgagctcgctgggtttccgcaagagggctagatggtccttccaggcccaggggtgtctccctgttccccatgcttcgggtcactgggcgagttcttggtggtggggctagcagcctctggctcaggacggtcaacaggactggaagagtcccagctccgagttcgagagacaatgggaccagggctcttttcagcctgctctgagcctggggagaaagtggcatcctggctccgggtcatcatcctccgaggagattcaggcaccagaggtaagcgctctggtcgcccctcaaggcctgggattggggagctggtcaggccaaaggatgcatccaggtcagtcatggacgattcaatctgctggaagccccagagccccaccttcctcatacattgcgaacatgttatcagggagagctgcatggattccaaagaggaactacacgcccagccacacacagagagaatacaggcagtgacgtggacttggatgtctgagcctaatttgattgtagtttttctctcatcagttcggtgatcaagttcatcttcaagcaagtgtaggagaagactgatcttgtcttctgtcaagcacatagttttcaagtcctccggccttagggaaggaagctggaggtccaagtgacaaaggctttgaaaacgatctaggaattcactaacaagaatagcaggctcatccaggggcaacatcccaaatcggtctggggatgggctgtctggccagaaacagaacttctcatgggcagtacacaaggctttcttcagctcagcacatcgttgcttatatctgtcaaagtcaaaagctggttgtaaactggcacagagaaaagcttgacagctagagcacttgagcatatcacattccactgtgacccagccatattttgcacagacgagtggagacagctcaaagggcttacctgcccatttcaaagaagaaaatgtttccactctgctaaagaaggcttctttgcttgtagattccaatgaaggttgttccgcttggggtgatccattaactgactgggatgtggcagacgtgtccttcgcgtccacgcctccctcttccggggcaatcccctcatctatcagctgccggattttctggggggtcccttctggggagcgaactactgcaccccaattcttttcaacccctacggcaaacgcttgtccctcacagggcgccgccatcttggtccccc

SEQ ID NO: 322315 - DNA, 433 bp, Homo Sapiens
  misc_feature (360)..(360): n is a, c, g, or t
  misc_feature (371)..(371): n is a, c, g, or t
  misc_feature (404)..(404): n is a, c, g, or t
  misc_feature (415)..(415): n is a, c, g, or t
aaggtttaccaacagttttgccactttatattaggaaggacacgtctgccacatcccagtcagttaatggatcaccccaagcggaacaaccttcattggaatctacaagcaaagaagccttctttagcagagtggaaacattttctatatccttttttagttcatgtgaattgcactttctgcctgcttctagaattcctccaaggtattacaccacttactgtgatgctttaaacttaaggaataaaaccttgggtaaggaaattatatagggaaagtcaggcatcctaatatgttattcacttcagaggggacagtttgagggttattcttaacctttttcttttttacaggaagggnaaaaactaggnggcctgggggaaaaggaaggaaataattaactnattacttgttntattggtatgttttttgt

SEQ ID NO: 322316 - DNA, 1085 bp, Homo Sapiens
  misc_feature (524)..(583): n is a, c, g, or t
  misc_feature (937)..(979): n is a, c, g, or t
aagagtttttgcattcttgagatcagagaatagactatgaaggctggtattcagaactgctgcccactcaaaagtctcaacaagacacaagcaaaaatccagcaatgctcaaatccaaaagcactcggcaggacatttcttaaccatggggctgtgatgggaggagaggagaggctgggaaagccgggtctctggggacgtgcttcctatgggtttcagctggcccaagcccctcccgaatctctctgctagtggtgggtggaagagggtgaggtggggtataggagaagaatgacagcttcctgagaggtttcacccaagttccaagtgagaagcaggtgtagtccctggcattctgtctgtatccaaaccagagcccagccatccctccggtatcggggtgggtcagaaaaagtctcacctcaatttgccgacagtgtcacctgcttgccttaggaatggtcatccttaacctgcgtgccagatttagactcgtctttaggcaaaacctacagcgccccccnnnnnnnnnnnnnnnnnnnnnnnnnnnnnnnnnnnnnnnnnnnnnnnnnnnnnnnnnnnnctaatgcgctccctgggcaacgcttcagatgcgttgaagttggggaccacggtgcctgggccaggtcagcagagctgcctcgtaaatgctggggtatcgtcatgtggagatggggaggtgaatgcaacccccacagcaggccaaaaccttggcctccatcgccacagctgtctacatctagggccccaaaactccattcctgagccatgtgaactcatagacaccttcagggtgtggggtacagcctccttcccatcttatcccagaaggcctctcccttcttgtccagcccttcatgctacacctggctggcctctcacccctatttctagagcctcagaggacccatccacnnnnnnnnnnnnnnnnnnnnnnnnnnnnnnnnnnnnnnnnnnncaacataaatcataacttgcatgcatgtgccaggcacaggggataccctctagagacaatctcctcctagggctcatggcctagtggaggagacagattaaaactt

SEQ ID NO: 322317 - DNA, 822 bp, Homo Sapiens
tttcatctctatggtttattgtcactgaaataagaacactgattggggggagggtgggtgttgcaaattgcaaacctcaggtaacctgacctccaactttagagcccagagtacagagaggtgggccttgaagccaataaatacaaagcttcctctgccttgtaacaaaggcaggttggcatagggccctggagcctgactgcccaggcccactttgggatggggagcagctatcactcctctgctggcttcacttgcgtggcggcctctagctggcaaagtagctcatcccactgcacgaattgcttgggagagaagcattgtagtcttgttgtattcctccaggagagccttggactcctcagtgatttccacacactggtcctgctgctgaatgtggatctgggccaagcgctgcaggcgggcagcatgctcaggaacggctttgatgtgagcactgtccagcatgggcaccaaggcattcacctgctccaggagtgcaacctgggaaaggataaactgctcctctgctaggatgaattgcagcttagaggcatcaggtatggcaatgcggtcgatgtactcaggatccaggtacttgatcagatcttcaatctttttgtagagaatcttcaccctctccctcttgctggaaatgttccccaaagccacctgcaccttgaccaggccgtcagccaccttccgtgagccgcgcgccccgcccggcccgtacacccagcgctccagctcttccactcgggcctgtagccgctgcaagtcagtcagacccgccatcgctactaccgacccacctcggccagg

SEQ ID NO: 322318 - DNA, 1082 bp, Homo Sapiens
  misc_feature (13)..(13): n is a, c, g, or t
  misc_feature (83)..(83): n is a, c, g, or t
ctgaggctgcaanatgctcacatgcttctcgtaggcctcagattcttgctcatcatagtaaagtctccgagtttcactgtccnaatccatggccagtgtagatcgagagttgagtttaagtagttttccatcagctgcaagtgaatttatgtcagctgttccataggagttcacaagactgaaggtaaaaagcctttttgggcagggctggcctttgatcttcttttgggtggtctcactggggtcatttcctggctcatctttccccactgccttctgtttctgaaagctgctctttgccttcttcctgatgctccatttcttcctcatcttctccttcacagctgttcctggagccattgcaggcccctggctccaagggtgagctgccaaactcatcaggtaaaggctgtttcacatagcggctgatacgatcacaaacagcctggtacaaagactcaagggttaacttgtgcttggggacagaaagcaatagtggctgcccatatagcgctgatgcggaggaagtgcttgatggcctggacttcctctccctgaagtagactggaagcgtgacacattccgagccatccacggaagtgctgcagacctcgtacacgaaaatgtcatcccgaggcatgatgtggtttaaaccttcatccatttggaaaattttgtggaatcggtgattatacacatctgcgaccaccatattttctgcagcaatgccagacagcctggagagagcctcgcacaggtcggacacagcccccatcagcggcacagtcacacggtactgagtaggtctgcagtgagggtcagcaggaaccaggaaaacctccataactcgatctttcttcaagggcagtggcagcgttagatagcaaaatgggtcaaaggtcacagaaaccttagcacattctgggcaaaccaaagtagatttgaagaggccatggaaagtatccacaatcacagaatcattcctcaacctgtgattctcccaggcttcctttgccaccaccgcatctggccgcccactggcatcccctcgtgccgaattcgccacccaggcctcgctcctt

SEQ ID NO: 322319 - DNA, 996 bp, Homo Sapiens
  misc_feature (317)..(317): n is a, c, g, or t
  misc_feature (328)..(328): n is a, c, g, or t
ccctccatccattttcattcccccggttattgaggggcattccaagccacccaaggggttcgcttgtttttttcccaggtcttttttgggtttcccttttcgacaattctggagtgggtacttggcgcttttcctcagccaggggttttggttcctggtcccagctccttctgtttcaatgtttcggtttcacgttcttgaactgtcacttggttccttctttcgaatgaagactggcttaaggcgaaggctccatctcatcttcactgtctgtgtactcttcatactcagactctgattctgactcctctcaagancgaccctcatnttccacttccatgacttccatctcttcattttttctctcctgtgctcgctgacgcatcatgccacgccgccgctctatttcctcatcatcaatttcctcctcctcttcttcactgctgtcttctcgttccatgcgccaagcatctccttctacttctgagtcactctctcctaccacttcaggttccactatttttcgatgtcgagccaatctctcttccacatcttcactaatacggttctgtaaacgccgtagccgggggtcactggatgaatcctcctcctgttcctcaggctctgcttcttgttctttggctttcttaatgaactgaaattcttcatcctcctcatctgaggactccataggggcatagtctggcctttttccggacacataacgctttaccttcactttttccattgaaatctcacctttctcattgcgaactgggacggccccagccgtagactgaatgggcggttgcttcatgagagcgcttgggaccgacatgttgatggcagcgacggtgattcccgaaacttgactaattccaaacagtgaacaccagcaacgtcaacgaagagaagaaattccttccacctgagtccgcgaacacagctgcgcgactgatagagaaactacttacggctgagctagataaccggaat

SEQ ID NO: 322320 - DNA, 478 bp, Homo Sapiens
  misc_feature (37)..(37): n is a, c, g, or t
  misc_feature (57)..(57): n is a, c, g, or t
agctgaaaatcctttcccccttttccccgaagctggnccctgttcaactccgacaanacatctctgtgctgggcgaagcatgcggtgcatgatgaaactggccacagccttggcagagctctgtccggctgccacagtaggactcgtggagctccagcttgctgagctgcatgtccagtttgcagaacttacactcaacagggcgctcctggcactcattggccttatgaaactccagcgaggacttctgcatgctctgctgacacatcgtacacccaacctgctggtgctcaagcttgcagtgctcctccatggtttccttggggacaggctcctcacactccggacacaggaccaggaaccgcaggcagtaagcctcatggagggtgaagttggcagagactacatgtcttttacagttcctgcacaccgagaagtctccttccatgttctgctctctgcaggctttcggttgagt

SEQ ID NO: 322321 - DNA, 764 bp, Homo Sapiens
ttttcagatatcaatatttattaaaatctttattcattttcttttttcagaattgaaacccatagaacacattagaaatttagatccatatctgtcttgtttggtatcttaccaagtacaatctctgtctgtgcaacagctctgagaggaaatccttggcagatcaaaagagagggtagtggctcccacactttccatttaagcaaataaattagcttctgagtagttgttcccagtttcacccaacattttgtgtttatgagaaacaccttagttcctaaaaacctgtggtagtccagtacctagcccctaccttgtcaccacccagacttgaggaattgaagggaaaaaaactggccttcccctgtaggatgagtttcccaaggccagatgtgcctggctcactagtatgtctggcctgtgctggcacactagagttgctcagtagttattcgctgatgaatggtctttatgttaattagggtccactctcagagactgagaacctttcactaaggttctttctgaatccttcagaaagtcagtgttcccctttgtcaaaataaatatgtttttcttgctagaatacatatacgactatatacattacatatacttttactcatgtttcctgaagctcaaactcacaggatgaggcatataagatagcttactgatgatgctgttttaccatcattgaggtgtggtcatttactggtcaaagaatacacgggtgatcgagaagaaaggctgaagaaatatgc

SEQ ID NO: 322322 - DNA, 1184 bp, Homo Sapiens
ttcggtttgttgttcagtgtttattaagtagattcagtcttatatatgatatacagattcaaaaggaaaaggattccacatacttatgaaatcagtgcatttagcaagtaataccatggagataacagctcgattaacagctcattggtcttttgttaagtgagggagagagggagtcggcctgtgctagtcattccacaaacaaaacagaatttagtcacatcacgtagagaagacacattctaagaattaaaatattaagccacatttactggtaaaactcactatatagaacacaaataatttttatagagagcattgaggaggaagtcctcacctgcttagaagagccacgttaagttgcataggtgcatatctgtaaaaatataatttagaggtgaagccattaatagagtcacctttaaaagttggtgccatccactgtttgccttaagtgcttactatctggagccctgtgcccctccccggaggtgggacctcatgaaggagctgcccccagaggaaccctgaagaaatggcttgtactatctgcactgaaagtcttaaatctcatctcagatatggaactcatgctcttccaaaacatgtctaaattatgccagaggactaaagacctcttgggttgtccctaaatcctggatggcttgatcctgaaggcaacatgagtcattctgaccttcccactcccaggctgcccagggaagaactacattcatcccacagctctgcagcaaagtcctgccttcccttttcctctgtccatgcagttacccaccagcagccaataagaggtctctcttctgactcctgctcctaaatggaccacataattgaggcatatgggccatctaccaggtggaaagtgtttttcagccaatctgagttctacgtggtaataggttttttgttgtatttttaggtggaaacgtaggtaaaaagtgagaggtttttgtttgtggctttgcctaagcagatgagccttagtgaggtgcatcttcctcctcaagagcaagtcttgcagaacacacagggactgggggcatctgtacatgtaaacagtacactttcactgagtccaaaattaggagcaaaaatacaaaggttcacattggtcttaggtagttacaggcgaaaaaggattgagctgtttagctcagaaacaa

SEQ ID NO: 322323 - DNA, 880 bp, Homo Sapiens
gaatatgaaattttactcgacaacagaaaaggagaaacaggaaaaaaggtgcctcgagcaaagtcaatgacttggtggtggcagagattgtttcctccaaaacgagaatggtagtaactagggcaaatttcacaggcctaccaccaatctcaccagtccaggaattatataggaatggtcacattcctaatgatggtgaagcagaaagccctccccacagagagacagcccactggggacccagctcaagctcttcaaaacgtggcagctacaggtcacaagactttggcagagatgtccgaaattcttcaaggaaggcgtcacgatcagagggacggatccagctcaaatagctttctaggtacagggggagagaccacagagcatcttcatgtgaccccttagtttgggcctccagcctccaccagagtgcagtggcctcatccctccgatctagcctcttcagagtctgaagcaggtgaaagtaagtgtctcgattacctgggcacatctgcacactgaggaggaagtcctgtaaggctttggtatcctggccgctggctacccattccagtccacgactaattagggcggctgcccgaagctgctgcagtgccgcatctgacttacatccctgctcacagttgaaagctgccccttgttctttttcctcaggtgtggcccggaagagcagctcgaggcacctgctaaattcactaattgccactttttgggcacccagttgaacccaggcctggccctgaagcaggtgggtggcagagacccagagtgggcagtatggcagttccttggttccttttctggcatcttcccacagccgggacatcttgggtagcagagatgatgtgcggctgagcaa

SEQ ID NO: 322324 - DNA, 1511 bp, Homo Sapiens
  misc_feature (81)..(81): n is a, c, g, or t
  misc_feature (666)..(699): n is a, c, g, or t
tgattgccaggggctttagcacgaggtggcgcttggacggccacaaaggcggcggaggtgcggaggagatcggaatgcaanggcggcggtataggggggaggaggggtccgtgcggcaataatcccgggggccgcgaaagggggtctccgggaggggagacgcggtaaacaacgcgcgggtggctcatcggcgaaagcgggggagtgtgatcccccggggcggcgggggaaaaccgttacgggcgggggaataatactccgcgaatgccccgggcgcgctcgataagaaaaattacccgggtaggccggaggtgaaagagacccgcccgcagttctaaaaggggggaaacccgcgcgcgaagaaaatacctggcgccgagcctggttgggggagctcagtctatgtttttcccacaggaaagggcccggccttctgggggggtttgttggcccccgccccccgtggcgcccgggatctctgctaccgggatcggaggtgggaggtagaatgcgccgaagcgcccgcgtgtgggggcaaaggaggcccacgcgaggttctcgcctgggcgtaaaagcccaacgtaagacgcgcatgggttccccttaaccgtaccgggggccccgcggcgcccaaagcggaagtggttctagaaaagtttcttggannnnnnnnnnnnnnnnnnnnnnnnnnnnnnnnnntcgtcgccgcgtctgtggaggtcctctaaaatatcttcattgtgttgtttgatgagatagatccacaagaagacagtggtgcccaacgtgaacccaactttcaggccagtccaggtttggcattcggcggctctcgcacgtagaactttgatcgcactgaaggggcgctcgggagcctggcgggggccagcagccgggaaaggggacgcagcaaggcggacggcgccatcttgcgtggcccagctcagtctctccgagttggcaacagaaccagcgccacctggcggccggaagtgcgggactcgagggctctgcagcagagctccgtgggggcgtcaacgtgaattccagcacggcaaggttctctagcaccccggcctcagccttctgtatttttggaaggactcctattcggtatgtagtctgacctcgcctactcgagtagttccctctagtatccttgccagtctttggcttctaagatctgagaatttctggggatggggagttcgagtcacaatattaagaactagtttgaagccagctccagggtagtctgtctttaagtctccactactccgctccaaggtgactcataaggtcggtccgtcaactctgcattatatggcctcaacaacgaaattaaaacacatactttaacctccagagcctcctttggcagtgcaaatatgtcacttcggatctgactaactacctttccaggctgatcttaagcaacattcaccaaattaccgatacgacagccaggcccatttcatcggtcaagctctttcacgatttccagactctcc

SEQ ID NO: 322325 - DNA, 723 bp, Homo Sapiens
attgggggagggtggccgatgctcttgtgtgccctggacctgggatgctgctttgggaaaccaagctatggcgcggtgttcactttccctggatggggccccgggcgcccgaaagggaaaggttttggaaaagtttcttgaggggccggaggggcgggccaacaattagtgggggggagagtgtacgaaggtaaggggtcccaaatatgctgtatttggaagaatacagaagtatttttatttctttttatttaatgatgcaaaatacaaatgctggcttgatatatattcacatataactttttctctcacatttacaactcaacagatggtgaatccagaggaacagctacaatcactatacggagcatactacattagtgtttcaaaagtttattccagcccatttcttcttttgtactctaaaatatcttcattgtgttgtttgatgagatagatccacaagaagacagtggtgcccaaggtgaacccaactttcagccagtcaggtttggcattcggcggctctcgcacgtagaactttgatcgcactgaagggccgctcgggagcctggcgggggccagcagccgggaaaggggacgcagcaaggcggacggcgccatcttgcgtggcccagctcagtctctccgagttggcaacagaaccagacgcacctggcggccggaagtgcgggactcgagggctctgcagcagagctccgt

SEQ ID NO: 322326 - DNA, 778 bp, Homo Sapiens
  misc_feature (584)..(617): n is a, c, g, or t
tttttcaggtaacaaagtccagtctgttttatttttaacccaaatattccaaatatacagaaaattaccagtacaaagttaaacacattcagatttatttacacaatgctaaagaaatttgagttttatttccattttgtggaattttatcatggggtctggctttaatgtgtaactgacgtgggtcactgaaactcgattatcccacctcacatgcaattttctgtcctaagggaatagaaaacttgggtttttagggcacatgcagtaatgatcttaatactgctttacactttcgtgggaaggcagctgtcccacagcctggggaaggaccacatgctcagaaagggaacaagagagagggctgaacaacaggcacatggggaccctgagcatttctgtgcacgaggataaggagagtatgaccaaaaccctcctccctagaggtccaaacacaggaggtgggccaaatcatcagggaacagtcagtcacccgcttgtggctgagggcatgcggaggatgagaaccacattaaggatctggggcatagcaataaatcattaccatgtacactatacagttnnnnnnnnnnnnnnnnnnnnnnnnnnnnnnnnnnaaggtacagattagtttatgttattccttataaacaagtacacttaagaatgtactggtgtgaagaaatgcatactgcaagttgtttcgaattaatgttctgactcttgttattataatgcaacctaaccaagaaatcaacatgctcctgctatttcaatg

SEQ ID NO: 322327 - DNA, 527 bp, Homo Sapiens
atttttctgtcgtgtgaaaatgaagccagcaggctgcccctagtcagtccttccttccagagaaaaagagatttgagaaagtgcctgggtaattcaccattaatttcctcccccaaactctctgagtcttcccttaatatttctggtggttctgaccaaagcaggtcatggtttgttgagcatttgggatcccagtgaagtagatgtttgtagccttgcatacttagcccttcccaggcacaaacggagtggcagagtggtgccaaccctgttttcccagtccacgtagacagattcacagtgcggaattctggaagctggagacagacgggctctttgcagagccgggactctgagagggacatgagggcctctgcctctgtgttcattctctgatgtcctgtacctgggctcagtgcccggtgggactcatctcctggctgcgcagcaaagccagcgggttcgtgctggtccttcctgcaccttaggctgggggtggggggcctgccggcgcattctccacgatt

SEQ ID NO: 322328 - DNA, 599 bp, Homo Sapiens
  misc_feature (184)..(204): n is a, c, g, or t
  misc_feature (380)..(380): n is a, c, g, or t
tttaatgtcaatgacatttttatttttgaagtactctgacacctccaccctctactttattagaattggaaggcaaatttttgtccaaaaacctacagacaagtactttgagagaatttccaatataatattagacataatgataattttttccatactcagaatgaaaaactggatattacgnnnnnnnnnnnnnnnnnnnnngtacaaatttagctaatagctacaggctgagagaattgtaacatagcatgacaaattttgtgttgacttgaaaggaatcacaccattattccttagaagtaattacatgtgttctaacacatttgagacagggttggactcccatttctcatccgagaaattacttaacccttccntggcgctgtacagtcatcttttattctatttcctctttgctgtttgtagtagagacattttgaatgaaacttggcactgcttgattcaaaaccgtggaaaccagatctgtttagtctcctgtttgtatgcgtttgctaatggtagctaaataaccagtttttgttgtaaatgcaccaattctgaaggcactttatgtactacatggaggtcatatctgg

SEQ ID NO: 322329 - DNA, 1000 bp, Homo Sapiens
  misc_feature (16)..(16): n is a, c, g, or t
gaagaccttctttgtnaaattttggggctggttggtggtcctggttgggcctggtattacttccgtgaatgaagtaactttcagctaagttactcaccaccaaggcttgctcagactgctagaacttgacgcaggagtggccagtgacgacgtagccatccctgccggttctgaagccccgcatgtgggcttccaagccttgcactagggcatgagtgggaatggaaaggtttcagagcctcctactcatcgctgctttcatttttagcaaacatctgagtgtcttgacttctaaacattagtcttgtgtgttaaaagaaatttgtttgcattgggccacattatactttgacccttaaaaagagactgatgaatatgtataattttgcacccttctgagcatttgagacttggcaagttcagtgaatacttactaatctcccatgtcctgctaggtactgtggggcagtggctagaatactttaattttgctccccattgtgattctcatcctggctttgagttttgcttccctttgtgtcctgtggtggatcctccctccaggcagactggcctgcttgctctctggaacatgttgtttgtttctaccactgtacttttgcttcctctcattccccacagtggaccgtcatcccttcatcattgcttgtccaaatcccatttgtcctttaaagggaagaaaagccgttgttgatgaagtgctttctgggggcagagcactttcatgtatcatcttactgagtcactacaatcctcactctgtgaggtgatgatatattagccccattacacagaggagaagggctcagaaaagttcttagctcacctgaggtcacacagctaaaagtggcaaagatgggctttggatttttaatccaagtcagtcttgacagaaaagcccatggcctgtataccatatacaacaagttgcctctcttacaattctccttcctcaagctgggtgcgctggctcacacct

SEQ ID NO: 322330 - DNA, 505 bp, Homo Sapiens
ttgttatgctcacttattagttttagacacttttttgtagattacattggattttctacatagatgattggattattttagaatgaagactgttttactttctctccaatcttgatgccttttatttctttatcctgccccgttgtactagataggccctccagtacaaaggtgaacagaagtggaaagaatgaacaaacgtttgggttgtctctggtcttacaagaggcactcagtatttcaccatgaagtataacgttagtggtggttttaggtctgtgccctttatatgttgatgaggcactcttcttttcctggtttgctgagagatttttatgaggaatgaatattgtaatttgtcatctatggagatgggcatatatttgttgttttttagtgtgttcggatgaattgtattaattgtttttcaaatgtgataccaacatttgtggtctaaacctctgtagatcttgatacagtatactttggatatactactggattc

SEQ ID NO: 322331 - DNA, 648 bp, Homo Sapiens
atgccaggcgctctggtgccctgtccatgaatccttgccgcagccctgcaaggaaagagctggagatgcctcctgtgtacaggaactcctgcagacccaggacttcagcaagttccaggcgctgaagcccaagctgctggacacggtggatgacatgctggccaacgacatcgcgcggctgatggtgatggtgcggcaggaggagtccctgatgccttcccaggtggtcaatggcggcgcctttgacggcaccatgaacgggccgttcgggcacggctacggcgagggggccggcgagggcatcgacgacgtggagtgggtggtgggcaatgacaagcccacctacgacgagatcttctacacgctgtcccctgtcaacggcaagaccacgggcgccaacgccaagaaggagatggtgaagtccaagctccccaacaccgtgctagggaagatctggaagctggccgacgtggacaaggacgggctgctggacgacgaggagttcgcgctggccaaccacctcatcaaggtcaagctggagggccacgagctgcccgccgacctgcccccgcacctggtgccgccctccaagcgcagacatgagtgatggcgcccggccccgcacctgccatttgcacgcccggccgg

SEQ ID NO: 322332 - DNA, 968 bp, Homo Sapiens
  misc_feature (51)..(63): n is a, c, g, or t
  misc_feature (416)..(416): n is a, c, g, or t
  misc_feature (429)..(429): n is a, c, g, or t
  misc_feature (434)..(434): n is a, c, g, or t
  misc_feature (440)..(440): n is a, c, g, or t
  misc_feature (442)..(447): n is a, c, g, or t
  misc_feature (449)..(457): n is a, c, g, or t
  misc_feature (468)..(469): n is a, c, g, or t
  misc_feature (472)..(472): n is a, c, g, or t
tccaggtcggtgagttgaacccttgggaaaaacgggggggaaggtattggnnnnnnnnnnnnntgttatttgtggccttccccggccccgggcggtaacaaaattgtctggttgggggggccaaggcggccatccaagttaatgtcttgcggcttggaaggggcgggcatccaggtgcgggggccctgggtcgggcggccaggctggtgggccctccgaggctaaaccttgagtgaggctcggttggccagcggggttactccttcgtcgtcccagccaggaccgtccattatcacaagttcggccagacttcctagatcttaccgtagccacgggtgtaggggagtcttgagacttcaccattctccttcttggcgttggctgcccgatgatcttgccgttgacagggggacagncgtgtagaagatntcgtngtaggngnnnnnngnnnnnnnnncaccacccccnnctncccgtgtcgatgccctcgccggccccctcgccgtagccgtgcccgaacggcccgttcatggtgccgtcaaaggcgccgcccttgaccacctgggaaggcatcagggactcctcctgccgcaccatcaccatcagccgcgcgatggtctttggccagcatgtcatccgccgtgtccagcagcttgggcttcagcgcctggtacttgctgaagtcctgggtctgcaggagttgcctgcatcgttgcggaggctcgggaagtccccaggggagatctggtgctcgcgctcaatcttctggtagatctctcccaggttgttcaccagctctgttctttttgctctctttaccaaagtacattgggcatctcatttcattgagggagctgatgatgtaggcgtgaaccttgtccagccgtgcccgcttgatcaggtcatttgagcttcctgagggcggcgtttcggggcagtgactggatgtccttgaagaggtcctgctc

SEQ ID NO: 322333 - DNA, 498 bp, Homo Sapiens
ctaaataatccgtttttactcccctggagacagcttctagcctcaatgtgaacacaagaccgactggtccctccagtcacttaagatgttgcacaggagggcttagttacattggaggattgaccctgttccagctccaatgcaccaacttacccaacaccccacgcacgtgtcatctccagtgagcagacgtccaggcttcccgaagcttcctggctggaaaccgcgcagggccggcagcgccctctccaccaagggacacagcagcggcgcctcctccgcggcccgggcccccatcccgcggctcgcgctgccaggacgccccaggtcggagcctgcccccaccccgcacccggaggccagcagcccagtcccctaggccgcgcagcgccagcgagagcgaggctgcagggcgaggcccggtgaggcgctcgagaactggccgggaggagaagtcaggcggcccacccgccacggcagcctccggcgcacgcagag

SEQ ID NO: 322334 - DNA, 1212 bp, Homo Sapiens
  misc_feature (42)..(42): n is a, c, g, or t
  misc_feature (92)..(92): n is a, c, g, or t
caacctcaaaagctggttccacaacatgcatgccaaaagggncaggttaactaagtaaccaaaccccccagaaaaccagtttcaatcgtttntgtttttatttttcccctttcaacctggttttcggctctggaagctgttcctgtgcacagttctatttcctacagttctgagaaagcggttccatcgcagatgaccaaaggctggacccctctggctataacgtagaccttccagtgggtggtgtcgacatagccgatatcccctggctctattggcatggccacagactgacaatgtcttcggcactggaagggagggatgagctgcaacatggcctcaccgctgccaatgataaataggtcaggcatcttatgcatcttactccccacaacaggttctgggtgaagaaaggagcacttgtttaaagaggcatcttttggaaatggcaggtgagtgaaaacaggaaaaagctcacgtaacatttgtgatctgttcagaggtctcctccatggataaggaaatgggaaccaccgctcaggaaagcagcgccaccacttggcgaaaaacccttcagagaagccttctgtcgcctcagggtactggcacaaaaaaatgctgaatctcctcctccaacaggggctttcccgtcttgatcaccagtggatggagcctctcaaatttccttggggcgtcttccaggagcatcaccttcaggtgtttctgggcacagccagtgcagttggcaggaatgggctctgactcattctgctcacagtcgtttgtccaccaggggtcaaagtctggaaagggtctgtcttcatcacccccatgcagaggaactcccttattttctgacatgtacttcttggcaatgggcaaggacatcagcctaatgtgatggatgagtgagcgccaggtgtgagctccagaaagcactggctcaggtgctaatgggcttatacacaactataaggagaggatactgcggggggggtctctgaggttcattcttttccagcagctgtctgataaatttttcaattgccttctctgacatgccacactgatggccggtctgtctcaccaaatcaacagtctctgaaagtttgtcataaatgctgatctcgttggcagcaagatccatgtcttccaatataaaatccatgcggggctcgcgccccctcgggctcctcccgcctcggggacccc

SEQ ID NO: 322335 - DNA, 512 bp, Homo Sapiens
tcctcccctcctcattctttcctccagatgcataagatgcctgacctatttatcattggcagcggtgaggccatgttgcagctcatccctcccttccagtgccgaagacattgtcagtctgtggccatgcaatagagccaggggatatcggtatgtagggccccaggaggcagggtcaatggatctttttagtttttaactcaaaagctattttaagaatcacatactgccttcacaaaagttttatttagtagaatcaaaaataacattctcctgttaacaggcttcaatatttatgcttaggaaatgaaacaacttaatgagaaaacatagcagaaagaaatggcttgtacatacaacatatagaatgcgtgtgtctattgatcatagaaacttcaagttaggaaggattctggaaaatatttagaccaatccctcgttttatagatgaaaaggttggagacccagagagggagaggtgaccaccccaaggccccactgttcagttcgag

SEQ ID NO: 322336 - DNA, 1920 bp, Homo Sapiens
  misc_feature (12)..(12): n is a, c, g, or t
caactgggtctnggtcctcggggcctggggttagaggccgacatggaaggcacttactaggggaacagaggctgcgaagtgaacccggaggcccaggggtctcaggagtgagtgtggggggtgagctggaaagcacagatcagacagcactgtgggggtctggccgagggcctcgttcttcccatggggaaggggcttctctgggtagactgggagagaggctgactgggccccccgtccccagcaaggcccaccgtgcaggccagtgctagaaacaccagggccctctacagacagggttgggcccagttgccctgtgcagctaggactggcaggcggggctaccctgggaagacaggagggtgggctggggcccagcttgggaccctccaaggcacctggctgtgtgagtggcaggtagaagggagtgaggagacccgagggggtgaggcggccagcagggctgggccagccctgtcccccaagatacaggctgtctggacagcagatatatattaatatattagtctggtctttttggttaaactttaggcaccacttgggaggaagacacctttaagcgttgaaaacggcccccgcgcctcggtgggagccgggtctggtccgcatgcagagcggggtgggcgcaggcagcctcaggccacggcagactcagggccccccagggaggccgaggaccccgaggcgtagcggcggccgtagcccgaggaggagtaggaggatgaagagaaggtcatggagaagccggagccggtggcgtcaaagctgccgcggcgggagccggcccgggagccggtgcgcgatgccggtgcgggagccggcggtagagccggagccgctgacgctgtaggggctgtagtagcccttggttggattgcgcggcagctttcagcaagccgcagcccggtgccctcctccacccatgctgcggtccagcgcgtccttataggagatcttgagcttggtcttagggcaggtgaggtacttggagtaggcgcccacgtcacgcagcttctgtgcggtgcgggcgtccaccgtgccgcgctgcagggcctcgtccaggggcacgcggcccggcgtgtcgggctcgatcaagccgccggtcaggtactgcacctccaggaagcgctggccggcctcgtagtagagccagcccttcttcagggcctgggcggccgacatcttggtcttggtgcgtgggtcctcgaagccgcagaaggccttctgggccaggttgatgcggtccaccatgatcttgtccaccaggcccttgttgacggcgtcggtgacagggaagcgctcaccggtgctggggtcgatgatgcccccggtgcaggcctgcgcctccagcagccgctgccccgtgatgttatccaccaggttccggtgcatggcctcggtgatggacaccttctccagcgtctccgtgtccaggatgccagccacggggcccgtctcctcagtggggtctgaccaggaggccagctgggtcctggagacggcggggctgatggggtaggaggaggaggatcccaccgaggaggaacgggagcggaaaccaccggcgttgcccgagagcatgtcggcgaactcggtgatggagagcgtgccggcgcggtactggtccagtgccgagcggtcgatgaggttcttggcgatggcatcatcgatgtcgtactggcgcccggagcggcggtcgatgatcatggacttgaccacgccgtccgaggaggagatggtgatctcctcccactcgcacttctgctcggacagctccaggtacgtctggtggtcaatcaggcccttgcggtaggcctcgtacactgacatctccttgcccgtctgggggtccacgatgaccactcggcgatcccgaagattccggaccggtaccagccg

SEQ ID NO: 322337 - DNA, 848 bp, Homo Sapiens
tggaaccaagccagaccacataagcaagcagcggcccccatggcgtctcagccctcagaccctggtatctctgccgcctgtgcagccctgtctgaacccctggagtggcgctgcctgctcaggagggctctgatctcaccagcaaagccaagcttcatctttggttaatttcactgagatgccactagtgtaaaaactgtgctcttcttggcaatattactaaagtagccacatggcacataacgtgttattttaagttatttgaaaagcaatgtccatctaaataagtgaccacaccgtaataaaaatcatttaaaaaaggaagggagggaggaatggcagaatgaaagaaggagcttaggagagcctcaggcgtgcagtgtgagtatcctcgtgggtctggggaggcgctgctgacgaaggaagcactggttctctgtaggggtctgaccccagcatcagcttcagctcagctcaaagccagcggcacattcaatcgcatagagaagtttacttcgcaaaagtgtctcgtcatagaactcggggagcttcagcaggttcatgcaggtgctggctgtggggagccgctcaaggtcggagcctccgttgtgaatacaaaatgcgggatacaactccttaaaccccaagagagggggtcgagagcagcttgttacaaacttcagcagtttgcgcttttcttcatcagtgaacccttccacaactctccagaagaccttaataacaggatggtctgcagaatagcctcctgaatagtttgtaaaggattttaggtcctctaggcttatgggaacttgtgcaccagaaattaatacctgaatttcttgctg

SEQ ID NO: 322338 - DNA, 597 bp, Homo Sapiens
  misc_feature (478)..(487): n is a, c, g, or t
aaaattactttggaaatatgaccacctgcaacattttcagaaacaataactagcagtgataacatacctgaatagtttgtaaaggattttaggtcctctaggcttatgggaacttgtgcaccagaaattaatacctaaggaaaaaagttcaaataataacatttgaggtaaattttaagaaagcctgttcatttcctgtgacaagcgtgtcccagaaagtcagcaggtagggtacctgaatttcttgctgatcaaacattcggagccactcgaggctgacgacattggcaaggccctggcggaaagccagccagtgctggcggatctgcctgttcagcctgtagtctgccaccaagtggatgtacgcaatccggttggcgctggtgacagggatgtctttcccaccgaattttagttcaactacctgggaatacaaaacgtaaggatctcaaaatcctcaaagtatgataataggttnnnnnnnnnngcaagaaacaaatgttttaaggaaataggacttgatgctttgtgaacaagaatctaaatacgaaatagtacccgagtatcacagcattgtgcagatgccctgtgccgaat

SEQ ID NO: 322339 - DNA, 638 bp, Homo Sapiens
gcagcagagacttagaacgctcatcgttttgattactgtcttgacacatggtcattagactgggttcataaactgctggctcttcacttgcataaagattttccataatgtctattacatcagacacatttaaatgtttaattaataaatcaatctcttctttattgtcacttccagtgctcatgtactccattactgttgctctttctggagagtctcatgaggtggtcgtgaggattaacagagttcaagctcataaagtgctcagtgcagtgtcaggggcatggtaaataagctgtgtcatttttagctgctttgtatgcatgagtgagaaaagtactgagtcagactcctggctttgcagatactgcgttagcttcctttcttatctgcaaacaagatgtggctacctattcccctggcttcttcgcggtaagaagattgcatctgcggccttggcgctcccacgccggccgagcgctccagccgcggccccccgaaggttcggtgcgatgctggctgcaggcctgtgggagccgagcacgccgggccactgggatccggcggcggcagcggcagaagcaggaaccagggcgccggaccccagagcgtggcgcgcagtccagagcggagcggac

SEQ ID NO: 322340 - DNA, 577 bp, Homo Sapiens
gacaaacactttggacggttccatgctgcagtccacaaaaggtgcagctagaaggcgacaagacacgctccgcctttcaacggcaaagctcgcagtcgccccgcctggccgtgggcgtggcttggactcaggtcgctagcggccttcgggactcccctccagccctggggccgtccccggcctccgcctggtcccaggggcgcggcccaggagctcagaaaggccaccggggcaaagaccgcggcagcggccagcgcacaccgtgacctccaggggctgcggcccgccgcgcacatcgcctgtagctcacgctgccccggccgcctccctcaggaacgcagacgttggggacggctcgccaggcaggacctggaatccacggagggaagctgccactctgcaccgtcccgacggtgggaaaaggagcgagggctcccgccgcagtgggccggcagccaccaggtccccgcgtccctccgcttccggccttcgcccggcttacccgcgtcgcggaagtccgctctctgcaccgcgtcctgccagtcgccagcagagcaccgcagattctgttagcttt

SEQ ID NO: 322341 - DNA, 598 bp, Homo Sapiens
acataattggtgacgcctgtaacacgtggcttcctttcggcttgttctttatcagtagacgaatgtaggttactatctcttctatttaaagatgagcttctctccttgtctgttttccttttggcaacggaattttgaaggcctgcagatgacaaaggcatttgtctgattaaagcagaagtaccctgttcaagtttttcagtagatgcagatcgtttattggcagttttgctctcagaattcgccattgcagagcctccccatgaccatcttttttgctgataatcatcagcaagtctcctccgttccaaagtacgataaagaatggctgtaaatttttccttttgtgcttcatccttctggtgtcttttttcttctgcagctattctccgttgttcttctttctcttttcgctccttcagctttctctgtctttcctccatctgtttttcatattggagcttggtctttctttctttttcaagtagttgtgtttctttattggcgtcttgctgtctccttttctcctctctgcgctctcttgctaatctttgttttatgtcatttttaagcatggatccatcgattactggtttaa

SEQ ID NO: 322342 - DNA, 1369 bp, Homo Sapiens
  misc_feature (303)..(329): n is a, c, g, or t
  misc_feature (1122)..(1213): n is a, c, g, or t
taaagaaatattagacaaaaatatagaattaaaacctttggttccaaaatgggaaaggttccacgatacataaatcatttctcatttgctttaaaaaatttaaaagtgtaaaaattatgagagactttattcgttaacaatgggggtaaagagctatatacatgaaaatgagtcttataaaattaagtgaagtgcaaataaaagcactgctactataagacattctggaatggttgtttaataagggtattatccatttgatctatagcaatgtgattttatttttaaaaagaaaagcagtgnnnnnnnnnnnnnnnnnnnnnnnnnnngcttaagcacttcatcaattgctttattctgtatctgcgaactaatctgcaatctcttttgttctttttaaaatttgatttgttataaaattgccaaatagaagtgtttcagatacatagtttgtacctgtatttttattttattgcctcatgttcttgtaagtcattcttaattgaccaatgattgtagaccttgcttgagtattttttctaataaaacaaagcaaatcacatttagcttcaaattgtaacaattcaattgaattttaaaatgacacctgaaaagatacatctgatattttctatatagagcacagtaaataagttttttcattgtgtagaaatacttagatgtcaaaaccagatttcgtgatccttgattaacttctgagtactcaatcaatccataatccttttgctgcttatctggatgttggtttggatactgttaacacaccaaaaagaatatggaattgaaatgagctagctttataacttgtatgtatacatatatacacataacatccaattatgactgggtaataagtgtgaaaattttaatttgtggttttcatttattaatgtctgcccatctgtattgttgctcctaccttcaaatatgacacctgaaataataagtctgttgtcccaggaatttatgtattgttcagcatcaagcaaactacagctccacaagcatacccatttatatgttgtctatgcctgctttctcctgcagtggcagaattgagtggtgagaccttaggtcctgcaagcccccaatttttactannnnnnnnnnnnnnnnnnnnnnnnnnnnnnnnnnnnnnnnnnnnnnnnnnnnnnnnnnnnnnnnnnnnnnnnnnnnnnnnnnnnnnnnnnnnattccacgcctgacctcatgtgactggtcatagtcaaaacaattaagactttgtttcatgcacaaaattattaaaactgttgtataaaattaccttcagtctatgtgtataaggtgtttgtgagatataaatgaactttatgtttagtcttggaaa

SEQ ID NO: 322343 - DNA, 889 bp, Homo Sapiens
tgtgctttttaagccatttccccaaatgggactagcatgcttgttttcagtataccgtggcctgcctcatgatggtttggagatactgtctgtggatgtgaggtggggacttcattcattgtcctatttctatctccactttgtgcctggagagctttcaggggaggtggaggaggagggtctgccaagctactgcaacatctgtcacccactatacccagttacttgggggaggacagacactgtggtgtcattaaagttgtttgaaccaaagtggcggctgcatctttgtcccgatgctagccgtgccggtctcccatcatccgctcgccctcctttcccctgggctgcgcccacttgtcttcctggatatttgggggtgactcgccatgcttggcaccctctgcttcctggtgctgctctgactcgaagacgggacagtccctggtgcacatccagggaagaggagcgtcggtagttcttgcagtaggcactttatcaggacctgacctgttgctgggtgattttagtctctacaaacagaaagcgtttcaaagcgtcaggtgtgggagcagagtgaccctttgctgatgctggggggaggggatctaaatcctcatttatctcttctatgtctagtattttactgtcactggaggctctgtgggctgtcatagttaattgaccataattagcaatatacttttaaagtggggaaagctgaatgacacttttaagacaatgaacattatcaaaacaaaatgtataatttcttaatttggaataataaattaaggcgtttaaatgctatttgtaggtcttggatatacaggaaataaaatattaggggttgggtcttttttatttttagggttgtttttatgttgga

SEQ ID NO: 322344 - DNA, 841 bp, Homo Sapiens; identical to SEQ ID NO: 125704

SEQ ID NO: 322345 - DNA, 925 bp, Homo Sapiens; identical to SEQ ID NO: 125705

SEQ ID NO: 322346 - DNA, 627 bp, Homo Sapiens
aaaatgcttcccgggccaccacttactccctttgcaaactttgctccccttcctcagagctacggatcctgctgctgtgtggtagtgacctgctggagtccttctgcatcccagggctctggaacgaggcagatatggaggtgattgttggtgactttgggattgtggtggtgccccgggatgcagccgacacagaccgaatcatgaatcactcctcaatactccgcaaatacaaaaacaacatcatggtggtgaaggatgacatcaaccatcccatgtctgttgtcagctcaaccaagagcaggctggccctgcagcatggggacggccatgttgtggattacctgtcccagccggtcatcgactacatcctcaaaagccagctgtacatcaatgcctccggctagcagcccctcgtcctccggcaacacaatggcccctccatctttgtcagccccctgtttctctcctgcctctctgtttctccatctcctcgtcttgactgttttccctacttgctgacttaaccccccatagtgtgggggacctgcagagaaccatggcattccctattccacagtcatctttggacagactttcctctagtctccgggttgggggtgggtg

SEQ ID NO: 322347 - DNA, 975 bp, Homo Sapiens
gtgatccgtgtcgtagtgcgcgataagcccagcccgaccccacaaagccgccgcgggccccccttccggcactccaccgtcgcttcggcggtaggggggggtgccatctgtgcctgcttacccccgccaacccggtgccaattgcggggcagtttggggggcccccccaggggggtggggcttcaggggctgagcaggaatgggagcgggccagcccgtgggggtcgccttggcagggggctttcttcgaagggaccccggaggccgcagtccaggctaaggcagtagcctgcgcggctgcgctggatggagcggaagagcacataatcgacggagcgcacagagccctggagttccagcaggcatgagtcttctgatgggctagagcccccggggaggtcgccaatggcagacaacaccagggacccactgtccatggacacgtccacaatggaggccacccgctcacagacacaggagccatcgtgaagctgagggtcaaacagagtggcctggctgtctcttcgcagccccatgacggcctcgtaagaaggggggcagtcagtaggatacaagggcactgggctatccatggagccattatacgtgatgctttgtgcatctgtctctgaactgcaggtgtactctgggggatagtagggcggtgggggcacaggcgggacaaattcctccaggtccagcatggtgtgtaggagaggggctgggggcggggacgtgcagcccagaggtcccagtgggcctgagactgaccgctcaggggccagcgtatgcacgaggtccagggagaagatttggatgcagcagacaatagcagagagtgtacagattatagcggcacaaatggtgagcccacagacgctgaagagcaggttcttgagggcccctcgggcttcatcacaggtggagttaggggcaactttcagttcccctcgtgccgaattcgccacccaggcc

SEQ ID NO: 322348 - DNA, 1354 bp, Homo Sapiens
  misc_feature (311)..(311): n is a, c, g, or t
tccagtgtggaaacttactttattccagccatgattatcctagttgtcaccttgcacacctgccatccggtgccatctcctggctggcacatctatacccactctggctctgaaaggcttgtcaaccaaaaatgggcagctggggctaaggcatatttaaacaaaggctccaaaggacccctttcacttgggtctagcatccagcctctctctcagcaaaggcaggattgtggtcccttgtgttttctgaacagggcccagggagccaaggcatgccattcactgcagcactcaaccctctggtcacagtnggagtcgccggtccagcctgaaatattactacagaggagaaagacccattctttgctatgttgctcctatcttccacgttccaaaaacagtcctatgtagcttcagctgctccgaaatcaggtcacagaacagcaggagacattcctttggcaaaaaaaggacacgcttttgtcctgtatcttatactggtaagtgaagctctgatcccggtggactgcgggctgcgatggtctcctccacaggatcctcagctgcccgtgcacatccctgcagaagccagtggccaggccctcagcccgcagtatcagatggctctgatgactgaggccattcagcaggatgtcattctcctcatcctccgcatctccactgtcgtgcacaaggaccaccatgtttccctttagttcccagcacacggtggctctgcagtagtgaatgaagtctagcacagccaccgcccccatgcccaggctcaggagcacactgaggtcgtccaccaacagcaccgggtacgtccaccgagcctctccactgtctactggcttcagggcctcccgtacaaactcaaacaatggtttcaagttcccagcattagcctccctgagaaactgcagggggtgtggctccttttgagcctggaagacgacgtccactgcagacttgagtccctcaaggaacacaagctgcccacgctcccgcgccatggtcaggctgacacccagcttctgtcccacgatactgtagtggctgaaggactggatgagtgccacaaagcagactttacaattagctttgagatagaaggagagaaagtggtgtacaaggaaactcccatctgtcttggcatcacagagtagagtcagtttcccctgctccgccctgtcgggggtggtgttaagcaggttattaagttccacgaacattccgagctcctgggactagcgctctggaggagaacccggagtgctgcagagacgacggaggatggagagcaaaacacacccgacagcccggctcgcgcaaggaagcgcgcatgcgcaat

SEQ ID NO: 322349 - DNA, 562 bp, Homo Sapiens
gaggctgaagacacctggtgcttcttggtgcagtcctggtcaagatggaagagcgctcctctgtgcccagctgctgtgcaggggtggacgagggctccctcggccccaaggcaagggcggagcagctcccagtgctggcaccagacctctgccaggcacggggcatggccatcctctggggtcctggctcaggggtggggagcggcagtgctgggacaagcctggggaaagggtttcccatacactgaggctgcgagatcttccagtggagcctcaggctagggtatgaatcagaccaccaggtgataggagccaaacctccacatggtgaaacttcactctcggcagccaggaacagaattattagcaaagaaaagagaaaagcagatgccaatcattctctctcttcgtcaaggttatgcccacgggcagggtgggctagtggtgagggtggagctgcgtccctgacccccagaaggagacagcaggccttcaagttaagccaagcaatacttggtcattgtttgtggccaaccattctctgaatgtctgaatgacagcg

SEQ ID NO: 322350 - DNA, 1024 bp, Homo Sapiens
  misc_feature (862)..(928): n is a, c, g, or t
atagtaatgtagttctttaatgatttggacattttttcttctttgcctttggcgtgcaaatgcccagaatgcagaaaataatttccccactgctcgcactgatgaaagacttcgcactgtgcaatttcgttttcatgatgtggaaaagctaaatctatcccacctgaatggatatccagttgacttccaaataccatactagcgatggcagagcactcgatgtgccagcccggcctcccgggtccccagggagaggcccagaacacctcctggggtttggccgccttccacagggcgaagtcactggcatgacgcttgtcagagtccgctggctctccgactggaccagggaccacgccgaccaatttgccatacttgtctcctctagacttcagatcgaagtagtcattgccttttgccgttgaataagcgttcccacgagcaatgattccttcaatgaaagaaattatctgaggaatattttcggttaccctcaggtacaccgtgggtgggagaaccttcagggctgccatgtcctgcttgaagtcttcctcataaagactggcgagggaagcgggggaaatattcatctcattggctcttttgatgattttatcatctacatctgtaatacccatcaccatgactatgctgcatccaaaaaccttggttaggatccttcgaatgatatcaaatctaacatatgagcaagcatggccaaggtgcgcatgatcatatacagttggtccacagctataccaggaggcggcttcggcgtgcgccacgattaggggttccttcctcccggtgaggctgttgtacacctgcacacccgtctcccggcccgtgggctgcagccagnnnnnnnnnnnnnnnnnnnnnnnnnnnnnnnnnnnnnnnnnnnnnnnnnnnnnnnnnnnnnnnnnnngcgcggcctggagcagcggggggcccaggcctgggccgcgcgtagtcctcaacatgtcagcgcctcgtgccgaattcgccacccaggcctcgctac

SEQ ID NO: 322351 - DNA, 2232 bp, Homo Sapiens
tttcgttcgaaaaccaataatttatcaaaacgctgcgtgtgtatgtgggggggagggtgtcgcaacagacagggcagcggtgggcggacgcacaggcaggagacggtgcccggagagtgggggcggcacttgccactggctggccatgcgggcgggcaggctagacattcttgccgcgcaggcgcagttcgtggcgtcgcaggtggttgtagagcgactgcacataggtgaagacacacttggggtcaggcttcttgcccatgatcatcatgtcgtccacctccaccaggggcacacagtccaccagcatccgtggggccccgagcaggggttaggactttttggtttttaccagccccttctggaccagacagcggtagaattccctggatgtacgtgtacacgcacttccagtcaggctctcgaagccgcaccatgtcctctgtatccaggagctgcgggcagtccgcatgggtctccgcagatgagaaggccacctcgaagttctggcgtcggttctgagggctaagctgcccatagtcgaaggcctcagggaagaagttgtgcaccagggcacagaaggccatcccatcactccagctggaggagaagttctggatgtcgacgtgctcgtagccgcgagtcttggctcgacacccagtcccagcagcatctgcttgatgctgttggcgttggggaccccggaagctggtggatcgctgcacggctgcgcggggtccgccagggctgccgggccgcgccctccttctccagcttctcaatcatggccttgcgcgcctgggaggctgaggtcttgggcagactctgcgccttcatcagctctttcttcttctcggcctgccgtttctcgagcgccgccaggctgccggcccgtgggctggcctggtcctcgcggtcgaagatgctgcccatcttcttggatgaggaggaagaggagaaggtcttggtttgcatcatggtgctgccactgccattctccgagcgcctcacgaaactcgactccactgtggtggtgcgggccgtccgtgtgccatcattggagtggacgagccgctcagtcttggtaacagtgctgacagcagagccatcagctgcccgctggctgtgcctcgtggtggtctcagtggctgtgttgccgcgcccctcccctggccggccccgtgcctcctgcagccgccgttcccgctccttgtcccgctggtctctcttcctttgtcggagctcacgaagtgcagcccggatgagcttccgctcttcaaagtccgtgctctgatccagcatcttgtccaagactccttcatcctcaatagtcatcagctcctcagcgctcagagggctccgcccttctggtgctttgttcactcgggtctgctcagccccattggccgcttccactgctgcagcgagaggctctgctggctctggttccatcttgatgctgcagcctcctcggctactggggggggcatggctgaagctggtgacatgagtgacactgcccagccgagccagggtcccagggctgttgacacgggtgatggtgctcttgcccccactactggtgctgagtagggtcgggggcgcccgcagccccagtgtcagttctgccctctggttgcctgtgggcagcagcacccggcctgtggaggcctggccacggccgtccttgatctcgatggtgaatgtggtcttcatactgccccctggctcggcagtgccgacggccacgggcagcggggcaccaggctcctctgaacgtgccacaggcccccctgctctgttttcaaggggcctagcagccaagccccgccccctggggccctcctcctgggggcagcttcgaagctgggccaggggctgggctactcctcgttgctccttgctgaaccgggaggaggtatcactggggccccgagaggaggagccgctggaggaggaggcaggggtggtgctggtgagggaggggcccaggagccttgcgggggtcaggggacttagggcagcctggggtgtgccatcctggagcctagcagccataggagaatcagatgtgaacttgtggacacgatcccgcacagagccagcccgctggaatgaggaaggtccgctggcaaggggggtggactctcggttctgggctggttggcgggggctgagcaccgacagggagcgttggccctcgtgccgaattcgccacccaggcctcgctac

SEQ ID NO: 322352 - DNA, 630 bp, Homo Sapiens
gtgacgccctcaagttttggcgggaaaagcgctgcatttggattcctgcagtggtgggcaaaggacagtccgccgaggtgctcggtggagtcatggcagtgccctttgtggaagactgggacttggtgcaaaccctgggagaaggtgcctatggagaagttcaacttgctgtgaatagagtaactgaagaagcagtcgcagtgaagattgtagatatgaagcgtgccgtagactgtccagaaaatattaagaaagagatctgtatcaataaaatgctaaatcatgaaaatgtagtaaaattctatggtcacaggagagaaggcaatatccaatatttatttctggagtactgtagtggaggagagctttttgacagaatagagccagacataggcatgcctgaaccagatgctcagagattcttccatcaactcatggcaggggtggtttatctgcatggtattggaataactcacagggatattaaaccagaaaatcttctgttggatgaaagggataacctcaaaatctcagactttggcttggcaacagtatttcggtataataatcgtgagcgtttgttggacaagatgtgtggtactttaccatatgttgctccagaacttctga

SEQ ID NO: 322353 - DNA, 844 bp, Homo Sapiens
gtcccaatgggaggaatcttatttgtgagaaagtgtgcgcccaaccaattttaaccattgcttataaacccagggaccgccccagaagcccatggggggagatttgaatgtcttaacaatgcttaggctagcttaagtgggaaatttaccattgtcaaaatatcagatttttccccacatttagatgtttgtccataagtagacccagcttagctgacttctttgagaaagaattgtgtctcaaacctctgttattcagctggccatattattaatcattactaaatgccagccacatgcaagggggatggaaaagaagaatgagatttgctcagttttagctttctgtggctgaagtatttttgagtcagttacatggatacatgaggattatagtaggaaatgactgaatatttttaaaaacataagtactatggaaacagtcatgtataaacattcgtgcagaagcacttacaaacatacactgtgcataaagttggttaagaagatgcttgttagaaatgatttatgtaggtgaactaagaatttgaaataacttaataccattgaagacatcatacacatacaactttggacattatgcattcttctggggatgaaccattgacaacttctggacttcattgctagctattttttacattgaggtgggaaaccaaagaagtgcagaacagaagcaatctactaggcacaaagctccctggttactgcccagatagactgtttccactcatcaaattgaagtgcatacttaatttaggaagggcagaccagtgcaaaagctactgatagtgaactggagggcccggtttccatcccttcc

SEQ ID NO: 322354 - DNA, 875 bp, Homo Sapiens
ctttctctcttgccctctttgatatttaaggtatacaggatggtgaggggtgtgccaggacagtttaggcaggggctacagtgggcagagtagctgggggagtcaggcggacaagggtttcagatcctgcttctacagggcaagctatttatcctctctgaaggtttctgtacctgagaaatgggcacttccatgcccacctctcaaggatactgtgaggagccttgcccagagcctggtcatggtaggagcatgtcgaagttcatccgcctacaatgaaacagactccagggccttagtgctggctcaaggggcagaggaatatgacaactggcaataagaccctctggagcttaataccaaaccacttgatgccaagggtagccagccagccgacccttcgctgctgcagtgtgtgacgggacacacagatgcccctgcgcccggctcctctctatggaggtctaagcatctcttgagcagttacacatcacttgccccttcctctcaccttcccccatctgtgggatattggtgcaggattgtggcatctgtgcacgtgaatcacacaccccaggtgcaggggctgacatggagcactgtgtctgggcggagagcctcggcgtgccaggtgtgcatccaggcctcttctgctatcaggtgtttcccctcggcctaggcgggacccttctgcagctaggaaccccgtgcaggagtgcagctggcctctcccttcctcactgggtcacagacatgctttactcatgtccccttagagcctcatgctctggaggtgccttccccacccccaaacgcctcctggaaactgtggagactgtggacctcaaccttgtgggtgcctcctttttttctca

SEQ ID NO: 322355 - DNA, 1193 bp, Homo Sapiens
  misc_feature (611)..(611): n is a, c, g, or t
ggcctgggtggcgaattcggcacgaggaagatggcggctctggcggcctaaagaaggcggccgcggctcagccgtgggctctaacgcggggctgggggccggagacagacttcgcccaggtgacgggtagtaggggcggcgccgcttggcctcgtggggtgtaagacccacttgctgttgcccccggaccttgccgccacaccagccctgtcctggggcggaaccgaaggaaggtcgggccctgctgccccgccccgtccttcctccttcccgggcggtcactgtgcgtggctcacttttagagtttacttcaaccacgtggagcttccatggcggcctctcaggtcctgggggagaagattaacatcctgtcgggagagactgtcaaagctggggacagggacccgctggggaacgactgtcccgagcaagataggctcccccagcgctcctggaggcagaagtgtgcctcctacgtgttggccctgaggccctggagcttcagtgcctcactcacaccggtggccctgggcagtgcccttgcctacagatcccacggtgtcctggatcccaggctcttgggtgggttgtgccgtggctgtcctggctgntgcacggggccggtaatttggtcaacacttactatgacttttccaagggcattgaccccaaaaaagagtgatgacaggacacttgtggagccgaatcttggagccgcaggatgtcgtccggttcggagtcttcctctacacgttgggctgcgtctgtgccgcttgcctctactacctgtcccctctgaaactggagcacttggctcttatctactttggaggcctgtctggctcctttctctacacaggaggaattggattcaagtacgtggctctgggagacctcatcatcctcatcacttttggcccgctggctgtgatgttcgcctacgccatcccaggtggggtccctggccatcttcccactggtctatgccatccccctcgccctcagcaccgaggccattctccattccaacaacaccaggggacatgggagtccgacccgggagggctggtaatcgtcacggctgggcccatcctcattcggcccccacgttctccctacattctcctacaaacaacactggctctttccctgcccctaacctgggtccttcaggcatccctgggcccacacat

SEQ ID NO: 322356 - DNA, 695 bp, Homo Sapiens
caactattttttccgtcgctttggagactggagaggggaacaaaatcacatgatccgcacccccagcatgaggcaggaggagcgctacctggatatcaatgagtgtattcttgaaaactatcccgagtgctccaaccccaggttattttacatcattccgtacttttgtggacagcatcccagatgcagggagcctggtgaatgggcccttgagagagcaaagctgaacgtgaatgaaaacttcctgctcgtggggattcttgaagagttggaagatgtgctgctgttactggaaagatttttacctcattacttcaagggcgtgctcagtatctacaaagacccaggtaacttcatttgtaagcaagctcttctccatgagaggtctgtgtccagggctactcaccttgaaaaggcctcaggaaataaaggagtgaaatgatctcttctgatgacaaagggcagttagttccctgggcttgcaaaggaaagttagaaccaggagctgcagatgccaaaatcttgagcttcatgttcagacataaaagcaccatgttccaaaggcttaatggctccatttctccctatggaaactgaaattggcaacattctccatcagccttgtcttgagcatgttgctggaaactgagactggcaacattttccatcagccttgtcttgagcatgttgttggg

SEQ ID NO: 322357 - DNA, 1457 bp, Homo Sapiens
gattgaaattcttcaaggcactttctttttgccccttcctttgcacacaatatggaaatataggaggtatctggggagaggagaagtttaaaatgagagtatccaacaaaagctttcctaggatcccagtagcaaaatttcagataagaagtcactcaaagacatgcattgaggaccgaaggcaaatgggagataggaaatgacatgtcaaaatgacgctggggtacaatgaagttagatgagcaaaacataagtatcttttctccagcaacataactaagcatcaaagtttaaatgagtcaaaattcctatctgatgtcttcacaaatcttcattcctgagagtctatttggacttatgcttgaaagggaagggaaggtcgtatactcttcttccataattcacttcttcatttaaacataaaattcaccctcccacctcctgggtgggaggcacaggcctttgttttaaattaaagtcaattttcaaatgactgaccacagtgtccagaggccacatgatggcaaagtgagaaagaatgaagaacttcgaaggtcttcataacagttctgagattgctcctcctgctgtcaagggctggctgagttccgcctgcactttacccttcgctgatccttccagaaggtaaaccctctgtccccctttgtagagtttcggtttaaatggagaatctttctctttaccttttgaatcctttagggcggccctgcttgtttcttcttggatttgccatccccctttcacacccagtagtggatggacttcatcatttggtactccctgaagttcctatattgggtgtttggggtttcttcttaggtggctgggacccatctgctgagaactgcctcttcttctctgaactagccctttcatccatcaagggaggtttggactgcatccggtggggggccgtaaggattttcttctgggtcttctacctcaggggcaatgggtaaatacaatagagcctttgaatcttccagctcttcatcactgctacagaaggcagcaatagggtccacgctggtgacatccacttcctcatcttctgcagcatcagcccctgtctgctcaggctcactcttatcttcatcttcaatatcaaactctgattccctttcttcgtattctacattttcatccaattctttgaagtctggtgcaaatgcactccagttttctacttgattctgtgcccagatagataccactccactggaaatggatgctatgatgggtcgaacaggatgccaagctacatccaagaggagttctcctctcgtcccatggagaatcttcaccaggttgccaatactcttctcccagatgtacagggcatgctgccgggcagaacctgccacgatgtattccccatccccagagaaacaacatttcttccatggggtcctattcaccaaatcctgcaatttccc

SEQ ID NO: 322358 - DNA, 443 bp, Homo Sapiens
gcagcgcttccagcgccagcgccaggtggcccacctcgtcccgcagcgcgttccaggcagcacgctgctcctcctccttgtggcgctgctgcgcctggtggcgccagtactccagcactaggcagccgccgcccacgatgaagatggtggcttcgcccagcagctctgcgcccagctcggctgccgcctcctcgttcagcggcttgatgaccgtgccccggaagcccatgatgcgcatcttggtccgcatctccacccagtgatacagttgagccggcgggaggcagatataggtcttgaagaactcgcttcggcgggcggcctccttaatacggttggcaagcggcttgctgacctgccggatgcccaagtatagcagcttcgccatagggaacgcgcccaccaccatcttggcggtctcacagggcacgcgcaaccttgct

SEQ ID NO: 322359 - DNA, 921 bp, Homo Sapiens; identical to SEQ ID NO: 135428

SEQ ID NO: 322360 - DNA, 765 bp, Homo Sapiens
  misc_feature (86)..(91): n is a, c, g, or t
  misc_feature (94)..(95): n is a, c, g, or t
  misc_feature (104)..(104): n is a, c, g, or t
gtttaccctacttggggcccccccgccgcccaaaaggaatggttttagaaaagttctttgagggcccgaggcggccggccagtttnnnnnntgnngggtggggnggggggtaccaacagccctttatttccgggcccttgatcctgctcggatgctggtggaggcccttagctccgcccgccaggctctgtgccgcctccccgcaggcgcagattcatgaacacggtgctcaggggcttgaggccgtactcccccagcgggagctggtcctccaggggcttcccctcgaaggtcagccagaacaggtcgtcctgcacaccctccagcccgctcacttgctgcttcaggtgggccacggtctgcgtcagccgcacctcgtaggtgctgctgcggcccttgttattcctcaccaggatgctcagaggttcgtcgcatttgtccaccaccagcaggaccgtgctgccggggcccaggccctggctggcaagggggaccctgtcctgcagcgccacaccgctcgggtggacagccagacgctgctggaaggcgtgcacgccgatcttctgggtgatctgcgccttcagctctgacaccgacatggagctgctcagggacacctggaattcgttgcccgccagcatcttcaccgtcaggtcccagcccatggctgtgggctgtgggctgtgggccacggcacgagctcctgtactggcaaagatgagttcgctgcctctcagccgccggcttccgcaggcagcacccccc

SEQ ID NO: 322361 - DNA, 244 bp, Homo Sapiens
gtttatttgtaagcttttattttatcactcttatcaaacacacatcagaaagcattatcaacagtgcatcttatggtaagtcagtttacaacaaaactgaacaaggcaattgtgtttacagaaaaagtcttcagcaaaaaagtatgcaatacagtcaactgaaacgcattgttcacactttttaggaatataggaaagtggaaaataaaagttctttgctattcagcaggaaagagtttaaaag

SEQ ID NO: 322362 - DNA, 530 bp, Homo Sapiens
ctcagatatgctgcactaactagtcttgtttttagtgagtctctatttattaaaaaaatagatgaagtaagggtgaggtcttttttgtcttttagcagtttttcttttgggccaagtccatgataaaaaaccaccatgcaaacagcaaataattctttctaaactggccccatttctgaattaaaaggcttcattcctctttaacccaacagatcttgccattttctccaagctgtacagttccactggccaccagctgaagggctgcaggaaatattttatgttctgctaattttactctttcagaaagagttgcgacagtatcacccctcttcacgggaacagcttcttgcaaaataatctgtccagcatccacatcttcagctacaaagtgtacagtgcacccagtaactgtgactccggtttccagggcttgctcatgggcatttgaacccttaaaagaagggagcaaggatgggtggatattgagcatttttccattccacttttggacaaaggggccagaaaga

SEQ ID NO: 322363 - DNA, 540 bp, Homo Sapiens
ttcattatctcttgctgtgagtggccagcataagcctgaggcaccagattattccagtgtgctccactgtgggccgtggagcttccagtttgctgtaaacctcaaccaggaggcaacgtctcctcctgtactaatagcttgggacaaccaagggctgctgcacgagctgcagaatgactccgactgtggcacctggataagaaaaggtccaggcagctccgtggtgttggaggcaacctatagcagctgctatgtcactgagtgggactcccactacatcatgccagttggagttgaaggagcaggcgcggctgaacacaatgtggttacagagaggaagctgctcaagtgtcctatggatcttctagcccgagatgctccagatactgactggtgtgactccatcccagcacgggacagactgccatgtgcaccctcacccatctctcgaggagactgtgaagggctaggctgttgttatagctctgaagaggtgaattcctgctactatggaaacactgtgaccttgcattgtacccg

SEQ ID NO: 322364 - DNA, 523 bp, Homo Sapiens
agaaacttttccgggtcagcagtcggccgggcttcagccaggaagcttctctgttcctcctcttgggccagcgtgagttttgccgttccctccacctggtgagccagagacgccttgaccaggtctttgcctcgctggacaaactcccggctgaagcgctctgcctcctgccagaaggctttgtgctgctgcgtgagcagctcctccttctgccgcccggacagcttcccctcaccagccagcagctccaggccgtgggagatggcagccagccggcacctggtctcctcctggacttgcagcttcagaaactcaatcacttttgccatgtgcgcccgccccatcatcctctccagggcgtcctgcaaaaagaaacacacgggaccatagctggggtgtcctgggaaccaccagggcatgttaattaacagctgagaagaagccaccagggtcattaactaatggcactgcctgggagagcggagctcagagggatgaactccccctctccttcatgagcgag

SEQ ID NO: 322365 - DNA, 596 bp, Homo Sapiens
  misc_feature (58)..(81): n is a, c, g, or t
  misc_feature (471)..(471): n is a, c, g, or t
ttttaccccaaaataagctttattgcaagaaaagtgtcatatttgatacacagacctnnnnnnnnnnnnnnnnnnnnnnnncataagtttttcctcacaaactcttgattacaaatttacactgttccttttttctttttagttattaaaaaaacaataaaacctcaaaatactgggtataactggttactaatctttggtcagcacaggtttgagaggaacaaccaggagcctgcatgtgctttggccatttcacatatgaggtttggtcactggtccaggaaacaggttcttgggttgagaagaataatggatacgtgctcttaatagcacatcctggtacaatatctttttaaatgactaaagcaaactaaacatcaattcattgtacaaacatctttcatacacaataggctatgataaaatgaggcatatggtgtataactacagtattaatgaaaattctaaaanaaaaatgggtttaaaacaacaacaacaacatatattccttggctgcattgcatgatttgtttgcacatatggccaatcctggaaataacttgaacataataaatgcacccattatttaaggccgc

SEQ ID NO: 322366 - DNA, 335 bp, Homo Sapiens
aagaaattttccaattaaatacctgtaggttaataacaccccatatgccctcattttatccatagccctattgtgtatgaaagatgtttgtacaatgaattgatgtttagtttgctttagtcatttaaaaagatattgtacccaggatgtgctattaagagcacgtatccattattcttctcaacccaagaacctgtttcctggaccagtgaccaaacctcatatgtgaaatggccaaagcacatgcaggctcctggttgttcctctcaaacctgtgctgcccaaagattagtaaccagttatacccagtattttgaggttttattgttttttta

SEQ ID NO: 322367 - DNA, 364 bp, Homo Sapiens
cgggtgaaagacaggaatatcgaacacccaagcgtggacagtcacccatcctggatagttatcagggatgtaaactgtaaacttaaatacgccatccttggtaaagtccatgccgtatgaatattactccaaaccacattaatgcagagcgataagatggctgcacatagacgcctggtagcttctgcttcacaaccaaggtaaattctgcaagaagagagtattccaggtagaagggtccataggacgcatgcgtgccatttgttgactgtgctgctggggcaggagatgtaggcttagttatgggcaaagcataattgggaatagaaggcagctgtttctttggtgcagttcgtggaggact

SEQ ID NO: 322368 - DNA, 467 bp, Homo Sapiens
tactgaagattctccagattttaggattttacagaaaaaacctcgatccatggcagagccagaggagatttgcaccttggtcattgctgaggtgtttgcagaagattctgggtgcttcacatgtactgcaagcaacaaatacggcacagtgtcaagcattgcacagctgcacgtgagaggaaatgaggacctcagcaacaacgggtctcttcactcagccaactccaccaccaacctggcagctattgagccacagccctccccaccccactcagagcctccatctgtggaacaaccccccaaacccaaactcgagggggttctggtgaaccacaatgagccccggtccagctccaggattgggcttcgtgtgcacttcaacctgcctgaagatgacaaaggaagtgaagcatcctccgaggctggtgtggtgaccaccagacagaccatgcctgattctttccagg

SEQ ID NO: 322369 - DNA, 486 bp, Homo Sapiens
  misc_feature (134)..(134): n is a, c, g, or t
  misc_feature (273)..(273): n is a, c, g, or t
acacaaggtatacacgtaaattttctaaggcggtccttctttcactttcagtgaggtccttccttcggtcagggacggtgcggtgggctccatggtggaggcgggagatggcgcttcttccgggtccgggagcntcgggctgcgccgccccgccctggctgggggcttcggcctccgggtaatggggaagaaggagaggaggcggagcgggtcgggagaaagacggccgtgccttcgggaacagagggactcgggggtcaaaccgtagcgctntccggccccgcctctgaggtcgacggtgacgcgaatctacgcgacgcgacgcggagctcggagcagcgttccttccctctcgtagaggctcaggcgcaggcaccgccccacggcgaggcgcgtcccttagcagagcccgccctgtctctgcggcagcctatcgacgccagcccgcgggccgatcctgttcccgcccccgaccggagcctttcg

SEQ ID NO: 322370 - DNA, 1340 bp, Homo Sapiens
  misc_feature (104)..(120): n is a, c, g, or t
  misc_feature (128)..(129): n is a, c, g, or t
  misc_feature (138)..(139): n is a, c, g, or t
  misc_feature (143)..(333): n is a, c, g, or t
gggggggagaaaccgcgggttttcgtgtcgggtggttcctttggaaaacaaaagaggcccctttttctgtttttttcggggccgcccggccccccccgggtggnnnnnnnnnnnnnnnnngggggggnntggcctccnncccnnnnnnnnnnnnnnnnnnnnnnnnnnnnnnnnnnnnnnnnnnnnnnnnnnnnnnnnnnnnnnnnnnnnnnnnnnnnnnnnnnnnnnnnnnnnnnnnnnnnnnnnnnnnnnnnnnnnnnnnnnnnnnnnnnnnnnnnnnnnnnnnnnnnnnnnnnnnnnnnnnnnnnnnnnnnnnnnnnnnnnnnnnnnnnngttgtgtagtctcatttattatgaaaagattcttccagtatgtacatacgaaccaaaagtatcagtttatcagtcccactcacatcccacccccacaggcataccaacagggtcaatcttccttcatggtacctagaaaaactgtctttttccttaggtaaatggctaaaaatgtattcatgactgctgcagtaagagcatccacctatgtatctttacatactttgagacagtgtgataaagctctttcagcacagcagtctattcattcaaagtcatctaaccaaataccttcccccacagctaagaaagaatcccagtgtttccctagtttagagatgaagatactgaaattgcaaaagcaaaaaggctaggactaagatccaggtcagtagttcagctataccagcagtacacattagaattacgaagagttttaaaatatacctgtaggggcctattctgactcagaacagcctgggctgtgtgtccttaaagagtacttgagatgactcagttgtgtgactaaggctgcaaaggaagtagagtgttcagataacacagacaaaaggttacatcattcttagtttttagttttatataaacacccccatttttagttttatataaccagataaatatggttcacttttatttaaattcaaatgggtgctatactgtcacgtgcctaatccccactttacaacttcatgctggatgctggtagcaaactaagatatttttctcttttatgtattaaattccacttgtgcttcatgaaacagactataagaacaacaattcaccataatccccctttgccatgaggaaggtaattctggtcagtttgccaggtattgataaagtaaagtaagagaagacagggcagcaaatcagcagaccaaaaacttatggtagaaatgccaggctgaatcaccacacccacagcgcacaggaacaccagcccatatgaatctacagttctacttagaccagcagggacagca

SEQ ID NO: 322371 - DNA, 417 bp, Homo Sapiens
ccagcccttgcccgaccgcatgccccttgccagggctgcggggacaggaccaaaggacgcagcccacggcgttgcacagctcaatgtgcccggctctggcaagtctcctacaaaacacgggagcccacggggggtcgggtcccgcgagctggggcccaggctgtgttgctggagcatcttcttcggaacctgggggacactgtgcaggctgaggtgctggggccgccaccggggtcagcccaggcagtgtctttccccagaaaagggtaggatgcctccgtgtgtgacccaggcaagtgccacagtccacacatctcatgtttgacatgcatgatgcctacatttcaagaacgggcagggggccggggtggttctggagggaccaagaacttgtataaccaacgaacaactacataa

SEQ ID NO: 322372 - DNA, 491 bp, Homo Sapiens
ctggaagaggtggaagacctggagtttggcacagcaggaggggaggtagaagaaggtgcacctccacccccaaccctgcctccagctctgcctccccctgagtctcccccaaaggtgcagccagaacccgaacccgaacccgggctgcttttggaagtggaggagccagggacggaggaggagcgtggggctgacacagctcccaccctggcccctgaagcgctcccctcccagggagaggtggagagggaaggggaaagccctgcggcagggccccctccccaggagcttgttgaagaagagccctctgctcccccaaccctgttggaagaggagactgaggatgggagtgacaaggtgcagcccccaccagagacacctgcagaagaagagatggagacagagacagaggccgaagctctccaggataaggagcatgatgacacagctgccatgctggccgacttcatcgattgtccccctgatgatga

SEQ ID NO: 322373 - DNA, 478 bp, Homo Sapiens
aggaggggccaggctcctcccaggtgcaaatgacccggacttctgtggctccacctcagtgctcaggcagattggagttttgccagggaactcttcccccctggatgtctcaatttgatcctttcttcattctttaatctggcaccaaagaagccaatgtgtgaatgcttgtctagaatagaatacactcttcaagggcttctcttcttggattcagctagtctctcatcagaaaagacatgaaaagattttgtgttaatcaattttctcatcctcgatgaattaaaaatataaatgatgcaagtccaaaggcaaacagcaaaaaagtcatggaactcaacttctggatttgcttttccaattccaggactcttacagttacactaccaaagcttcagaaaaaaaagcacaattcaactcagcagtcccactgagacgagaagtcttcttctgatggaaggtttttctcaatggaagc

SEQ ID NO: 322374 - DNA, 613 bp, Homo Sapiens
ctgtgtagacttctttattaagggggctgctggtgtagaactgtctacccaactagacaaaagtccagacatgatgtaaacaatccactctccccaacaataaatgtaccgttcacatatcctttctcagtaagggcatactcttttgagacaaagactgcttcaagtattaaatgaacttacacaaaggcgtataatatataattatctaccattttctatttgcatacaaatgaagcaattgaagtttttcagtcttctgctgaatgcatttttaggagctgccctaactatgctctgagcaagcaagtatatagagtcttgggtgagtgcagacacatgagactacaacttgagtatctgttcccaggacagaatccccagccagggagacttgaccagacttgaattgagccccgaggaaccaaaaaatggaggggcagggtggattccattctctaaagcagctgatgactgcctgaggtggaaggtataaactaatctccctgggatataacaagtatttaaaaaaggattttctacaatgaaaatggttttctttaagacatttccaaatactgaatatcaaggccaaattaattccatgagaaac

SEQ ID NO: 322375 - DNA, 796 bp, Homo Sapiens
  misc_feature (13)..(13): n is a, c, g, or t
  misc_feature (146)..(146): n is a, c, g, or t
  misc_feature (179)..(179): n is a, c, g, or t
  misc_feature (185)..(186): n is a, c, g, or t
actgatgtcgggntggcgcccgcagacaggcccccttggtcatggctgtgcaaagtactccgttctaaggcgcgtgcaacttggcagccctctccttgcagctgctgggcaagcttcggccagtttctcctcctcctcgggactgngcagaggcactggcccactgccagtcatcactntgctgnntgaggaggggctgcatgtccaggggccacgggtcgcactctggattcaggagcatctgcaggtgggggctagagaagagctcccccagcaaggcctcgttcttctccctggtgtcctcgaagtgctccatcaggctcgagcaactggagcacccaatggtcaggctccggatggtatcgagcaactggtccatgaagtgtagctgcttctgggcgcaggcacagcccttgaggagctcctggtcatctggcgcacacagcatcagctcgtggcccagcttcgtcatttcttggatcttcacctctgttgggacccctttcagtgagctgaacctgtcctgcagtgagggccagacccgggtacacatccactctaggatctccaagcggtactctgaggggctgcacagcagttcctgaattgtctttggctctgtgatatacagaccctcgaggaaggggcagtttaggtccttcagcttcccgaacacctccacagccgccctggacacgctgctgtcgccttcgtcctctgagtagtcgtcgccgccacggccgcagccagcgtcctgccccgccatgtttcgcgctccgaggcgcgccccgcccat

SEQ ID NO: 322376 - DNA, 790 bp, Homo Sapiens
cttaggacgcaggtttcccctttccccttgcggggcccccgggccgccaaagcgaaatggttttagaaaagcttttggaggggccggagggcggcccgacaagggttttatttctgtttatttccttttggaaggggggctctctgtatcctttatctccggcagggtcagcggccctccagggcccggtctcgagcgatgactgcctcctcgaacttgatcatgagcgtggtgcccttgtgccagtgcgccgtgaccttggcagggaagccgctgtgtgtgagcaccgcctccacgatgcccgccgtgaagctggcgcagttgagcgtgctgttctccttgggcacggagatgtaggtgttgatgagcggctcgcgctcgatgatgtagaaggtgcgcgcgtcatcgttggcctgctccagcttgtccgcctccttgccgaagagcgccttccacacggcgcccttgacgaagagcaacgcgcctagcaccttggtctcacgccgggcacccttttcgcgcgccaccagcgcatccagcacgcgcgcgcccacctggcggcccagcgcggccaggcgcgactgcagctcggccacggagaagacgcggctctggcagtgctgtaccagctcggagaacagcagtgcgaaggcgctcaggctcacctcggtgcgcggccgcgccagcgcgcgctccagcagcgccgacttcccgcgcgtgaagcgcgcctccatgccgccgccacccaggaaccgcagcagtctgctcggccgagctgctttacggcccc

SEQ ID NO: 322377 - DNA, 638 bp, Homo Sapiens
ctttcctactggaacctgggcttggctcctggctgttgtctctctcccctaggttcccgctggaaggcttgataacaaaagcaggcttttaccagacaagcaaagatcaaaaaaagatgcaaacctttgtttgtttaatggaaattcctcagggttgctttcctgtgtattccaaagctatgacggaatagtttgaatagtgtgtgctctgactcatccatgacccctaagctcccaagatctcccaaatccgcaggccccgtttggcagagttgtggctcatggggatgacagagcagaatgtttagggtttctgcccaagagggagaccaataaaaatagggatgacaagtcttacgatgttccctacttcttaaagagaaggttaagaaatcccgtgctggaacatccactaggttctggggtatatactttattacacacatgggcccctttattcctctcagtgaccctcagggtaggtctcactacccaagtgttagagtgaaggacgctgagactcaagaagaggaacaggtcagggtcagacagagctggaatttggacacagttctgtctgactccagatattccttgtatcacacaatactgtcttctgaagcaagtgattgtcccca

SEQ ID NO: 322378 - DNA, 1153 bp, Homo Sapiens
  misc_feature (145)..(145): n is a, c, g, or t
  misc_feature (166)..(175): n is a, c, g, or t
  misc_feature (183)..(183): n is a, c, g, or t
  misc_feature (219)..(233): n is a, c, g, or t
  misc_feature (437)..(446): n is a, c, g, or t
  misc_feature (636)..(749): n is a, c, g, or t
atagggaaaaaagccccacgcacgcggggggggagaatttccacggacggttttttaagtacaacagaaggccacgtgttttgtgggggagaggggggccttttccccacatattttccgggcgcgagagaaaaattcgtctctntaaaaaggaggaaattggttnnnnnnnnnngtgtctcntcttctcccacaatataaaagatggtggccacagannnnnnnnnnnnnnncgcgtgaaaaatatttggagagataatctcggaaagggctcccgcccctatgtgggacacctccccccgggtggggaagaagagagtttccccccgcgtgagaatggaccccctcccacgggaacctcccccccttttggggagaatttttgggttgcaaaagaacccccctctgcgggtgttttcccacccgcggggggccgnnnnnnnnnnaatttgggtgggggaggattcccaaaggcgcccttttgtttcaatggcccccagggggtttctcccttaggggaaaccagggtatatggcccccatgtttccccctttcccttactggggccccgcggcgcccaaaacgaaaaggttttagaaaggcttttttgcagggcccgaaggcgggcccaccacnnnnnnnnnnnnnnnnnnnnnnnnnnnnnnnnnnnnnnnnnnnnnnnnnnnnnnnnnnnnnnnnnnnnnnnnnnnnnnnnnnnnnnnnnnnnnnnnnnnnnnnnnnnnnnnnnncaatttataaaacatcagccgcctgcccccgtccccataggtctcattcacctcctctttggagccatgtgccaggagcatcaccaacagccgcaggtcatcttccaccacggcccggagcagctgctgccccagtggcacatctgagcttggcagtggggccaggaagagcttctgttcatacttggcccgtatccagcgttccttctcctctctgcaggcatcaggccctggcttggagtagccacccaaggccccctcccagacgctgttggcgagggcattgcccatggcagtcatgacagccagcagctcaggcggccagtcatcgaggtcaagggagcgcacccgggacaggtgagcccccaggtgtcggtggatgcctgagcactcaatgcacatca

SEQ ID NO: 322379 - DNA, 847 bp, Homo Sapiens
  misc_feature (198)..(198): n is a, c, g, or t
  misc_feature (275)..(275): n is a, c, g, or t
  misc_feature (296)..(296): n is a, c, g, or t
ggttcctcccttccaaatgaaaaaaggcccaggtttcccttgaggaatggagaccgtcccatccccctctttttacccgagtgtatgcaagctcaacccaggctttcttggccctcgctttgcccatctgtttcaatggttgtatccctggaccttgggttcgttaagaaattcttccagccaactcggagcaaaaancgatcccagaccaaatttaccccactggcaaatatcgaatggtttcccccaaagatacccggtaaacgatgttccgnagtatgcccaatcaccctgcngtatttcctcccactcaccatacaaccacggttgggctggtggctccagtgatgaggcggcccatctcaatgtggcctatacagtggttcacacccaccaatggcttattccacagctgggccacagtacgggccacaacagccacagaaaccagtggggcacccatgccagggcccttggtgtatgcaatgcagtcgatatcctgggaggttaatccagactctgttagtgcctcctgcagcaggtctaggataacagctcggtgatgcctggctgtatcacctggaaggaatcctgtgccaggaggcgtgacgtaagtccgccgcgggttcgccagcaccttgccatcccgcaccacgcccacgccaatcttattggcgctgccttcaaaacccagcaccgccggcatggcggaggctgggagaaaacgccgacaggactcctggcaatgtcaggagctgtggaggtcctcactagtccgcgctgggccgcagctttccggagcgcagaggaagctggccagcctgcagatagcactgggaaagacacc

SEQ ID NO: 322380 - DNA, 964 bp, Homo Sapiens
  misc_feature (464)..(464): n is a, c, g, or t
gttaagcatatttgtatattttttactagttatttcatacttgccctgaaagaatacacattcaaaaagcttgaaattaggcaatgtcagtctcatcaaacaaaaccagcattggaagcgaatattaacaaatatcagaatgaaattacaaaatatacatctccagcctcataaaacatgaattttataagcactttcataaacataagaaaaatagctttgacaataactatttgaaaacattattattaataatcttgtatactgtacatgtgcacttaaatgtaatagcaccaacattcattatattatgaaggggatactttataagaattataaattatttttacatggattaaataattttgggcagagtaagtccgcaggctttaaaataaccagtcagccttagtatctacatctggaccagggaagcctttggtggttacagacacagattcccntgtgaagttctccagggtgtaaagaaggccccagggaggtgccgacgggatgtgagggctgcctttcagctcaggcgagcctgcaagcaacagggcagtttgggaagggtcacaggcacaggaagggagcagtgggcaaccattgattacatcaaaccaggatggtttcttctttttaaagaaacttttgttgagtgtttacccacccccatccacacaaatatgctctctaggaaatgtgaaagtataagcttcagaaaaatgtttttctcatcctttaatttctggttttatgatcaaatgttccgaagacactgcttctttttgctcaaaatagttgacattgtcattgcttctagtttttcagctcctactatgcttactatgtccatgggtgccattgacgtctttggctatttatcatctctgggtggcgcaggccaaggacgcccatggacagcgcgacctcctcccattccacacacgcgcccacgaccccc

SEQ ID NO: 322381 - DNA, 512 bp, Homo Sapiens
gagaccgtgacgatgccatcccactcactcaggctcagcccctggaccagctcccgggcgtggttctgtcgttccgtctggatgaggttgaaggacagcccagcttcagagatcatgggaagcacgtggttcttacaccactgccaggccaggccccgacccccaaagggattgaccaatagaagcaaccggggcggccgaggtagcaggtcaggggtgatctctggtcctgctgctcctctgcttcaaggtgtccattcatctgctggtcctctgctctgttacatcaacgggaccctggccttgggtcttaagccatagtaggctggtaggagcaaggagtcaggtctcactgtcctggcctgaccttcagctctccaacactgggcccgccgggtcctccgggagccactgagaggccgtcggcgtcgggccagagcgtcaccgcgcgacgcatcgtgctagctacacgcatctcgctcccagatccctttcttccggaaagctatcga

SEQ ID NO: 322382 - DNA, 542 bp, Homo Sapiens
aaagaaaagcttcagattttgtctttccacagtatgaggatcttggcttttagatggtcccttacctggtcctgctgctcctctgcttcaaggtgtccattcatctgctggtcctctgctctgttacatcaacgggaccctggccctgggtcttaagccatagtaggctggtaggagcaaggagtcaggtctcactgtcctggcctgaccttcagctctgtggaggagaggtaagtgaggagcagcattgacaggcaactgcaggaggcccttccaggctcaatgtgcctgagaaccaagaggcaggggtctccctggcgggtggggggaagagtagataagtcattttaatcactgccccagccagtccatctggttgcacacaatatgtatgctataataggagtgaaggctaatttttattgagcacttattatgtgcaaaatattgacctcagcagttttattaactttcataatcctgaaaaacactctgtgtgccaggcctgttgtcatcccctttttgtccataaggagagtaag

SEQ ID NO: 322383 - DNA, 464 bp, Homo Sapiens
aagggcacaagattttttccatttttgatagctgcctattgtcagttttaaatggagctgaaaaacagaagacttaaataaactgaaagccatcatcgagttttaaaaagggacactgaaataatccttcttgaagatattttctttaacagccacttatttctaccctgcaaaaagcttgaaatataaaattagtatttaaagcaccatacaaaataaaaaaaccagacaaaggagtaaggtatgttccaatttaatctttatgcaggcaaatttgtaaaaaatgttaatcacatctacatgaagtcgcaaaagagatgcaataattattgctcacttttaaacattaccttatattacggaaatttggctacttactctcatcactattacatgcacttcaagttaaatacttaccaaattttcactgtttattcctgctaggaaaggacacagttccttag

SEQ ID NO: 322384 - DNA, 1362 bp, Homo Sapiens
aaaaaatagcgtcgagaaggtggagccgggacacgagcggtaatttgtgtaaatggtaatatactgtgggggaaaagtcggggagaaaagcaaataatgggcctttagtataaagccttttcagctgaacatttaccccaaagacctggtagcggccccaggcacctgaggaggcaatgacagtctaggaggacatcttctgcagcaacagccatcaggagaccagcagcagcacagcactcagggctcggtgtccacctccctgcagatcactttctccctcactggaatcaaccgcagcacttggagtctactcatggagtagaaacttctttatggggtctggcagaggcagcgaaggaatcagatgaagccggtgtttgccaagagctcttctcacagccacacggcacagacacagcaaggttctgggaacacttctggcctctttaaagacctgcaaggcctcagggtccacttttcttcttccctctcgactctggggcccagcgattcccacttcactagattcaggttggctccaaattctacccagcaggctcacgaaggctgcctcacagccgtggcgcagaacagcatccatgacgcacccaggggagcccctgtagaatccctgtgtgttgacaggaccattgcagttgaagtcagggttcgcgccagccaggaggagcagccggaagcactggaggttgtggtaggctgcgctgatgtacaaggggcagaccaccaaggaggtgagccgccgggagaatcgaggctggacatcaggagtcaggtggtggttgacgtcaacatcagccccgtacctgatgagggccttcaggatgtctgcccggcccacgcgagaggcgtggtagacaggggtgctgcgatggtgccggcttccgttggggtccgcgccagcttcgagaaggatctgggtactctctaggtgcccgttcaccacagccacatacagggccgtctgtccttttacgtccaccagatccacctcggcccccttccggatgaggaagtccacacagctcccatggcctgcagtggccgcgattcgcaacggtgtgcaggggagccagccacagcaccagacagacttctcgttgatgcggctccggtagctctcctcttgcaataggctcctgagggtctggaggtccccgacgtaagctgcatcatggagcctcgtgtcctcacagtgctccagcggatgatcacaaaattgctccctcagccactccttcagattacgacctgcacgactctctggatgccggccgcgctgtggtttcctcacataagaagccaaggagtcggaaagccgggtgcctgaggcagcagtct

SEQ ID NO: 322385 - DNA, 799 bp, Homo Sapiens
ttaaagttttccaggctatttaatcaagtaatttacaatgtacacattcctgagtatacaccattgtggtgacatcatttattttggaattttctgcattcagcttaaaaggtgtttcttcccaagaaactgaacttttctgtcaaatgcacttgatcgaataggagaattgggttcataaaatggattcattgaaaattttatatataaatcataaacatcagtaaagaagttctttattccatcttcttgtcttatgtcatgaagcataataaacctcatatgccccgcagtgacaaatgccgacacaaaccactcgttgaacttgtccacagttttcaagtacatgttgttcgatagccacatgttctcatctacgaggtcgagagcagcatgagctatgaactggttcagatgacgatggtcgtctttggattctgccttcccagctggcaaaaactccatttcaaaaactggattatcatggtgaccaacaattacaaagtagaagcttccagacatggtcttcaatatatggctcctcgggttcttcggcggggactccgcaagtccagccagggaagagaggggcgggggcgacaaaggcaagacaaggacaccgccgtccccagtccttgtcagctgagcttctgccactgtcagttgtgcctgtgtcactaccgcctctgcgtacaaggaaccaagccgcttctcgcgcttttccgctccgtcacttcggtgacgtcatagagcgccaaaggccggaactagtgaaaaccccagagaaaatcaaatcccc

SEQ ID NO: 322386 - DNA, 641 bp, Homo Sapiens
  misc_feature (122)..(130): n is a, c, g, or t
gaaacaaccacattttgctttattaggcgttccatggtaatataacacagagttcttaaggaataataaacacgagacttgttttttaccataattattttgccatcaagacagtggttacnnnnnnnnngtactcttctggctacacactttatcagctttagaactgaaagttcctccactcatgggtcacaatcacaatttccaggattaaaaaccatctattcttaattcctacactgttttagagcatcaagtcactgcagttattcagttctgagacactgtcgatttattttagcatttacatatgacattcatttaacagacacacaaagcaagccaacaggtaaacatgcttacacagcctgcagaaatcgtcaggttttaacttgttttttaagaaaacaaccaaaacaaccaaaaattaccatgacccggtacaggaaaaacaggaagactcaagtgaatactagagctgcaagtgtttcttagaattgaaacaaaaattgtttttttccaacttgttcaaatttccctctaagtgcaggtgagaaaaaaagcaaatatattaagtcaaccaattatttttttaaaagtgcaatttacctttaaaataacaaataaacaacaacaacaac

SEQ ID NO: 322387 - DNA, 804 bp, Homo Sapiens
  misc_feature (220)..(492): n is a, c, g, or t
ttttccattataaagggattatttaattgaggaaaccaccaaattctttttttccaggtgaaggctttaatatggtggaggaaccttccaataaaagtaaaatttctggcttaatcacaggatcaagcccaagttttataataaaagggaaaaaattatcacttataattagcatactcagcatcagaaatgataataataggtgagtaacctaccctgnnnnnnnnnnnnnnnnnnnnnnnnnnnnnnnnnnnnnnnnnnnnnnnnnnnnnnnnnnnnnnnnnnnnnnnnnnnnnnnnnnnnnnnnnnnnnnnnnnnnnnnnnnnnnnnnnnnnnnnnnnnnnnnnnnnnnnnnnnnnnnnnnnnnnnnnnnnnnnnnnnnnnnnnnnnnnnnnnnnnnnnnnnnnnnnnnnnnnnnnnnnnnnnnnnnnnnnnnnnnnnnnnnnnnnnnnnnnnnnnnnnnnnnnnnnnnnnnnnnnnnnnnnnnnnnnnctttatgtttaccctaccaagagcagacctgagcattttgctggccgtagaggtatataaaagaactctaagcttaggcatgcagaataggcactggatgaatgtagtgaggctattaggagtcttgttggctccctgatgtccttatcatgtcttcttcgcagactgtggatgcacacaagacagctaaaaccttgggcatcatttgaaaatgtttggctgcctgctacaatctcaggagagagaatccttcatacttatattggactggatatattgtcaatcaaattcttttttaaaaaaaagtttttt

SEQ ID NO: 322388 - DNA, 708 bp, Homo Sapiens
aggccggccgccaattttttgttgtgcgttttcgttttgttttatacttaaaaaaaatttaatgataaatacatattgatagaaattattcaattctcctatgaatgcagcatccaaggatattctccatgttcatggctcccagcccttccctccaggctgatggggcaacttgagacccaccaagccagcagactcctccaccgagcgctcacccttgccatgaaattcctgatgtagggccacatgtttccggatgctacgcaggaggcagagataggtggcagcttggaaatgaagctcatgttgggctctgcacaacttttcactggtgacccgatgtgcacggaaagccttcacaaggtaccgataggccgcggtgtcgcgatagggtcggccggtggccgcgctcaggtagcgcaactcccgcagaagtcctcgaaaagtgtgcgacggggaccctaaggccgccattgtcctgtccttctccgagcgtggtgcccaacggcgtcctacgaccctgaaaacccctcctccggcccaggcgcctaatggtacggtcggacagactaccgactccccctatcgactgacgagcagtggaaccgctcacttgtccgttgaccgaaccttattaatcgaaggcccaggggcgccgtaacaaaatcaaacgaaacccgactgttaactgaaggtaccaggacctct

SEQ ID NO: 322389 - DNA, 469 bp, Homo Sapiens
taaacttaaaaaaaatttaatgataaatacatattgatagaaattattcaattctcctatgaatgcagcatccaaggatattctccatgttcatggctcccagcccttccctccaggctgatggggcaacttgagacccaccaagccagcagactcctccaccgagcgctcacccttgccatgaaattcctgatgtagggccacatgtttccggatgctacgcaggaggcagagataggtggcagcttggaaatgaagctcatgttgggctctgcacaacttttcactggtgaccctatcccacgaaaccacacctagcgcccacgtgaggggtgacgtatgctgggagttgtagttagagaacaaaagtccacatcaccgcgccaaaggctttaccctcgaaactgcaccgatgctccggacgttgaacgggcgcgcgcacgcttctgcgtacgcgcttgcctgcccc

SEQ ID NO: 322390 - DNA, 600 bp, Homo Sapiens
tgcgattttcatcatccctcagggccgggagaccgagtggctctttggcatggatgagggccggaaacagctggcggccagtgctggcttcaggaggttgattacagtggcccttcaccgaggtcagcagtatgaaagcatggaccacatccaagctgagctgtcggctagagtcatggagctggccccagctgggatgcccacccagcagcaggtcccctttctgtctgtgggtggggacattggggtccggaccgttcagcaccaagactgcagccccttgagcggtgactatgtcattgaggatgtgcaaggggatgacaagcgatacttccgtcgactgatcttcctcagcaacaggaatgtggtgcagtccgaagccaggttgctgaaggatgtgtctcacaaagcccagaagaagcggaaaaaggacaggaagaagcagcggcctgctgatgcggaggacctccctgcagccccggggcagtccattgataagagttacctgtgttgtgaacaccacaaagccatgatcgctggccttgccctgctgagaaacccagagctactcctagagatcccactggcattgttggtggt

SEQ ID NO: 322391 - DNA, 643 bp, Homo Sapiens
ccttttataatggaaaaaaacagtgaacagagagaagagatttggggataagttagaaggtaccctcaaaactactgccgtaaacctacaggtgggcaaggaggaattactgtagtgtctctggagaaagttcttgaacatccaaatcatctcttttctaagcagtttttcccctaatctcataccttacatcttccagcatcatttgctacatcaatgtcttttcatcctcttcatcagccccattgagctgactccagcttatttttgcactggatttccaccatttccttcccacacccatcctttccctctatttaaagcctccatctcaccctcagtaatgctgctgatttactctcagatgtctcaagtctagcttcctttttgaatccttctcctactccaggggctgtcaaaggcagccttaaagttcagtgactgttaggtggctcaggccatttttcattgggtggtctttggtagtttgcatactgaatttgaattcagtttacaagcaaactgttggatatgaggaagaaagggatatggccttagccctttttccaatatttggaatatgaaagcatattgtgcttagtgtaaaaaatgttttcttctcctattctgctcttgtctttac

SEQ ID NO: 322392 - DNA, 953 bp, Homo Sapiens
tgcgtttgtcaaagcacagacttcctgttttgcctgctagcatctccctgtaactctcccaatcttgaggagtgatccctgtcccagcccctggaaaggggcaggaacgacaaactcaaagtccaggatgttcaccatgacaagagccatggaagaggctctttttcagcacttcatgcaccagaagctggggatcgcctatgccatacacaagccatttcccttctttgaaggcctcctagacaactccatcatcactaagagaatgtacatggaatctctggaagcctgtagaaatttgatccctgtatccagagtggtgcacaacattctcacccaactggagaggacttttaacctgtctcttctggtgacattgttcagtcaaattaacctgcgtgaatatcccaatctggtgacgatttacagaagcttccaaacgtgttggtgcttcctatgaacggcagagcagagacacaccaatcctacttgaagccccaactggcctagcagaaggaagctccctccataccccactggcgctgcccccaccacaaccccctcaaccaagctgttcaccctgtgcgccaagagtcagtgagcctggaacatcctcccagcaaagcgatgagatcctgagtgagtcgcccagcccatctgaccctgtcctgcctctccctgcactcatccaggaaggaagaagcacttcagtgaccaatgacaagttaacatccaaaatgaatgcggaagaagactcagaagagatgcccagcctcctcactagcactgtgcaagtggccagtgacaacctgatcccccaaataagagataaagaagaccctcaagagatgccccactctcccttgggctctatgccagagataagagataattctccagaaccaaatgacccagaagagccccaggaggtgtccagcacaccttcagacaag

SEQ ID NO: 322393 - DNA, 923 bp, Homo Sapiens
  misc_feature (749)..(757): n is a, c, g, or t
ctccaggggacatttcaggaaaccagaatggcacgttggtcaccattctggtggacaacgttgagcccagggcaggggccccagcagcttcggggatgctgttccagacttcgagcccccctgcagtcaggcagctgctgtgtgtggttgagttccttctcgtacctggggctgagtataggcccagattcgtacctcactccctagggcagcctcgaagcagtcatataccacagagcccacagactgaccaaactgcacaagggcagcaggcacttgcacctccagcaggacgcagcgggcagtagggtaggcctggaaggagagcacgacttgggcctggagagaggcattcctaggctcctccacccctgagtcagctgctcctccaaacttttcctcatcttcaggctcttcccagtgcccatgcacggccaagtggacagccacacgcagacagaggtcacagtcggtctccttctggcacctcagcaccagctctgtctgcaggtgcgtaggcgccagcacggggcccggagcaggcacgatgtccccaggcaggcagagtatgtcactgtcccagaggcggcaggagaggcccggagagcagtgggtagcgtcctgaggccccacaagcctctccagagaaaggaccactgggcttcggcccagtgccaaggacagcaagaaccagggcacaggcatcttctaggtgccaggtggcacccaggcctgaggccctgtgctgnnnnnnnnnaaggggggcagacaccccagtcagcccgtgtctgtgggtggcaggggctggaatccctcttcagcctccagagggggcggagggggctgtgctgggtagtttgtgcactctctgtcctgggagtcctgactctcctcctacttccagcacggagtgctttcgttta

SEQ ID NO: 322394 - DNA, 393 bp, Homo Sapiens
  misc_feature (52)..(98): n is a, c, g, or t
ttttgctctagcatgcttccccccttctgctgaatggctacgatgcctacgnnnnnnnnnnnnnnnnnnnnnnnnnnnnnnnnnnnnnnnnnnnnnnngagacatttgctggggtggtttgatggccaaagaatcatcttcttctcctctgtcttccatagagtcttctcttctatacggggagttccttattgtgatctccatgcggtgatctctcagctccccctcctcaagggaatcccgcttggaatcccggtcatcagaattttttaagcgttttatctctgctttctcctcttgttccttccttcgtttcttttcctgaagaatttcatctaaagttttcactttccaagagtccttttcatcacccatttgagttaaaacacccta

SEQ ID NO: 322395 - DNA, 872 bp, Homo Sapiens
  misc_feature (123)..(123): n is a, c, g, or t
tttcccggtcccaagccacggcttcggtgtccaggatgaaggatgtgaccgatgggagtttaatcttggggatgcggctgatgatgtccgggtacttcccagtgttgtcttcctgattcctgntgaagatcttcacctccccgccttccagggcgtggatctgtgccctctgcccgtcatatttgtattcgcaggtgaaagctgcctcctcaaagcgtttcaggacctcgctgatgccccgggtgggatgggccaacattggttttcaggggaatccctgggctcagcttgcagtgctccgggagacgttccaggccgtgctccagcagcacggggataattcggtccaggtcgggaacctcgcagaacgtctgcttcaggatcatgccttgctcctccagccacgtctttctggcctctgctgtcttgcccttcccagcatccaccatggctggtgggaattcttggcccgggggcgtgaggctcactgcctgggagagggcagccagcaccgactgctctgccagcccaaggcgcagccgtccgctcagggacctagcgatgaaccgggcttctgagtggcggcaggccacaaagaggcctttgatgatgtctatcttcttggctgtggaagcactgccagtgagcctggcgatgtcgcggaacttgctgaagaccccggaggcagtgagcggaggtggtggcagcatgagcctctgggtgctgcggctgttctcggccaccagccccacgtcgcctttctcggctgcctcagcccggacggactccagctgccgacctgtggcctgggccactgccttgagaaggaccgacgcgtggtcgacgatatcccgggaattccggaccgtacc

SEQ ID NO: 322396 - DNA, 549 bp, Homo Sapiens
  misc_feature (41)..(41): n is a, c, g, or t
  misc_feature (43)..(43): n is a, c, g, or t
  misc_feature (112)..(113): n is a, c, g, or t
  misc_feature (122)..(123): n is a, c, g, or t
  misc_feature (126)..(128): n is a, c, g, or t
  misc_feature (130)..(130): n is a, c, g, or t
  misc_feature (142)..(144): n is a, c, g, or t
  misc_feature (148)..(150): n is a, c, g, or t
  misc_feature (153)..(154): n is a, c, g, or t
  misc_feature (157)..(157): n is a, c, g, or t
  misc_feature (165)..(165): n is a, c, g, or t
  misc_feature (169)..(169): n is a, c, g, or t
  misc_feature (175)..(176): n is a, c, g, or t
  misc_feature (180)..(181): n is a, c, g, or t
  misc_feature (190)..(190): n is a, c, g, or t
caaatatttttattcacaaactcttcaaaaacacccttcananaacacaatttttcattccaaactcactctaccctcatatcccactctttattctttactccctaccctnnaccattttnnctnnnanccaaaatcccannnctannncanncantccccatncccntcattnnatgnncaccccacncccaccaccacccagaagctgaagccttatgacccgcttggaggaaaacatcctgtcctggttttctgtgttccaatcagctctctaatcacatcctcgacctgagacacagacttcaagccagcctgtgttctgtcaggctgctggtcgcccttctctgcttaaagactgtagaggcgactggtgttctcacgcaaggcagccaaggtgagggagagtggctgatctttgactctggcaatctctcggaccgtatgcaaggccaggcccgggtgggcatactggcaaaggcttttgggaacctgcaggtgcagggagagtcctagtcatggcctcgtgccgaattcgccacccaggcc

SEQ ID NO: 322397 - DNA, 1407 bp, Homo Sapiens
  misc_feature (186)..(186): n is a, c, g, or t
  misc_feature (244)..(255): n is a, c, g, or t
  misc_feature (374)..(374): n is a, c, g, or t
  misc_feature (384)..(398): n is a, c, g, or t
  misc_feature (422)..(437): n is a, c, g, or t
  misc_feature (617)..(627): n is a, c, g, or t
  misc_feature (783)..(783): n is a, c, g, or t
cagcgcccagagcgcgcgcggagcgtcggctgcgtcgatcggcgggaggagaacccccccgctgggaggtcaccccattctgtctacaccccacaaggctttctcgttcacccacgagggcgtggcgtcctgccacaccagaaacagggagctgtgatccgggcagactccatcctcgttgaagtnagtgacgggggtgacaccactagcgcgggagcacacgcccaagaaacaccctaaacannnnnnnnnnnncgcagcccggttaggagcttgttgacgttgtcctcccggggccggggaggccgcacaccaccggggcgttggtcctcccccctttttgcattcgtctgcggcaccaagggggggagganatgccatttnnnnnnnnnnnnnnnaacagcggtgtgtgtggctttttnnnnnnnnnnnnnnnntttagtccgcgcggaggaagggccaccttgctgggcggcgccctttcatcgcgccgctgtagaaccgtcttttttccccccccgcgcttggggggggaaacggcccccgggcacgaacgagcggcggcgggcgggttcttatatttcaccccgggtttattcgctcggacgaaaaaatgnnnnnnnnnnnccgccggccaaggggaggaaggaatttggaaaggcccccaaacgcgttgttttgtttccgccagaaaatatttcccccaaagggtatacaggaaggggcccccccgcttgtccggcgtgggcagctttcggcgcccccgcacgaaccttggctatntatcggaggcctccgcctcgcgggcctcccaccccccgggctgggcggctctccaggcgccattctccgcggcgtgtggaggccttcaaaccttctttcggttgttaaagggcggtcgcgccgtcttcccctcaaaattttgggttcgccccaaaaatttttgtgctttttgcccactggttcttttttttctcccccgccctttcgagaaactcccaggggccgccaagctctggccagttgctccagggtcctgcctgggccccagccttctttggtgtcacgtggtgcagctcctgagcatccagggattcggcccatctgcattcatctgcacttcattcagtacatcagggacaaggagttcttccacatcttctgtgcctccctcgtcttcctcactctcagaggctgcgtggagtttctgtgtcagttctttgttcttagacaactgttcctgcatagcttggcgagcctccaggtcatatttggccataattgcctttgacttggcccatttcccactgttttggtgcttaaggctcattctttccatcattctggccttttcaattttttccagttcttctagtgctgcagctggattaaccttccgcagctgcc

SEQ ID NO: 322398 - DNA, 863 bp, Homo Sapiens
ccaggaataggcatagttccagcggtttccatttaattttacctttatccaaggcaaaacaaagtacaggatgctgtacattaaaaaacatagaaatatatcactcaccccacatcaactcctacggacaaaagggttttttctaagccctgctcctttctgaagcacacaccacagctaaatgtacaaagagccatctgctggtccaacatagccaactccaatgagcaggacgtctatcagcgtccatattcccaggccaccgaagctgaagagcttgccgaggccttcccgccactggcccaggtagaaacggtctgctccaaacccaccgagggtgatgcttagagccagagccgtagaccacttatagcctccagtccaattgcaatatagcattttgggaaaagtacggttacccaagcagtggacgtggtcccgcaccgtgcagttggcagggtagcgctgccgaggacaggacaccgtcatgcagctggtggagttggtacactcgtaatctgtttcaggaagctgccagcaaaatctgcaagtcatgttaatgatgaagttcttttgggatttgaagtcttgatcaacacaggtaacagatggtttcactgcacagtcaaaagtgacaggcttcccataggtacaggagaaatttgttgtgcagtctatacagtctgcaggaagcctgctacacaaaccattgctcggacacttcatcacataaggtgggatttcagtactttcaccgcccgacagaatgcagaactgcgagaggaagagcagcacgcgacacaaggcgcggaggcccctcagcgggcgcacccctcccgccatcttgccagcgcctgcgcact

SEQ ID NO: 322399 - DNA, 1081 bp, Homo Sapiens
aggctgtctaagacactcctgtggagcagagaagggatgttcagtggcttcctttctttgtttcctgttccttcctctgagatagacccactccctcatccacgcaacagatggccaggatgcatctgctggggactccgcccctggcacttggcacccattcagtcatacatgtctcagactcctctgcagccagaggtctggctgtaatttagattctgctaagaaagggaggtgggatccgtcttcccgcagctctggcagctggccatccctgatggatgtttgtggttgcaggaatctaacctaggtctcgactccagttttgtccatgtggggcagtgatggcaggggtagtggtggcattagcagtagcagtggctgctctctggcctctgattcggctacagtggtctaatattgaaaccaatagtccagtggtggcctctgccttctgctcctccagcctttccagtgatttagataaaatccctttctgcctaagattcctagagtgctttctgttttctgggctgaaccttgactagtgtggacactgttgttggacttgaggtcaggagagcctcctggatggacctggtgggccttgctctagagggcagagagaaacaggctgagcacggttgtttggccactggctcagtttaggctgtggggatgcagaatctcagcatgttaggagagaaaacagggacccaataaaaattcaggaaggcaaactgagccacagcatcaagatgtgtaaactaggggaggagtgcagcataaaaggtgaagaaaaggaggcctctcatgaagaggcatccaattaggtgtccaacaagagggtccccatagcatgcatgtcccaactccctctgtctgtgtctgtggcagacaaagtaagccaatatgggcatgctctcctgctagcaaccgagctcagagggctcttcaatagcccacatatacactgtaaacctgcaagcaccttcttttttccgtatccagtgcagacattgctaatcaatcatggcacttgtaccaccactttcctctactgcatccatggcagacatca

SEQ ID NO: 322400 - DNA, 820 bp, Homo Sapiens
  misc_feature (686)..(686): n is a, c, g, or t
ggggcaatagtttgcatagaggtaccagcaatatgtaaatagtgcagaatctcataggttgccaataatacactaattcctttctatcctacaacaagagtttatttccaaataaaatgaggacatgtttttgttttctttgaatgctttttgaatgttatttgttattttcagtattttggagaaattatttaataaaaaaacaatcatttgctttttgaatgctctctaaaagggaatgtaatattttaagatggtgtgtaacccggctggataaatttttggtgcctaagaaaactgcttgaatattcttatcaatgacagtgttaagtttcaaaaagagcttctaaaacgtagattatcattcctttatagaatgttatgtggttaaaaccagaaagcacatctcacacattaatctgattttcatcccaacaatcttggcgctcaaaaaatagaactcaatgagaaaaagaagattatgtgcacttcgttgtcaataataagtcaactgatgctcatcgacaactataggaggcttttcattaaatggggaaaagaagctgtgccctttttaggatacgtggggggaaaagaaagtcatctttaattatgttttaattgtgggatttaagtgctatatgggtggtgctgttttgaaagcagatttatttcctatgtatgtngttatctgggccatccccaacccaaactgttggaagtttggtagtaactttcagtggagagtttggttactcacaacaaatcctgaaaagtattttttaggggttgggaggaattctggggggatactatacaa

SEQ ID NO: 322401 - DNA, 1525 bp, Homo Sapiens
  misc_feature (1080)..(1080): n is a, c, g, or t
gccccggaaaggagtggcctttcttggggccagtgtgttgccagtgttcattcccttgatctttcttggagccggggcccttgttgctttgggtggaatggaagaaaggtgaggggagtttcttgttgaactcaagcggggaaggacaccttacatctccatcaaaagcggttcttggacacctgcagataccgtttcccttggcccggttaccagcttctgttcctgcaggatcagaacattgtctgcttcctggcttgctttggctgagccaaaaatggacgctgtctgcagttccttgtcatcatcctctttccgggggtgaatgaccagtgtcacatggcagttattgtctgttgcaaacttccgaaagaccccgatgatgtagtcttgagctgcgatcctgtctgtggacagctgctcgtgacccatcatgaactgcaggttgtcgatgatcacatgacaaatgtcatagacgtagactgcatgttgcattgtatctattacagtcctgatgctttgctgtccatggaaagtcatgaaatagaggggcaggtcctcaaagcggtcagcccagtgatcatatttgtccagttgatcttccagccgcccctgggcaaactgtgtcagcatgacccgggctagtctcacattgctgatctcgaagctaccccacagtgtgttccccccctgggaacacaaatccaggggcatactcactgatgaatgtcgtctttccactgcctgttggccctgtgaagaccgtcagctcgccctttcgatgtcccttcaagatacgattaaggtctggaaagcggctccagcggaggccagctgcttgctccacatttgacagttctcctagcacctcctcccgaagctgccggaaagatacgatggacttgtgccaggcaggcagggcggtacgaagaatacgagaaagattgaagcctccgttcagggcctccaggggacggggttgctggtctcctggtcgcaccaagaagcatcgtttggggttcagttttcgtgcaaacaacttggcggcttcccaggaccgaaggtcatcccccaaccagnaatacaatccgccggaactgttccaggtaagggagtaaggcagggggtaagcaggtcgttcctcggggtagagtaagggtaggcagccccgtggactggttcaaggccaggctgtcaagctcacgactcgtcagtaccacctcagcatctcgacgactaatcagtggtaatccaaacagattgtggtaggcgctgggtcggggaatagtggtttcctcgtagctcactccatccccctggcatttagcctctaggagcttcaggcctcgtaatcctgaacccccaggggagaaccaagggaagacaagactgcgagcaggtcgcagatatcgcacactgaaacgcttgagtgtgtcatctgtaaccttggtaaggccaaacattgtatcagccagctgaacctcctcctgatcaggcctcgtgccgaattcgccacccaggcctc

SEQ ID NO: 322402 - DNA, 969 bp, Homo Sapiens
ttttcccagtttgattttttccaggccggcccccttgggcaaaaactggtttcagccatgaccccggggctagtcttcacattgctggatctcggaaggctaccccccccagtgtgttcacccccctggggaacacaaatccaggggcatactcactgatgaatgtcgtctttccactgccctgttggccctgtgaagaccgtcagctcgccctttcgatgtcccttcaagatacgattgaggtctggaaagcggctccagcggaggccagctgcttgctccacatttgacagttctcctagcacctcctcccgaagctgccggaaagatacgatggacttgtgccaggcaggcagggcggtacgaagaatacgagaaagattgaagcctccgttcagggcctccaggggacggggttgctggtctcctggtcgcaccaagaagcatcgtttggggttcagttttcgtgcaaacaacttggcggcttcccaggaccgaaggtcatcccccaaccagaatacaatccgccggaactgttccaggtaagggagtaaggcagggggtaagcaggtcgttcctcggggtagagtaagggtaggcagccccgtggactggttcaaggccaggctgtcaagctcacgactcgtcagtaccacctcagcatctcgacgactaatcagtggtaatccaaacagattgtggtaggcgctgggtcggggaatagtggtttcctcgtagctcactccatccccctggcatttagcctctaggagcttcaggcctcgtaatcctgaacccccaggggagaaccaagggaagacaagactgcgagcaggtcgcagatatcgcacactgaaacgcttgagtgtgtcatctgtaaccttggtaaggccaaacattgtatcagccagctgaacctcctcctgatcaggcctcgtgccgaattcgccacccaggcctcgctacctt

SEQ ID NO: 322403 - DNA, 994 bp, Homo Sapiens
  misc_feature (24)..(24): n is a, c, g, or t
  misc_feature (254)..(254): n is a, c, g, or t
  misc_feature (538)..(538): n is a, c, g, or t
gtcaaatttggtcccaggtgattntttccaggccgcccccttgggcaaaatctggttcagccatgaccccgggttagttctccacattgcggattctggaaagttaacccccacagtgggtttcaccccctgggggaccacaaattcccaggggcattcctcactgatgaaaatgtggtctttcccactgccttgttgggccctgtggaggccgttcagttcggcccttttcgatgtcccctcaaagattcganttgagggtctggaaagcggctccagcgggaggccagctgcttgctcccacatttgacagttctcctagcacctcctccccgaagctgccggaaagatacgatggacttgtgccaggcaggcagggcggtacgaagaatacgagaaagattgaagcctccgttcagggcctccaggggacggggttgctggtctcctggtcgcaccaagaagcatcgtttggggttcagttttcgtgcaaacaacttggcggcttcccaggaccgaaggtcatcccccaaccagnaatacaatccgccggaactgttccaggtaagggagtaaggcagggggtaagcaggtcgttcctcggggtagagtaagggtaggcagccccgtggactggttcaaggccaggctgtcaagctcacgactcgtcagtaccacctcagcatctcgacgactaatcagtggtaatccaaacagattgtggtaggcgctgggtcggggaatagtggtttcctcgtagctcactccatccccctggcatttagcctctaggagcttcaggcctcgtaatcctgaacccccaggggagaaccaagggaagacaagactgcgagcaggtcgcagatatcgcacactgaaacgcttgagtgtgtcatctgtaaccttggtaaggccaaaccattgtatcagccaagctgaacctcctcctgatcaggcctcgtgccgaattcgccacccaggcctcgctccttag

SEQ ID NO: 322404 - DNA, 764 bp, Homo Sapiens
  misc_feature (158)..(158): n is a, c, g, or t
  misc_feature (160)..(160): n is a, c, g, or t
  misc_feature (426)..(441): n is a, c, g, or t
ttttgggtattgactttttattattagtcactgttcataatttgtttcaaccaaaagacagtacacacagcagaattctaatgcatcccatgtaaatgtttacatccattttattcctcactcgcctctaagacttatcatttaactttaaatttttntntttacatctcaaaaatatgtctgcaataattagagcttcattagctgtcccacttggaaacagctttttaatatttttacagtaaagaagatgtgatggggcataatgaaaatgtaacttacaacactaagaaagaaaagggcctttataggaacacagtgggagttcataaaggaaagagttcagaagctctttcccatggggcccccaaatggaaaacaaaaacaaaacacacaaagcgcaaccgcaggttctttgagggaagnnnnnnnnnnnnnnnnccaactccaaggctccatcttgaagccagaatcagcctcttggaagtctgtaaagcaactgtgcaagctgcttcggcatttccttctgttaaagtgttccaggtcctggaaccctgtcgatgggacccactcactgatattgcttgaaaaagttattcacttccagttctacaagcagccccactctcccgagccaaagctggtcaaaagtgttttaaacttcaggactttctgtgcaattctctctccaatgatcctacccactcccaaagtcatgaatacacagacatgtaaaaccactctcccaactacaaagttcatga

SEQ ID NO: 322405 - DNA, 932 bp, Homo Sapiens
  misc_feature (44)..(117): n is a, c, g, or t
aaaaaaaatgggggttttttggcggggggcccccaaagatgttnnnnnnnnnnnnnnnnnnnnnnnnnnnnnnnnnnnnnnnnnnnnnnnnnnnnnnnnnnnnnnnnnnnnnnnnnntattttagggggtggccggtgggcttccattttcccggaattccaaaacctggatccccccaccggaattgaaaaaacttttccttccaatggaaaatttttcaaatccaaccaaacatgctttcaaaataaaaagttcaaaccagtgtttccaaccaacttgatttcaaaccaagtagattttagggtttagaaacactaaaaaaaggtgtttcatttataaatacggaaggaacaaaaacatcactgcatcaatccagaaattatcaaaatatttagaggacaagaaatataaaatttagtcaactttgctgttttctcagttccttaaaatcccagagaatctgcaaatatagctaaaaggtaccaactcttgaaagcctatattactagtcatttcccattgagtattttggaattttattattctatttattcatattctacttatttataatgtattctgctttatgatgtttatctgaataatctggacaaattctcattctgggcagtcattcatttcatcctatgaatgccatggtaagggaaacaccgtagttaagaggaacagatgaagtcggaacactcacatgcatcacagtcacagaactttaagtcacgagatggaaaagacattgattctgctttggatcaaagtttatagaacactacttaatggaaactagtggaaatggctgctaaaggaaaagttaaggtgaatgatccaagctgacttgatttactgaatccagaacaaaattatgctaaatctctctggtaattaactaaataaaaatgattttatactacta

SEQ ID NO: 322406 - DNA, 171 bp, Homo Sapiens
gaataaaagatggtgtcattttttcttttaaaccatgttaggacagtaaagttggtagggtgattaatttgcctattggtaatgaagatcagtatatcattaaaaaaacctaaagtttgaaggtaaacgaactatgtggttgtctttttattaataccaactttaagcagt

SEQ ID NO: 322407 - DNA, 143 bp, Homo Sapiens
  misc_feature (53)..(65): n is a, c, g, or t
gcagcggtgtaacaaattttaattcaaaatagacactctgaaaacaataggtnnnnnnnnnnnnntgttcaacaagctctctttgaatttacaacagagtacaccaacaatcataaaccagtttcacaactgcctcaaatatg

SEQ ID NO: 322408 - DNA, 1209 bp, Homo Sapiens
  misc_feature (992)..(1005): n is a, c, g, or t
tatgttgcaaaggctcttgggcattttaaacaaaatgaagtatatccattttgaaacctgtgtatttctttttcggggtttctgcatgcagtggcagtcttaagtgccaaaattcattataaccccaaaataaccccttgatgaaggcttgctgtcttttactgtgttacacagcatccttactggatatcttagttgcttgtttgggcagcacactaatattacttaaaacactgtgatatactggagttttagttagcggaagtcagttcaaggcattttaaggctgtcttgctatactgaattgtagctaacaatcctaattatatctagtaccatactgagttattggtatgaccctgtggaaacacacattattttatgtaaatataggctaaagacttaatgtcctttagcttgtgtatataattgtgttgtatagtctcagagtacattctaaccctacatttctaatcattgttattggtaatcttttctgtgaatattaggtttcctccagaaatagtccgttatttgggaaagttaactgtgtgcacttttagatattaactacatttacaggcaaatcactgtaatgagaatggtactggaaaaatactgaatagacttgctaaatggcacatgcactacaagaggaaccttttgggttatttaatatgtacagaaaacattagaaaaaatttattacagaattctaattccagtatgaatagtggaaacccatctgtaaattagatggatgttggatggaaaatgacattgctaaatttgagaatttctttttacctactaatgtagattgctttgtataataaaacacagggtttggaaggttttgttacagggagcatggtctgttgaagatttttaaaatgtatttttctagattaacttctgtacatgaaatgtctaataaaactctaagaggtttagagatttttccattggaaatgtgcattttggtttctaannnnnnnnnnnnnncatttactggcatactgttatacctcattttttaaaatcaactgaatccaatattttccggtggcaaataacactttccctcatttcatacccttttctcctctcttccatgccaaacatttcctccaccccacaacgttacacttttttatttcctcccatcaaatattttgaaaagcgaagtgaatttgtggacccagggaa

SEQ ID NO: 322409 - DNA, 816 bp, Homo Sapiens
  misc_feature (203)..(203): n is a, c, g, or t
attatcttggaaaagccaaaggccccagaggggagggaagggcttgctttgacctgttcccccaattaagttttgggggaattggaaacttttaatcaacccaaaggtgggtaggggcccatttgccaggcaaggagaaagccaaaaggcttcccttggggatttgccggctgccttttgcactggcgaaagggagggggcancgggttatgttgtttccattcgacagtccttccaaaggcttccctcccagcgccactaccaaatccagaaaagcgtcctcctccagaaggtaccaccaaccctttaaaccctttaaaggctcctccagtgtcagattcaaatccaacatttctgcgctttgctttctttatggctctattcttcaagacttcctcactggccatggagaatgttcccacctcttcagcttcatcttcttgatcccaattcctatctgtcagttccttctcggcatttcttttggccatgttttcgaacctcctcggcggccgccgctgcactcgctgggtcttggttgcggcgaaacccggggcgcagcggcgcaggggtctggagcccgcaggggtcgccgggctgagcgcgctcggccgcttccggtgctgcgctgcggaactcagaggacttagtgctcggcaagcccagagactcaaacaccatgtccctgggggggctcctcacgctgtgttcggcagggaggcgagagcgccggttcagccagagacagctgggggaaccgcgccgaacacgctccgggcggccattttgtaactcgaatctacccccaaaaacccc

SEQ ID NO: 322410 - DNA, 1400 bp, Homo Sapiens
  misc_feature (108)..(108): n is a, c, g, or t
tgccccaaattaacaagcccccccattcaaggggtaacaatgcaggccggagagcttcggttcccaggaagggtgtttgtaaaacttcgtccctgggggtgggtccanctgcaggatggccctgtccttggttttctccattaacccaaacccccccattttttggtattgatgcagggggccctttaaaaaacccgctttatgtttcccacagacccccccaggaggggagggtccaggccccagtttttctttttgtatcatcttagaatgatggggaaatttccgccaaaactacatgattgcacgtatcagggtgggtattagactagtgggctgggggtgggtggggaagaccttttgtgcgaggcattcctctgggccattcttgacaagagttttctccttccttctggaagtttctggcactggaggtggaagtccagactgcacatgcctggcatagcatgcagagcctgcctaggctgcgggtgggtgagcacgtgtgggaggaccctcggctctggccaccgaatgccctatgctggcttgtcagccgggaccccgcccctcccgctcccacgttaggagaacagcagttcacagatcctgcgcgtgtcctcaggcgctgtcacggagtagccccatggttctggggtctgtgaagatctcatggtcattgccacctggcatagttttgtctccaaagaaataaatggtcttataaccgtcattttccacatgtcgcagacagtatctcttgtcccatccatcaggaaagacatcaaagctgatctggcctcctatggaaaacgtgaggccttttccagcaaactctttccgtagatctgctacaaacttttgtcttatattttcttttttatcgagttcgtagaactcaatgcgttcttcttggctgcagcttcttccaataggggacacgtttaacatcccatttcggaattcaatgaaagtacccctcttcttcgggagtttaattttcgcaatgtagctcagacagtagttgattaaatcttggattagggcctcacccagatgactttgaatattctgtctacacaagagtttcccatctttgtatgctaccaagccattttctggaaacacataatcgtatttttcaaccacatcatttcccagttgctcctgcactttctcaaagtccgatccgcctaccactccgattttgatcttctgcctcaatttttgtaggaagtcatccatttctttggtaattttctgccgcggggcggtgagggtcccatccacgtcgaagaggcagagcgctgggccaggcgctgccatgtccccagtttctagccgcaccttacaagacacgtggcacgaggaaccctcgtgccgaattcgccacccaggcc

SEQ ID NO: 322411 - DNA, 1433 bp, Homo Sapiens
aaaaggggaatgtgggtgcctgaatttgtaacattgaattccaggggaagtaaattggggaagaaaggaaaaaaggtggggtggaaatgcctggcctccggccctgcccagtccactgggtggccagcagggcgctcagaggttgctgaagagttcgtttttcttgctccagtccatctgcggggcccgtttgctgctgcgtttctggtgggccctctctttgccatggccagggagatgttgaagtctaggatggggtcggaggaggaggtagacgagggcgctgtggagtcctgttttggggggctgtcttgggaattcagctcctcgctggtgtcactggaggcggatctcaccagggctggcctggggctctccaaggctgcctctgccagggcttcacgactgttctccttctgtatctccccattggtgaagggcacaggcaggggaccattcaggtgctcctgagatgggatcactctgcatttcttgaagaactcgtcagtttccctgtccaccaccagcagcttggtctcgtccccgccagccctgatggcggacaccacgtccccatgctgcttcccctccatgcagaccccgttcacctccacaatgcgatcctgggcccggagccctgaagcctcagccggggagtctgggtccactgaccggatgaactggcctggcttggacttgtcgctgtgcaggttgaagccatagccactggggcccttcttcatggtacagagccgaggccgaagctcgcgctgctccgggtggctcttgtcggccttcgccgaggctcatttttcgttgccagccccctgcacctcggcggcggccggcggctcggcctgccccggcgcttcctgggcgcgcagcagctcctctcggacctggacgccgagcttctgcagctgctcgtccgtctcggggtcgaccaccagcaggcgcacggcgttgagtgcggcgcggatgcggctcaccacctgctggtgggtctccttctccacgttttcgccgttcacctccaccagccggtcccccgccagcagccccgccttctcggccggcgagccgggctccaccagccggatgtactggcccaacttgcccttctccccgtgcaggtggaagccgtagccgttcggacccttctccaggcagcagagccggggcaggggcgccccggccgctgcgtccgcgctcatctcgccctgcgacgggtcagcggcgcgacttggggttccgatggggacgggacgggacggcccagcccttcttcccgtccagcgaaccgggagcgcagcagagaagccctgagccgccggacgggccaagcaagcaggtgtcccaggaaccgtcggccgccgcgagccgcgaggagccgagagaggaccacagaccaatccccgccccgcgcggcgtct

SEQ ID NO: 322412 - DNA, 923 bp, Homo Sapiens
ttgccaattttaggattactgtggtggacgggttcaattgccaacagttcaattggcccttataagtgtgtggaaaatctttgccaacttctgtttttttgcggatcctccatatacgcctagaaatcggggatcaacagcaaactctggatgaacctgtaaccacatctgcagttcagtcccggacgagggggcatcctcacccaccagcaaagtaccatccaccttattgatgacaagggatccgggtctccaggtccacatcaaaggtgattaggctcttccatgcactccacctccagctctactagcttctttctgttccccttcttcgttatgaaacagtggatgtccatctcccattactccattcgccatcaacttgtgcttctggaatgttaacgttcaatccttcctcatctttgatttgaactgtaaactccttttcatccatgcctcggcgaagtttggtgaactgggctgccgctgtgctgactgcagatgcttcctcctctgccatggaagctgcactactacttcgtggtgtggggactggagagtcaccatattctccaggagtcaatgagggactgtctagcaagtggttgcctggccccaaaattcctcctgttaccatttcctggctcctacggctagaaggccacttccctgagagtacagcctggcagacgaggtcaatacggtttatcaggacacgatcccttgggccactcagaggctctttgtctttcctgcagtagcagaagctcaggggtcatttgttctccatcttcatttgggaatccatcttgggacatagtgagggacaggagactctcttcatcatagagctttgagcgggactggtcagttagcttctcttccttctcatcctcactctcatcagtgctggagctggagct

SEQ ID NO: 322413 - DNA, 577 bp, Homo Sapiens
  misc_feature (32)..(32): n is a, c, g, or t
  misc_feature (39)..(39): n is a, c, g, or t
  misc_feature (64)..(64): n is a, c, g, or t
  misc_feature (79)..(79): n is a, c, g, or t
  misc_feature (83)..(83): n is a, c, g, or t
aacccagggttccaactcgctttaaagctggnccctggncgctccattttgtgttcccaggaancatgtggttctgtgncggnagccccacgcaggccctgaggatgttctcgaatgcagctgcgctggcggaaaagcgcattgaccaccgggctgccgggcggcactagtggcgccttgaagaggaagctgagcagggacagcacggggtggaaggtctgcggctcggggtccatgtcagtgcagaaactcacgcgctggcacagctcggtcagcagcgctaggtccagcatgatgggtgcggccagcagcgagtcctcacacgtgttgtgcagcaccagtgtgttggttccgcccagcatcagctccgaggtatactcatccagcgcgcgcttgctgtcacccacgtacggcacatacttgatgaccacgcagtggtcaggctcttcgccgggcgtatagagcactgggttgctctgcaccatgtcgtccaccacgttgctcttggacgcctccttagagcggaactgcaatggcgccgataggttctccccatcgttgttgcccaggtggttgt

SEQ ID NO: 322414 - DNA, 1438 bp, Homo Sapiens
  misc_feature (915)..(915): n is a, c, g, or t
gaatatgttaagaattcttatcactagaatactgctttgaggcgctcacagtactttccaaaagaaactacccacctcaaagagccctgcacagcccaagcgacccatgagtgtggtagccgtcattttattagccactgttggcaatcatcaaagtattcactcagagtggggaaattacttaatatcagcgatattaacgatttccatgtatttagctttgtgacacacaatgcacaagggtcttcaaatgtttgttttttacaccagtggtagaaaattgtcattcttcggattcaacacactggtggatgacactttagtgaagtgtgactacctagaagagcaggaaggcagctcctgattctgactgggccagcctcttccagaaggtgactcttctgtcaggagatcacgaccctggcaggccgggcaagcgctctgccctttaagccactgcttaaagcaccctttgtgatacttgtgcccacatttgagcacacgcacgttttttgatttgaacacctcgtggcatatttcacaggaactttcacccagtgcaatcctcacagggacatcttctgctttctgccccttggttttgggtgatggtgcaacaaccaccgagggtgagccctgggaggacctggtcacgggggtggcagagctgggctcataagtcctcttgtcctttcctgggtttggctttttctttttctgttcatctagaatgtgttctgtcactctttggacaatttcatcaatactcaatcctgagagtgagttcttgtttttgcttcgcacttttttaataaaaccagcaagctcagtgctgttgtaacatgggaataccactgacaggtgctcaataatactattgaacggcttttttggagactggcttgaactgcgcanacggtcctgggaggaacaggctgcttccgatcagccacagggctttcgttctgacagagctgcctgggccagcccgttttggccctgtcagctgagtggcttcaggctgaccagggggttggccctgggcaacagcgcagaaggagcctcccctggggaaatcaccagcagagaacacactaggatccctgtgaagtgctgcgtggtttccagtcacgtcgcttgcagaagtcacaagcccttggccatcgtggcctgaagactcagggagtaaactcgggatgaaccgtgttacaggcaggaaatgaaagctcagaaatctgcactttagaaagttcactgagccagagaaccatttttaattgccttaatttgttcttcaaactgagactttgctttctcaatttcttttgtaacattagaaagaaacaattcccatgaacgtatatcagactccatgtcaggatatgctgcaggatcacggctaatcagccccagcttcttcagaaaggcttctgctttg

SEQ ID NO: 322415 - DNA, 619 bp, Homo Sapiens
aatgctcaaaattgttctttaaaagtggcaggtttcttaaaatggtaattatgtccaaatgaactaagagtcattagtgtaggaaattttcttccacaataatgtttttaggttatttagtatcaaagaatgttccatttccatttgatttgctgtgactttgagagcaatacaagaataaagctgcttttctaattcttcacgaatttcacttggagcaccacgcagtaggtagtctttgagtaactgacaagcttttgccaagtttggttgtatcacttctgaagtacacttcattgtactctgatcacagctagttctacaatctgtgccatagacacagtccaaatcagactcacagtgacgatccttaataagttctttcaggtttgtctctggcacaatttttctcatatccaccattttcaaatcatacttatcattatatcctaggtttttggcactagtatcgcacatgaggaaatttccgtaggggccatggaaaacatcttccacgaattctagaagtcctatggctattttgcctttccggacgcgtgggtcgacgatatcccggggcattccggaccgtaccagccgctttttagcagtttctatc

SEQ ID NO: 322416 - DNA, 538 bp, Homo Sapiens
taggtagcgaggcctgggtggcgaattcggcacgaggaaggcgtcggttggcgcgcaacgggttctaggctgcaggcagctcgaggacccgcggccccgccccggctcggcctggcagatagcagaggcagcaggccgtgccgggggggcatgttgctgtaaccagtggcccaggggatgttacggtggacagtgcacctggagggcgggccccgcagggtgaaccatgctgcagtggctgtcgggcatcgggtatactccttcgggggttactgctctggtgaagactatgagacactgcgtcagatagatgtgcacattttcaatgcagtgtccttgcgttggacaaagctgcccccggtgaagtctgccatccgtgggcaagctcctgtggtaccctacatgcgctatggacactcaaccgtgctcatcgacgacacagtcctcctttggggcgggcggaatgacaccgaaagggcctgcaatgtgctctatgcctttgacgtcaatacgcacaagtggttcacaccccgagtgt

SEQ ID NO: 322417 - DNA, 1272 bp, Homo Sapiens
ttttacctttccagatgctttagacattttctcttatctttactctctttatggatctgtcatcctctctaaagtattagctatgcgtcccagctaaggcattgctaaggattgggaacggctaaagctgtctgctccaaagcatcttaaaatagatgcatctcctgccttgagatattcattcgaacccggatttcaccaaaggagggtccttatgtacttgcttacacgaagcaaatttataggaaaacaggggaaacgtcttgattaaaaataaacacaaaacactggtaaccgctccgcctttcctgggtggcgctggtgtgcggctctctccacacgcgtctctctgtacagcacatacatgtttacaccacacacctgcgtggacgagcaccagatcacgcaccccagctccacgacagggacaccagccgactacccacaggctgcacattccggcaggccctcctgggtgccccacggggaggggctcggggtcatctccagcactgccaccaggccgccagcccagaattcttgggaaacaccgtgctcggaaaaccgaaggtcagggctgtccttcccagaggccgtgtgcttccagggtgcggagggccggcggctgacacaggccccagggtggaaggtcctggcaggccagcttccaagcatgcccgacgcagcctaggggagcccggctctgtggcatcttcactcctgagcctcaggagccccatctgaacggcaaagccgggaggtgaccagctgaggagcgtgcctgaaggtgccggggtgccctgggtccccaggaagcagccactgggaagtgggtggcctgcggggaagccgcttcatccagccgggccaaggcggggacaggcacaggtggctaatgagctgatgttagtgctatctttagaaaattaaagattgtcccaccaaaataataataattacaaaaaatcaccttaattgaactggattggtaatactactacaggtctggttaaatagaaattctacctctctactcagtgatgagccgcactccccacacatcaccttttcaaaccaacagcactgtacaactacaaggccgatgagaaagggacgggaaggctgcgggaagtgcccgggacacgtagagcggtgggtaaggctgctgtggccagggaggccaggttctgctttcaggggttggcggccggggggcttcagtgctttacagccagccagccagccagcgccggaaacgacaaagttcccaag

SEQ ID NO: 322418 - DNA, 440 bp, Homo Sapiens
tcctttccagatgctttagacattttctcttatctttactctctttatggatctgtcatcctctctaaagtattagctatgcgtcccagctaaggcattgctaaggattgggaacggctaaagctgtctgctccaaagcatcttaaaatagatgcatctcctgccttgagatattcattcgaacccggatttcaccaaaggagggtccttatgtacttgcttacacgaaggcaaatttataggaaaacaggggaaacgtcttgattaaaaataaacacaaaacactgggtaaccgctccgcctttcctggggtggcgctgggtgtgcgggctctttccacacggggtctctctgtacaggcacattacatgtttacaccacacacctgcgtgggacggggcaccaggttcacggaccccaggttccacggacagggggca

SEQ ID NO: 322419 - DNA, 1180 bp, Homo Sapiens
  misc_feature (79)..(79): n is a, c, g, or t
cgtccatgtagttttgtgtttaaccatttataaaatgtgttcttatgagtctgaaatctttatcagttcaaatcatccntgatttcccatctacaaccttctaggtctttcttcctgctcttccgctttccactagttcccaatctttgatttccaggttttggccctttcaaacccatttttttgcgtttctgaaatcaagattagcttgagaaatctccttcattggtgttcatcacaaaatggaccatgttggataactggttctcttaatggctccccagcaattaagacaaaagtggcttctcttgggatccttgtttctccacttggacactgtcaccttctccaagcactgctgtgtgatgaggttctattttttgttgtgcatcatcgggcccaatatacacatctccagatattcgtgtaaatgaagcttgtccaccctttagggataggttgggaatgtttggctcctgggtccaatttgaagtccaaatataaggttggtgtgcgagtgtaaaccttggactttattcccagggcttctccagaaatgacagcaactgtcacaccatccttactgggtttagggatttcttcacttttcagttcctggtactgaggctccaccatcttctctgagctcctcaaattaacccacagttgtaggccatgggctggctcctctgagcaaggcatctcagcgtgcagaatgccccggcccgcagtcatccactgcaaatctcctgggttcattttaccagtgtgtccacagaagtcttcatgggccatgctgcccccttccaggaggtaggatactgtttcaaaacctcgatgtggatgatcaggaaatcctcctggtctacctcctttaaattcatcaaacagtaaaaacggatccagattttttaactcgggtctgccaatgcttctccggaccctcgctccaaccccttccgactgctcccggctgagcactgagagagtaactttcttggaggaccccatatcggagtctaaaaagagagtgttctgatgctgagctgtagaggatggaggggctgcggtagcggcacctggagccttagcggcgggggtgacgcgaagagccgccgggagcgagtgcagggagggcaggttaagagagtgtgggtccagtcgcctcaccgtgactccc

SEQ ID NO: 322420 - DNA, 542 bp, Homo Sapiens
taaaattttaaagaaacaatgattaggtttatttgcatgtgccaggaaatatcctacatttattgttacaaaaaccatgttatcacgttagtgtgcaattctttagaagcaccggctaaataagctttagaaatggaatgccttcaatggctcaatctcagaaatggcaaaattctaggacacatcaagacctgctcttccgctttccactagttcccaatctttgatttccaggttttggccctttcaaacccattttttgcgtttctgaaatcaagaatagcttgagaaatctcttcattggtgttcatcacaaatggaccatgttggataactggttctcttaatggctccccagcaattaagacaaagtggcttctcttgggatccttgttctccacctggacactgtcaccttctccaagcactgctgtgtgatgaggttctattttttgttgtgcatcatcgggcccaatatacacatctccagatatcgtgtaaatgaaggttgtccaccctttagggataggttgggaatgttt

SEQ ID NO: 322421 - DNA, 517 bp, Homo Sapiens
atttccgcttccagtgacggccgcgcgcgagcgcagcggtgggaggcggcgaccagccggttgaggccccaggcttggcctcaccacaatgtggcacgaggctcggaagcatgagcggaagcttcgaggcatgatggtcgactacaagaagagggcggagcggagacgggagtattatgaaaagatcaagaaggacccagcccagttcctgcaggtacatggccgagcttgcaaggtgcacctggattctgcagtcgccctggccgctgagagccctgttaatatgatgccctggcagggggacaccaacaacatgattgaccgattcgatgtccgtgcccacctggaccacatccccgactacaccccccctctgctcaccaccatctccccagaacaggagtcggacgaacggaagtgtaactacgagcgctacagaggcctggtgcagaacgactttgccggcatctcaaaggagcagtgcctgtaccagatctacattgatgagttgtacgga

SEQ ID NO: 322422 - DNA, 1027 bp, Homo Sapiens
  misc_feature (317)..(317): n is a, c, g, or t
gctctttttctgcttcctgcagttgcttcaacatattgttcacctcattatccagatctgtaacttctgcaaaagttctttcagcttctgccttggtgctggtggcattcttttggacagcgctcgcgatcctctccgcctcatgggccttgttcttggcctctgtggcatccgccgcagcactgcccagggcctgctgggcttctctggtcttttcattggcttcagtgatggtctggttgatggcaggaatcttccttagtgcctcctctgcggccgtcttgttatcgttcacacgcctatcaaaatctttcagngttgttgagaatgtcattagcttcttgtaaggtatcccgtcccttctttgcagcttcttcagcgagggccttggcagcatcagctcgggctaggagttggtctgcggtctgctgttcagtcttgcctttctccagaaggttcttgacttcaagttccttccctctcatatcttctctgaggtcctcataatcttttaatttctggtcaatcggttgttccagattctcagcttccatctttatgttatttgcttcattctccagtgtctcagagtccaaagggctcagctgagccacgctggcatagatctccacagctttgtcaccggcccttttggcctcctcatgtactcgggcagcttgtttttccagatcctgtgagatgttcttcgcttgttcatacttcctattaagctcttcaatctcaaatgctgtttgattttctcctgccagtgtcctcagaagcaggttgtatgcctcagttgacgtatcattggctgtctttgccactcgaacaatgtcatcagcttcctgtttatgacgttcagcaagctttcgagcctcttctgccaaaagagtcatgttgtttgggtcccctgtagattctggctgagtgactgacacattggcagcagcgacttttgctttctcaagttctctggatgcgatttcaatcaaccgctctgtgttctctacatgggcacgcgctt

SEQ ID NO: 322423 - DNA, 603 bp, Homo Sapiens
  misc_feature (173)..(222): n is a, c, g, or t
ggatggttacttgttcttgtacaagctactaattagactatagtaggatattttaaagagctgaatcacttttggtattttggtataaatattttcatttgttatgtcccagtatattcttactggaaaattcttgttttgatctgcctgaagaaaatatctgttttctatannnnnnnnnnnnnnnnnnnnnnnnnnnnnnnnnnnnnnnnnnnnnnnnnnataaaatcacaaaggaatgtaccttctgaatgttgttgacattttatgaaattatgtggattcatattactgttacaagatagaattgaatgcaaaaagaccaaaacctcaataaaatttgaggaaaacgtgttattatgtaattgaaataaaaacattttataattgtgcaagcctgtggttccactctttgggctgcttgaagtctgagtctgactactgttgtatgtaataccacctttgagtaatatctgcttgggggttgctgattcctattggggttccgtggaagacccacgcctgatgccctccctcagtaaggaatgcacttccctcctggcatcgagcctggggctagcatgggcattactgggagaactg

SEQ ID NO: 322424 - DNA, 1478 bp, Homo Sapiens
  misc_feature (240)..(240): n is a, c, g, or t
ataaatcagcaagtatttattttaaataataaaactacagttttataccatacatatttacaaaaatgctttgctatagaaaaatagaatcaatcactgaatccagaccaccacagtggagaacctcctggtgaagctgtgttttttcccacactggaaacacagagtagccctgtttctgcacacgttagtgcaccgctgctacgtgtggccgcccagctgtctgcaggctgtgccganccactgcctctgtctccagggaagcagaggcagaagtgatccttgctgaggagggccatcgagtctccgcttaaatgccagcacagagagagcactgcaaagtcgccttccccggggacctgcaccgacatgcagcccgttggggaccacaggtagagcctgctgcctcccgtgcagatggccagccgcggctgctgcgggtcccactgaaacgcgcgcactggggacagctgctcgagcaccgcgaacagcctcagcttctgaatgtcccagacccagacggcattgggaatgttgtcgttccttgtcgccaggaagtagctgtcaggactaaatgccagcattcctatgccgattttcgggtttgctctgtcggtaacagttttcagtgtctgtaaggagactgggacagaggcgatctcatatttacttctctgagctcgggagaggggccggccccggccccggggcggcgggaaggagaggcagcccagtcccagctgtgggctcttctcggcctccttatacaccactatcttgggatcattaatggctgcaggatgcccaaactccgtgatcattttccaagtcacgtgattaaggatgcgcacctccaagcaggtgtcccacactgccagcacacagccgtttggggcccactcaatccctgtgagatcctgggtgtccgtatcaaaatgccgcaggagctgccaatcactgcagacgaagatgctcacgtaatctttgcagtcgcgccgttctgccagcgccatgtagcggccgtccctggtgaaggtgattccctgcagacaagctttcgggtatttgatgtaagacacggattttgtgcacaaggaccagacggttatccgcagatggaattccgtggtgttgagaatgtggcgcccgtccgggctccagcacgaggccaccagcccggctgagccctcgtctattttgcagtgccattcgggctgctctaaagaccagacctgcaccagccctcgcttgtacatggcgcacaggatgaagagcgagtctgccgaccactcgatgtgctggatctggtctaggcacgtgtacagctgaaggatctgaagggtgttcacatcccggaccactaaccggtactggacacaggaagccaggtacttgccgtccggggagaacttgcagagtaagctggagagcttgaatacctcggagaagttcatggccgccgcctgccgcgggcgcca

SEQ ID NO: 322425 - DNA, 1143 bp, Homo Sapiens
  misc_feature (823)..(823): n is a, c, g, or t
  misc_feature (980)..(980): n is a, c, g, or t
caccaaacaagtctgaacaattctttatgtgatttatttttaaagtagaccttttgaagagatctatgaatgggatataaagcaattttcagtgttacaggttttcttcttcttctcaaaactgtttgctgtaagtaactgcaatcagtacttactactttccatttgcttatgagtttcttgacaaatcaaggtgtagaaaaccagttattaagtgattttgtactttcctggtagttgtcactaaaataattttttgtggcatataaatatattttaataaaatgcaaaaattatcttcctgtctagtagaaaaaattacatgagtaaagtgaagcttctgtctttgttactgtaccaggtgacaacagctgagtgtccctccatggacagtcactattggccttttgagtgagacagttctttaggataaaaacctgtcatcccattgcaggattcatttagcctttctggcccttacccactgatgctagtcattgtgaccaccccacctcccccaaataaaagtgtgccaaactattcattgttgagaaccattcaattgtattcaccaaaattggaggatatattggaatgccctaccttaatataggtcacatagcattagagaaaattggtttggagagtattacagcaaagtgtgctgcaaggaggctactccagcacaatggcaggcactgcttcccaggcatatggacaattctgggaggtggccagggtcagtacctgataactagtaagtgtctcaatctcagcatacaaaatttagcagtgacctacaaaagaagttggaattttctanaatgtttgtattcaagaaaggaacaaatgaatttactaaatgttgtcagagtattttttgtttagataccccccagaaccgaacaaccctaaagatacttgggaaaaatatctatcagtcaacattctaaggactgttaaatgtgaaataacctagntaatttttggccttttggtactaagggggaacaagaaacggcggcctaacatataatggggcatttagtaactcctgttaaatgaaaggattctccaattttcaaattttccttttaccatcctaataagcccctaacttaaatcctgatgaatttacctctc

SEQ ID NO: 322426 - DNA, 1167 bp, Homo Sapiens
  misc_feature (292)..(292): n is a, c, g, or t
  misc_feature (326)..(326): n is a, c, g, or t
aggatggggcacatagctgacattattaaaaacacatccgaagaagtagggggccctgtggggtgtagaagacaaataaggcatcctgtgaaactacagacatcaggggccagagtccggtagcacctgagtaaggcaaatgcagatgataggcggtgagccgaccaggctcacaccaggaatgacgaggtctgtttgaattctccttcacttcgggcactaggctggctgtaaatcaccttccttactcgaaagtccctttcctttgttctgttcaaaaattggcctcggnctataggcaaaaccagatgccaaaaacccaaganttcccaggagaatcagggttaacaaggacggctgcccacgatgaccccccacattccgctcccacagcttccatgcgcacagcatttgaaagtccatgggtgtccccatacccaattccgtgcctcacagctgtattctccagtatcagaggctgacaggggatcaaagaccagctctcctgttgtgggattcaggacataggaagagttgctgaaggcacgggtgcttttgggattcgtaggcatcactatcccatctttgaaccaggtgtattcagaaggtggggaaccatcttgttctgagcatgtcagcactgcccggttcccaatggtggcagaggaggggatgttaactgtaggcttggatggaggcacaagcacgatgagcttgaccttgacctccccatagctgttgccgccttcctcagagaccatacaagtgtatgtcccagtgtcttcccgtgtcacggacttgaaggtgataccagttggcaagaaggtcacccggtcctcataggaagctgtgatcttgttattatagcaaacgagtctggtggtgtctccttggtcaaacttccactccacacggggagaagaaaagcccgagtaggcacaggacaacttcacaggattattctcaggaattctgacttcaggttcagaagagtgcactgtaacactgcccaatgccagggagcacaacaggatcgccaatatgaagaggcacaacagtttcctctcgacttgcgcctttgtccccatcgcgatcaggccactgacacaacagccgccgaaggactcctgggaacagacacagctccgcgactacagcgaggggact

SEQ ID NO: 322427 - DNA, 134 bp, Homo Sapiens
tttttcttgcgtaaatcacattctgtattcatacaaaaactttgtttttctctgacaaactgtacacatagaaacaaatttccaaatggacaggaacttaaatttgtggagatgccccatgtcttgtgagaccc

SEQ ID NO: 322428 - DNA, 635 bp, Homo Sapiens
  misc_feature (568)..(568): n is a, c, g, or t
  misc_feature (589)..(589): n is a, c, g, or t
  misc_feature (616)..(616): n is a, c, g, or t
tatacatcagacaagaccttttcttctttgagtcttaaagactcttaggataaggataagagaactctggcccaggtggcaggtggtaaagcccaagaactgcttctccttcaagtaacatgggctgaaaattcgaggtctgtaaccagttgagctgagttcctgggttgttagggcggctggcattggaaaccgactcctccctcctgcaggacattcctgggcccaggagagcctgtgggtggggctgggccacgtggggaactggcagcagtaccaacctttgggttctccgtgttctgtaccgaagctacctctccgtagctggagctcttgggcccagcagtcaggggtccaggctttggccgaggggagaaccttgccttttcctggccttgatttgcctcgcagtgaaatggggcagtggccgggagggagccagaactctgagtggcctcgaggctgagaagaggacagatgggagggaagcagggaggagagccgcagttcttcccagtggccctgggtcagcgtgagtgttgtcttcgtcctccctatgaggcacttnaaagagtcctagaaccacttngggcttttgaaagcaagaggggcaatnagccttcctcttttagggg

SEQ ID NO: 322429 - DNA, 922 bp, Homo Sapiens
ggatgaatgctgggggggcaaagtttttttcggccccctgccaatggtaacggtcacggaaagcaaaccaacttccaccaggattggaaaaactgctactcccatctgtggggctgctaggaccaaaaaatttcctcaaaaggcccatcccagggtactggggttaagttaccagggatcatatacacccaattgttatcttcgtcccttggaccttggaagaaatcactgtagtgtttaagcaaggaaaccagcaccatgttctcatcatacttgattaagaagtaaggaagagctgtgactccttctgtttgacaaagattatcatatgcacactctagtgcttcaatctgttttagtgaaaacctttgatccaaacccactggcccctgaatgagaggtaaactctctggaagacagagggcaggatagcaaaaccaatagtagaagtggtacttctttagatctgcaaatgtcaagaggaggaacttgttgaggagtacagggttttcaagagcagtgcctgattttatggattcccatatctcatttgctgcttgttccaaaaggagcttcttatctgcagtcttgaaagactcgagtgtgttggtgttatacagtgttccaatagctgggcagcaacgggctggggtgggagcactcatgtcaaaagcactgaactccaatgttaagcgagctggcagcccagcagagtcaccattgtagtaataacccttaatgtccttgggagcttcatccagccgatactcgttcagcttcttctgggtcaactcatgccaaaacccaacatccaaggcactactaaaaggggcaaactgcagtttagagagtccaggatcccccgtagctgccgccattatttcttgccgccgctcaacttccggcaaccacagctctctct

SEQ ID NO: 322430 - DNA, 733 bp, Homo Sapiens
ggaattcaggcgatttattgtaaacaggataaccctagcactccaccatactggctgtgtcacatgctccctctttcacatcaactggtcaaaaaagaagactttcttaagaagcctcaggtaactaataacttagttccacaaatctcatttactaagcactgcgtaaactgcagtatctggggtagtctgttattgctcatggactgcagcttggacccatctaaatgaatccattagtatgcctgagtgatcaacagcagctctagatccaacctggaaattggaaaatgctgacgcataccaaacaattgcaggttcatggaagactacatgagattgctctcagatctcttcatgtgtcattctcataaaaaagacacttaaatttcacccattttttaaaaaagagctaaaagttactcaatagcacataattttccacataaaaggtaggtggatttttatttactagtacagtggtggatcggaacactcaggcctaatttcagatctgtcttgtatatacttgcagtttaatgaaaagctgcatagtctacaaatacataaaaccagaaggaagtgatgatttcacacaccttctgatggataaagacaggcttcatataaggaggttcttgaaggtagggataaaaagatggttacagcaccacattgatctgacagtagaaatggagccccgcttttgaaagcagccccatagttgtgacta

SEQ ID NO: 322431 - DNA, 524 bp, Homo Sapiens
caaggctttttcttgtgcagtatgaaatccttcatatttcatatgaagtatgtgccttctggggcactgagctcaggaactccaaaaagaccctgtcactgagagcgcacacaagaccccactgtacaagttgggttcgctgcctgcctcctcccaggcccaaacaatctcgctctgagtgtcgctggccgcgcggagcaggggccggctttcttccgggacctaggggagctcctcttgcgccgctcactccgcgctcgccaaacgggtccaagcgactgccctggaacttgacattgaaggcggcgcccaccggagacgagctggtgctcacccttcgggccggatcccggcttcaaggctgccccgacccgccgcctgcgccgcagagccgctgctctggctccgaagccgcccggctttttggcgcacagcgtggtatcccgcagaagtcctttcctccaccgtgagaaccctgtcctgggcgcagcagcctttacctggagcgcgcgctctgcgtttcc

SEQ ID NO: 322432 - DNA, 872 bp, Homo Sapiens
  misc_feature (20)..(20): n is a, c, g, or t
  misc_feature (47)..(47): n is a, c, g, or t
  misc_feature (62)..(62): n is a, c, g, or t
  misc_feature (85)..(85): n is a, c, g, or t
  misc_feature (133)..(133): n is a, c, g, or t
  misc_feature (177)..(177): n is a, c, g, or t
  misc_feature (180)..(180): n is a, c, g, or t
  misc_feature (222)..(222): n is a, c, g, or t
actccctcgtgaagaataancctcgaaaaacccgtgttaccacttcnaccttccttcgcagnatgcctgaaattccgatcaatcnactgcagggagtccatatgggcattcagaattctgcagatctggtggnggtctccacatgctcctcatcgcatcctgcagataatgaagtcnacnctggtcgcgcgtagactcctctaaataagtcaacagaaattnctagttcctgctgctgtgacaggataaaatccaattcttgttccaatcttttctgatccagtttcactttgttcacttctccatgtaaaatacgaatcatctcaccattctcaatcaatgtatggtcccaagcattgacctgagtggcctggagaagaaagtacttctcttgatcttccagctcaaggttccactcatttataagaccctccagatgaccatatgtcatcacaggagttgctactacactaacagttgaagtataaggtacaaggttttcaaaccctcttgataacagttggttttggttcacagtaaagccactggtgattgtggtagtagtgttggtggtgaaagtggcggtggtagtcgttgaagttgtaaatgagagcccaatagcagcagtggaggtcaaagaatttgatattgaggtaaactgcatggtgcttgaactagtggtggtggcaacagcagctgctggagccaaaccttactggcaagtcgccgccgctcgctgtccggccctgaactatacgggcaggcctccgagactgctagacgccagaggggcgggtccggacctgctcgagccggaaagaatcggcctccttagtgggcaggttcccgcttaagtgaagctaaccgagacc

SEQ ID NO: 322433 - DNA, 715 bp, Homo Sapiens
taactgaaaaacttaaacaaggctggaaaaccctggtaaatgtttcctaagaactttaatttcctaaacatcttctttaaacctttaaggcatagcatgctcctttggccagctctccaaggagggctgttttcccatgtggctcccaagttccttgaactgctggctgcactgaagtggactgtctgtgtcttgagagggagctgcattttccattgacttatgttcccacaagtgatcctgaggcaagtcaaattgttctgcagaacattttctgtccctctcttctcctttttgactttctgagactgacagctcttttgaggaatccagggtcaaagctccatctctaatgggtgttaattcattttccagatggtcttctatagtgaaattaaactgaaaggtcatcctcttattaaatgcacacaatctttaaattcagattcttcaacttctggatagaatttgatgatacacacaaatctgcctcaattattcaattagttttgttgggcccaatttctctttagcagcttatacatggtaacaaatatttagagatatttccaaatgactttttagacgtctttggtcctctttccaagcagctctggggatgcttgcttcccgacgtgtcctgggatcgcgcttctgaaaaagctcacctcacaacgcctcctccggacctaaatcgcgcaccagtgagtcgagt

SEQ ID NO: 322434 - DNA, 801 bp, Homo Sapiens
ttttaattgttaaagtattcctgtttttctttttcctgggacaccttcacagttcagaacgttgtgtctcactgtcagtttttacatacagagatgaaccaacagcactggggccaattttcaatgactgatcaaatatggcgattgaaaataatacacccatcatctacaaagttgctcaagatgaaagtttcttacagtgctataaatgcaatatcaatttgaattgttgtccatacaaaagtatgaatttctattccattagtaatactgaatgattaatactttaacagcgataaaatttttagaacatttaaaaaatacagaggattccagttttacatcatacttctgacggattatcatactttctattttgtctgcaaaacttttacagagtacagtgcattgacatgataaaaccaaggcacaaaaatacagttacgataagtgtatataaaccctagcactttgtgccaattttggaaacagatcataaagtctgaaaaattaccacattctatttgattagtgaacaattaattgtgcagtaaatagactgttaaccaccattccattattaaatatatggctatcactatacaggttgtggataattcaaaaatagttttaaatattaaaacctgtaatatctaggtggtcaacgcagatattgagccttacgttatctaaataagtttccatttaatttgcaatccacatggcagttagcaatttttaaactatttccattacataaatggtggggtttattctaaatgttaaatcctttccccttcc

SEQ ID NO: 322435 - DNA, 703 bp, Homo Sapiens
  misc_feature (181)..(198): n is a, c, g, or t
tgttgtatgttgaataaaattttctataaaaattataattcagtgagttacgtggaagtggaggaagatttctactctccctggaaacaggcctgggaaaccttggcatttgtaacaaggtttcactgagatgtacttttccttctaattccgttttgcgggggcagggtctcttgtttcnnnnnnnnnnnnnnnnnnagcctctaactagtcacatttactcttaagaaatgaaaggttttccaggagagaactgtgtacaaataaggtgactggagatgtgacctgatgtgtcacgaggcccttcggggcggcaggcgctatcgtgggcgtggtccttgcaccgtcccatcggccttgccttccagctccgtggcacggtttcctggtctttgggccagtgtgtaccttggagtgacttcctttctcaacttccactgcagtgtctgtgccttctgctctgagagctgccttgtgacccgtgtgatagaaagcagggagtgagggtccccgcggacctggcccttccctccttcctcccccagaaagaggagttagagcaggggtgcgagagccgttcgctgtgggtttgtctttgaacaaacattaaggtgtcttgtttttgttctgggctgggggttggctgtagtcttaggtaactgaaagttcctactctcccttaaggtattaaatgactcttttt

SEQ ID NO: 322436 - DNA, 833 bp, Homo Sapiens; identical to SEQ ID NO: 64926
  misc_feature (49)..(49): n is a, c, g, or t

SEQ ID NO: 322437 - DNA, 1405 bp, Homo Sapiens
ttttagcagtaatatcatttttaaaaaatcaacatacccattccagtaggtaccatgtataccatgtacatttcagaaagacaaccagataaaattactctcagaaagctgcaaagatggacatcatatatgctaagaatgtggtaatggccagagggagtacccaagagaccatattttattatgcttaaggctactactttccacaatacctctgcagttaagactcttaacttacaatcacagaaatgaaaacatgataatacactgctttatgcagccatccagatgctgggatatagtataatttcttatggcttaaaaaaatttaatttgcttttagagtctatattgctaaacttaactttccacaaaatacaatatatcatgaaagcaaagtattattttttaaaaggccccattatctgacaaaatagatggtgaacatgcactatcccaggatatctattattatccaaagaagtgtttctcaaagtgtggtccatggtactggtccatgaattggttgctaccagtcaatgaagagataaattacttgcatcagagtgtaaatcaatacattgctttagctattaataaaattttgctaaaaaatcaaatcctgtcattgacctaaaaagtatctctagatttaaattcttgtgcatgcttatcttgcctgtggataagtaacagtttgtagactggtgctttgagttgcattgatctagactactatgattgatgttgcagacatgaataaataacaaagaaaagtaagaaaatatgagcaaaaatatggacaagttatggaacgtgaaaagatactgagataaaagtatcaaaaagaacaacatcactgttctgaatgtgtaacaaatgtttaattctgtcctaggtataaaggaggatgcatattattctattgaacagtaaatactccttatatcctaattagaattttcttagttttggagaattgtaaaaacataagtaaagcaggaaacagaaaacaacttagagactaatatgtgatctagaaagcgttaaattgtttgtaccaggcttcctatctacgcaaatctttagaaaagacaagtagttctacacaggcaattacttttatactgtaatttgatgggtagaagcttaacattttgtaattagccctatctggaaactaaaacaaccttaacagaaaagaaaatgttggcataaagtacctgaaagataagatagatgtctttttgtccttaattttactagtgtttatttccacgctttttaattactttgcatacttctcctccaaataatgttccacctttaaagggagtggaagccagcttattcttagaagctaaattaattttgcaatccttcagccagaggtatcgacgacccc

SEQ ID NO: 322438 - DNA, 1351 bp, Homo Sapiens
  misc_feature (203)..(203): n is a, c, g, or t
  misc_feature (330)..(330): n is a, c, g, or t
  misc_feature (453)..(453): n is a, c, g, or t
gggggccccaggccagttggtgcaaggccaggcccagaatgtgcagccccaaaggtccctcccaaatagcccttggagcccctgcaggggcacgaggtaagaaaggggggcagatgcagcagaccctagctgtccacgtctgaggggcacagtctttttcctcgtcccgaaccttcagggagcgcgaggtgccctcccgcacncggtggcttcctcttgaccacacgcaggctctggctgcggattaggggcttctctcggggccgggctggcgcccgggggactgcctcagtatctgaccaacactcatcctcggtgtcgctgtcctgncaggcccccggcccggttacccaatgggtggcctccggtgggacacctggtcctccaggtagagggggtcatggtaggcaggggcaggtgcgtcagagatggagcgcaggtcctgcatggagnaagttccgcagtgccggccagcgccccctgactcttggtggcagcctgcacagcagcggaggcggcaatgttgaggccccgcttcccgaagctgagcacggtctcgtagctgcgctccttggcctgcacgatgtacgcgtcgatctctcttctcatggcgggacagggacgggtggacaaacttgcggtaaagcaggctggcgcccttggtgtagggtgagagcagccacagcacgaaggccatcttgatctcatagtagaaagggaaccaggagataaaaatgtctgtaacgatctctgctgccatgaagagtgcaaaaacaatccagtacatcatccaccgcacatattcacgaatgttcttggtcttcacagccttataggaagcataagctggacacagcatcccaaacaccagcaccaccaggcgacagatcatccaggacaccatcttgccggcctttgggacgtggggaggaccccaggaagccgctcagaaggacgttcactcaagggctgggacggggggtgatcagggcagttgcgggaagcagaggggcgatccggctgtccctcggcggaggcagagcccgccgcccacggcctccgactgtgcagttcaggggacctggagaatggggagacccgaggcaaagcggccccggcggggaggaagccgacttgggagcgggcgcgccccgcggccggggcagttacagctcccacccgccctttctgccgcggagaacctggcgctcggcccttgctgctggtcccgcgctggagcgggtcgccgcggttccagcgcgccgggccaccagcaccggcctacagggcggagttcgcaactcacttgaaagttgcacggaaccgagtgctgcccaaccccagggctccg

SEQ ID NO: 322439 - DNA, 588 bp, Homo Sapiens
tttttttctccggaggtcgcgcgcccgagagcccgcgctgtccgccgccgctgcctgagtcgactctgcgccgcccgccgcgatggaggccgccgcccagttcttcgtcgagagcccggacgtggtctacggccccgaggccatcgaggcgcaatacgagtaccggacgacgcgcgtcagccgcgagggtggcgttctcaaggtgcaccccacgtccacgcgcttcaccttccggaccgcccggcaggtgccccggctcggggtcatgcttgtcggctggggcgggaacaacggctccacactcaccgccgcggtgctggccaatcgactgcgtttgtcctggcccacgcgcagcggccgcaaggaggccaactactacggctcgctgactcaggcgggcaccgtgagcctgggcctggacgccgagggccaggaggtgttcgtacccttcagcgcggtgctgcccatggtggcgcccaacgacctcgtgttcgatggctgggacatctcgtcgctgaacctggccgaggcgatgcggcgcgcgaaggtgctggactgggggctgcaggagcaactgtggccgcacat

SEQ ID NO: 322440 - DNA, 793 bp, Homo Sapiens
  misc_feature (65)..(88): n is a, c, g, or t
  misc_feature (152)..(176): n is a, c, g, or t
  misc_feature (404)..(412): n is a, c, g, or t
ttttagctcatttgcctggccggcaagttttgcaaatagctcttccccacctcctcattttagtnnnnnnnnnnnnnnnnnnnnnnnncctgagaagtttgaattgtagttaaatgaccccaaactggcatttaacactgtttataaaaaannnnnnnnnnnnnnnnnnnnnnnnngtgaaaaaggtttcagagttgctaaagcttcagtttgtgacattaagtttatgaaattctaaaaaatgccttttttggagactatattatgctgaagaaggctgttcgtgaggaggagatgcgagcacccagaacgtcttttgaggctgggcgggtgtgattgtttactgcctactggatttttttctattaacattgaaaggtaaaatctgattatttagcatgagnnnnnnnnntccaactctgcttttggtcttgcttctataaatatatagtgtatacttggtgtagactttgcatatatacaaatttgtagtattttcttgttttgatgtctaatctgtatctataatgtaccctagtagtcgaacatacttttgattgtacaattgtacatttgtatacctgtaatgtaaatgtggagaagtttgaatcaacataaacacgttttttggtaagaaaagagaattagccagccctgtgcattcagtgtatattctcaccttttatggtcgtagcatatagtgttgtatattgtaaattgtaatttcaaccagaagtaaatttttttcttttgaaggaataaatgttctttatacagcctagttaatgtttaa

SEQ ID NO: 322441 - DNA, 982 bp, Homo Sapiens
gacttctgatgacctctagtgttttttgcatgctggtagtaagtagaaagtcttttgtttttcatctaaagcttttatgttcctgtaccaggcgagatgtattttgctggtccttttcatcctggtccagttctgcaactagttcttgctttctctgtaataacaatgcaatttctgtttgaactttcatatattcttgtgccattttacaatgctgttcaaacactgccatagattctttggagtttgggcacggtgctagaggctgtagttggtgatccagtgtaagataagccattgggatggagttatctgatccattggtatctgtggaatcatcaggggtccatggatgacttcgagttggcttttctgaggttggtcctggaggtagtaatcattctggacactggggactggatgacctactggctcacctgaccagggttctgttccagttacagtcaagtcttggatggatctacgtcttggctgtccgttgcctgtggttgcggcgatcctagcttctatttcagacatgtcagcactcatcctcttgccctcagaggttgggggcaagctctccacactgctcccacgggaggctcccaagcttaaacgtccagattcactctgttgctttgcctgatttttcaacaattttgattctaagcgcttaatagtatcatttgtggcaggaacttgctccatattagtgtcacttttgttactcgtatttgtagaagcaatgtccatgaatgagcctgtactggtggcagagttgctctgtccttcatctgaatactgacaaggatactgtaatggctcatctgctcctggaaagtaccgcatcaagtgagtcattattttcacaatttcctccattgaagggcgctgggaaggatctttagaccaacaacgagtcatcaggctctcaatgggcttaggtaaattttttatcagtggtggtcgagtaccatta

SEQ ID NO: 322442 - DNA, 766 bp, Homo Sapiens
ttataaaataggttaaacaactttaactttggtaggttaacaaagattccctttaaattatttttggcatggtgctgagggctccatcaaaaaacccggatgggagcgtttgcttatttccagctttcataacatgtagtgctggagtcttcaagtagatttccagttaaaatgtaggcttgttcatgtattcttccattgtctcctgtaacatatcagagtcttcaatggctttgacagcaattttcttggatgtttcctgaatttccccacctattataaactcgtccaggatgaaataagccttttcaaaattaaagataatatccagctcacagacatttccaaaatatttgtccagcagctccacgtaacgatgcacaatctctagcgtcaagagctcattgtcctgattttctattgcacagcaaaaatataaactagcataccttttataaacaagttttagctccttccagtcaacaaaactgcttgtcctgtgaccacgggagagaataatctgaacaatttcccgggtgatcttcttcctctctttatcagggagagtgatgtaccatttctgtagccgtaatttcccttgtcgactgaagagcaatatgaaatgtatcatcgtggctgggccgccgcctcccccgccttgcgagcaaggagcgctggagaagcgagggcgagaggcgagcgctggagccggtgcggctgacaggtgaggcgcccggcttagaccatggctgcttcccacaatccc

SEQ ID NO: 322443 - DNA, 1887 bp, Homo Sapiens
  misc_feature (99)..(109): n is a, c, g, or t
gatcgccccaggtaataagagtgaccctccacgggaggacgcgcccacccgctctggggaaaatgttgtttgtatcaaaaatcccttttctgtattatnnnnnnnnnnnggggggcgtttttcacataaagggggggggcgagaactccaccaccccccctttgttttcctgcgcccccgcgggtttcttcttttgggaaggacccacgtgtgtgggccccccgggtgtccccttttccctcacacgggggccccccgcgccgcccccaaaggaaaagggtttttttaaaaaaagtttttctccggggcggccctaggggcgggccgcccacacgaagaatgagtatcccgccggcctctcggcccgccctcacggctggccgagccccgcccggtctccctctagtcctttgcccccgcttatcccccctctgttttgcagtaatttaatttaataaaataaaattataagagcaaaaagttacatttctaaagtaccaaaacctgcaacaggcttcatggaacagagcctaggggatccaggagcataggaggttggtgttgctgggcagggctctgcatcccctttcctcagcacagcaccatcttcacccttcctgggaaagcagcattggagcctacaccacttgtgcttttctccccagggtaagaaatgcaggtatttgcagaggggagtgagtctggaaggtggcagagcacagctagggcaagacttaagggaactttgtgggaagagtaactgtggaacctacctatgctctcttgaccccaaactccccaaaacccctcactgaggactgtctacccccggggctcagaataaactgcttactggaagatgggtgacttaaggcaaaagggaaggctgcctcctgggctccccaatcccctgctgcagagctggtctgtgatactgagaaaacacctgcattttgccctttcagccagctccctcagaggttacagcagaaggggatggtgggagggtcctatttcacttcacccctcaggccctttccaccctcaaaccttctgcacaggagactcaacaggcacagccttctttccccgttgctttagacggccccgcgcgtagactctgagcaggagggcagcaaagaccacagccacccccagccctcccaccacagtgacagtgtggccatagagaaggcaggaaagaaggatggcaaaggcctggcggagggtcatgatgatggtgaagacggcagccccaaactgcccaatggtgtaaaagatgaagagctggccacatgcggagcagatggagagtagcagggcatgggcagcaaactcactgtgtcgccccatgaagcgggttccctccagtagggccccctgttctagcagtgagcccactgtgaagaggcaggagaagaaattgaccccaaacatcatctgcaccgatgacatcttataggcaaacagggcatcctgccagtttgaggtgaagctgtcaaaagcaatataacctgccagtaagatgaggcctgagagtgtggtggctggggagctgcggggctctggtccgctggatagcagaaacatgctgaccccaatggagatgagggtggctgtcaggtactcccagtgttcgtagctgcgccgagacacaagctttcccatcagcatgacagggatcaccttagaggccttggccagcacctgggtggggaagctgacgaacttaagagcttcgtattggcaccagctgctaagcacattggacaggctggcaaaggagtaccggtacatgggtgccccatgccggggctgcttgcagagaacacaggagaggccagccacaatcagtgccagcactcggttcattagcaccaggaaccc

SEQ ID NO: 322444 - DNA, 1915 bp, Homo Sapiens
  misc_feature (43)..(43): n is a, c, g, or t
  misc_feature (53)..(53): n is a, c, g, or t
  misc_feature (58)..(58): n is a, c, g, or t
  misc_feature (77)..(77): n is a, c, g, or t
  misc_feature (107)..(107): n is a, c, g, or t
  misc_feature (246)..(246): n is a, c, g, or t
  misc_feature (254)..(254): n is a, c, g, or t
  misc_feature (308)..(308): n is a, c, g, or t
  misc_feature (371)..(372): n is a, c, g, or t
  misc_feature (374)..(374): n is a, c, g, or t
  misc_feature (377)..(377): n is a, c, g, or t
  misc_feature (434)..(434): n is a, c, g, or t
  misc_feature (437)..(437): n is a, c, g, or t
  misc_feature (463)..(463): n is a, c, g, or t
  misc_feature (587)..(587): n is a, c, g, or t
  misc_feature (601)..(601): n is a, c, g, or t
  misc_feature (674)..(674): n is a, c, g, or t
  misc_feature (1023)..(1033): n is a, c, g, or t
cgcgtcgtagtccgcccaacgatgcgtcgcccgaccgccgganggcggtgtcncctgnaaccgccccccagcggcgnccccccaccaaatcaagaccacgctttctngggccgggacgggcggcgccccatctcctttttataggacggcgccgcgcggagtgcagcagcctccgtttgtctcccgtcatgacactccttggtcatactagcgttgcaacagccgactaaacgacggcctcgccangaagcgtngtagcgacaacgggcagatgatcagcgtctttcgtcggctcccacgctgctccncaggagccacgaccaccagacacatctgccgccagacattgtcctgccgccgagcttcgtttnntnttntacatgacaccacctccacggccggttcgagacaggtcgtgtcgtcgagcaacaacnacnatcgcgtcgtgataccagtgctgccncgcaccgagtagtcgtgaataacctcatccaaggggctgccggtcaatgatgccacgccgctcaccacgtcacggccacgcccccatacgtagaggccacgtcgatgcgagggaaaacacgacntcgtctcgtcacanagaagaagagcgcctcgacgaaacctatctgcaaacagcgggggtggccacataagccgccccagcgtatcantgacgggacgactcgtacctcgttgcgccaaccgagcggcggttgccctggtaaccgattaccatagcggcggggggcggcggcgtttttttcttgtgctccatcttccacccccgtgtctccgcgcggagagcgtgttcgtctcggaaggcttgaagagatctcctcgcgaggccctcctgtatacaaagcccgccgcatggcgtgtggaacagagcggtaaacacgccgcgaggccccactctgggagcgggcgtcttccgcattcgccaagggcgtcccccgggaccgcccgtttttcccgcgtcgggagaagccgtggggcctgaggtcattcttaccaaggtgnnnnnnnnnnnacccagccggagttttcctagttcaggcctaccaaggggcccttccacatggaagggaggaagggcactgggggccccttcctgattccttggggacgtgggtattcaggccagaggcgccaggtatttttcccaagccctcctctgacaggaactggacatcaatccactgccacccggggcttccaggttccactcgaagacccagagagattttagactttctgggaagtcttgctgtcccgctgtacacctttggggggtttttctccattgtaatgttttcccacggccaaagcagggtgtcggctgcagactgtgctgcaggggccggccaccaggctctccaggtgcgttttgctttttgaccttggcgaggtcggcctccatgccgcttgagtattccgaacgtaggatttcagcgaggctgtgtttactctgggtcttcttatgaaggtcaggccttttcacgtgtgctttcctcttctttctagtcaaggcactaagattcctgggggcatctcttagtccgaagctcttcgccacatgcccaaggtggagggatcggacgtggaagatgtgcttcagctccctggggtaggtggcgtaggcttggatgaaggactgcagagctttctttgcccaggagaccctcctctcactggagtgcacgtaatcttcaaataccgtctgcaagactgtggctcgctctcggatttcctgggggccaacagcatgggatttctgggctccccgtcgtttccctttaaaacaatcatctcttgtcagaacacacaaaatatcttccatcttaatctcagaaacgttgattttgtgagaagccaacgagttgacatattctgctgcgaaggagccaaaatg

SEQ ID NO: 322445 - DNA, 443 bp, Homo Sapiens
caccatcactgaacatcaggaggtagctggtcacccagtcagagctcccatatcctccttgggtggcgacagcagtgacctccattctctctccaaggtcaatttgcagccattggtatttatttgacacaagtggggtccagccaccagctccatctcttcgattaagccttgaaaaccctgggccgtggctgctggacagctctgaggagctgctgaaggatgacctaggcaaggcagaggccagtggggcatcacagtcaggtggatttcctgctcctacggggctccaagtctgagtggggagaagcagcagcaccttgaggacggcccaggccactgaagacatgctcacttcagccaggcgccctgagacccgggcacggcgacggccgctctgcgtcgttcctgctctcactcccgctctcactcccgtcccctgc

SEQ ID NO: 322446 - DNA, 1586 bp, Homo Sapiens
  misc_feature (915)..(927): n is a, c, g, or t
taggatatcacacgttgttaaaaagcaggcggtaccggccggaattcccgggatatcgtcgacccacgcgtcgggaaatttttagcattcagtcatataacatctggttatcaatgcacgtttacacaataaagacttgagtggaggaaagttaaaaagatgagcaatagagtagaaaatatatcttaaactagttgacctagattgtattaatagctacttaagatgtttcaaagataggaagctattgcttggacagagaacttgaaataagtggacccatgtataaaagctttgacttaaacattgatatttcagaatgtgttaaatagattaagacacagtaagttaaccctacatgttataaagatggcgactgttaacaaaggctgtaacagattaagtactattttatatccagaaagtcttctctatgtagagaagtcagagagactagatgctttcactagggaatgtcttcccacccagccatcacaaatgtggacaatcactgcatccacatctgtaggcatatttctatggaagtttaattgacagctatattcattatttattttacaatttcatttttctacacctttgagatttatgaatgcagtttttttcttaaaatttattttaacttgacagtatgtttttagttcccccaatttaattaatggaccatgtgcatatatatgggagtgtgcttacatgttaataatttacttgcatacttatgagaatttcacattggaattcataatggtaaaacttcatacatctgccaatatacgttttttctgttggtttaagagaagataactgacagctttacctacttcctacagatgcatctaaacccagatattactgagaagagtgtattgactctgagtgtaagagagtatgtgnnnnnnnnnnnnnagttctgctctagatcataattgtaaaaaatattaagtcataatctgttacactaaaatttgtcagccaaatgttagatgaaatgtctgcactgtagtctcagatcactgtcacgtatataaattgcttcttcattttaatttgtagaagtactttacagtaggaaacgccagtaaacaacttttatactgttaaaaggcttttttccccttcctaaatgttttaattgtaccatagtgttttgctcactgaagaagcttcttatggaccttgcaactttgttgctagcttgaggttgattattgtggttgtattgttcactgtgtgtagaaatagtatgagtacgatttcaatagactgttcagtttttaatattagccatagcactggttagtatatctcagtagtttcatgaaacgtttcctgtattctaatctattttgaaaccattgtatcaacgattaattgtgtcttacagtcaagttgtagattttcataagccacaatttagcgacgatgcagtaatctttccaaatttccaatatttatccatgtcgtgtggacccatagagtggcaatctttgaattcatactaagttgccataacgtaactatggtgctagacttcaaggcgtatgatacgggggacagcataggaa

SEQ ID NO: 322447 - DNA, 893 bp, Homo Sapiens
ttttgagttctgatttttattgtgactaatacatgaggtgcattattaaggtttgacaacatggtgactgcctataaagacgtctgcaaccagtgcctgcagccttcattccaaatgaacattcttgtgatggctccaatgttatagacaagcattaacagccaaaaagaaaaacagaaatctccttatggtgtgaaagtcctctcagctgcagctgcccggacgcccagaagagccctcccagctgcagagggtgatttcagtccatgtcgaccctcctgcttgtctttacagcagaatgaattctcttttgtctcagcctttcccgattcatgttttctatcctgattctatgaagtttaacatcttcttttgttggctccttcggtgtctggctggcctcagtgatcatgtctcgaattttctgcaggcaatctgccagattccggaactgatagcggctgctctcagaggtgaggatcaactctcctaacctgttgatcttgtttttatgcgtgatggctatcttctgccgcacgggctccgcgatccactcggcagttgccaaatggaacctgacttctgccttggaattcactttgttcacattctgccccccaggaccactactccgacaataagatattgtcaagcgatctagagggatgtcactgtcggcttgctttgcaccattcgggaccctccaggcggtgtccgagccctgagattcggggtagagcttgtccaggctgtagatgctcttgaactcagtgccgtctttctgcttgtgcagcgcccggcgtgggcaccgtgcgggcggtgggagcagccagactccggctcggctcaggccccagcgcaggcacctggtgggcgccatgctcaggtctccc

SEQ ID NO: 322448 - DNA, 1506 bp, Homo Sapiens
  misc_feature (549)..(561): n is a, c, g, or t
  misc_feature (839)..(878): n is a, c, g, or t
gagggaggatatgtacgggttagggaacctggctgctgctacttcacctaagagaagtgtgatgtgtgtaaggaaaagcacgatttattttctcctcagccaccgcagatagccgcgtagaatggagtagatacaccccggggcgttgcgttttacagtgaagaggcgatatatatggaggcaaattatttgttgtggtggcgctgaacattctaaataccggcgcgggacgggatgatatttctcattatctccgagttttaagaggttggtcggagagaaacaacagcggcgaggaattacaagtgtggctcgcacgggtcctttgttgccgtggggggcgaggggttatgtgttggggggcagaaaagcgggccttagagggaggcattatgctcccaccgctgtgtgcggaagtaggaagtgtgttctcacttcaaagggcgcggagtaatataatatgggatattccccgaatccccggactggagaggggcctgtgaatggaaagtgtcgcggcagagtaatttgcggctggtgacggccccnnnnnnnnnnnnntggtaaaagggaaaatccgatgttgtcgcttggagatccctattttgtattggggggcgagtagagggccccaaggggtggggctagggagtttcggtcgaaaaccgaatggattcccacccgggccgttttttatttggggaggggtccaggaccaaaaagtttgtacaagggttttctaagggagcaggtatgtctcaaggtagattgctttttttggtccgggtttccaaacggatggtttagaaatttttttggtggtgtgatgcgggtgtcannnnnnnnnnnnnnnnnnnnnnnnnnnnnnnnnnnnnnnncctatttagaaaattttattgaatatcatacttatcaaaagaaaaagttaattttccccaaaggcacccttcatttcacatgatctatactctaatgttcttttgtattaaaaatatggttaaatatggaattagtaaaatgcagcatataaaacttcatgctgagcaaaaacaagtccaaaacaactttaccatatatccatagaatagttcccacagtacatttcctatgtaaattatgtttgaatgcaatttttagaaccattttaagatacattttgcaatctgttaactgtaggcatccgcatttttcttccattacataatctgtttatctgattaagttggcaatatctgctaggatccacagaatgcaggaaaaaaagcagttatttctcaaggtttgagaaatctggtccacctttagtgtagtttcctgagatttctgctccactgaagtcaaaaccaggattttctttttggaatctctctaatgtaagctttctctgcatttggtcttgcacccaaggatccgctgcatattcagattctagtagagaagtccaacaatttgctgcatctctctttgtctttgtaagaacaatacgaaccatttttctgtcctcca

SEQ ID NO: 322449 - DNA, 759 bp, Homo Sapiens
tagcacagcacacttagggatctggggatttgggattgctggagtcaaagtgttgagtgtgagggggtagaaaagcataattatatgtagagtcagtgcctgaacagttcagtcagaaaagcacatttttcaggctaagaaacttggccttggtcctgcttaggttttacagacaagagattgcctttctgaaagcttaccctggagactgtgtagctagatgatgggctgagagaaaaggaggaaggtggatataagaaagctcctgcaaaaatgcaggtgaaaaatgatgaggacctccactggggacgggcaggagagggcagatttaagggatgtttggtgaaactttcaaggggaactgctgatggactggcaagaggaatcccagcaggatcaggtggctatgctctggacggtttgcataactgtcagtggcaccattcacttcacattgtagttataatctctgtgaacagtggcacctggagatgtgcagtacacagcctaggcaatccttacagagaaatcctgactccaaactcatctgtttctattacttttgagctttggagggatttaaagtttttctttctcttagggttttatttaagccattttcttttggaaaaatctcagctagcatcatagagtgcggtaggaaaggaatgtaattgggaaatgatattgtcttatttttctatataatttagccacctttacacttaagatggcagacatgggaattacatttttcta

SEQ ID NO: 322450 - DNA, 536 bp, Homo Sapiens
  misc_feature (214)..(214): n is a, c, g, or t
gaatgagtgcaggtttctattggtgtggactcagagcaatttacaagagctgttcatgcagccatccatttgtgcaaaatagggtaagaagattcaagaggatatttattacttcctcataccacatggcttttgatgattctggattctaaacaacccagaatggtcatttcaggcacaacgatactacattcgtgtgtgtctgcttttaaanattgggctgggctatcagaccctattctcggctcaggttttgagaagccatcagcaaatgtgtacgtgcatgctgtagctgcagcctggcatcccttggcctgcagcctactttgggggaaataaagtggccttacctgactgtagccattacagtatccaatgtcttttgacaggtgcctgtccttgaaaaacaaagtttctatttttatttttaattggtttagttcttaactgctggccaactcttacatccccagcaaatcatcgggccattggattttttccattatgttcatcacccttatatcatgtacctcaga

SEQ ID NO: 322451 - DNA, 1134 bp, Homo Sapiens
  misc_feature (95)..(118): n is a, c, g, or t
cattctatgttggatattaatgctttgtttgctgaggctaaacactatcatgccaagttggtgaatataagaaaagagatgctgatgcttcatgnnnnnnnnnnnnnnnnnnnnnnnngagcacttaaactgcagcagaagaggcaaaaagaagagttggaaagggagcagcaacgagagaaggagtttgaaagagaaaagcagttaactgccagaccagccaaaaggatgtgaaaagttgtgtttgtgtgttttcttctcctgtcccatatttgggttatgatgactcaagtgtagactgaagttgaggtagtgccttatgccattatgtcatatgttgaaatccttattccggtattactgtgtctccatgccttttttccaagtagcagacgtcatgttgcatggtttttgatatttatatgtaagtttttcaaattttgcttaattttaaaatttattattttgatcttgaattatttataaactggaaagtggtttgattattgtgagtcaaaactctaagtggttaaaaattagtatgaattttttagcttcttaatgaatatggatttaaaactctccagttcttattttatgaaatgacttgcctttctggtaatacaatgctgattttttagtaattgccttttcattactttgttaagaagaaatgccagctgtttaatcacacctacccctggaaaagaggtaaaccttttgaacagttgaatttcatcagaagctctatagctttttggtgagaggaagtgatactctttattacaagaaacaaggaattaacaaaaataaggaacttgttgctacctttcttttctgttgaacattaaaaataatttggttttgtggactgggcatggtggcttatggaaaagaggtgagcctttgtgaagaacataatggaaaagtgcatgtacgggaaataacagcactttaggtgtagttcaggtgagcaagatgccagatagtttctactaaccatatactctttctgcttcttagcgtcgtgtcactgcttctgtggctttgggtcaaagtagatatatatattcctaagctggtggacgtaggtggagctatcacacactcaatgagcttgttattattaataca

SEQ ID NO: 322452 - DNA, 798 bp, Homo Sapiens
  misc_feature (39)..(39): n is a, c, g, or t
  misc_feature (71)..(71): n is a, c, g, or t
  misc_feature (93)..(93): n is a, c, g, or t
ttctgattgatgggagaccgggcattggcaggagaggtnttaatagagaaacgtaggagtatttgaagganaggagggaggtcgtccaagcanagcttggggcacaagctgcggatgacggggaagaattggatggattgcacatttacccgtgggggctttggcaggagtactctggctactcagttactgttactaggccaggtcttgactcttttttcttctgagaggcccaacccaccgtggaaagtttatcacctcctggtttctcctctaagcctctattcaagcgccagatttttagtgtattgtcatcagaacaggtagcaatctttgtgaagtcagatggacaccagcacacagacgtgacctcttgagaatgacccaggagcacagtaggaggttgccagggtgtggagaccttccatatgtaggcagcttcatcacttgagccactgactaaaaactggtcatctggactaaggctggattttacataaaaggtagagttctggtgtccattgaaaatagccactggagaagtcttcaacccagtcatattaaacatgtagatgttatcgtctgtgcaattagcaaataaagtagagccagtggaatccaaaatcagacttgaatatccaagttttcgagtgctgctacctgggtacaggaaagacttggatgctatgggttcttgtcgataagcagtataattcttacgtaaatcccatactttgattatcccatccacagctcctgctgagactaaggtattctcgtcttgaccatggcagtgcc

SEQ ID NO: 322453 - DNA, 977 bp, Homo Sapiens
  misc_feature (124)..(124): n is a, c, g, or t
  misc_feature (162)..(162): n is a, c, g, or t
  misc_feature (168)..(168): n is a, c, g, or t
  misc_feature (170)..(170): n is a, c, g, or t
ttttttttaacaatgaccaacatttattgagcacctaccacactgggtaatcctcacaccaccctgggacgggaggtgccatcgctttaaatgtggggaatataagaaacttgccaggaagtgnagagaggaagtggcagctctcggaattcaaacccaggnaaaggntnaccttttacttggggtaggagagagcttgctgggtgggcttcctccacgcggggaacagcagagatggggcttcctccccatctcccaggataaaggcagagacagctctggaagaggagctgttgccaccgttgttttacaaacaggacccctgggcttccctcttcctccagagagaaggatctggggccttgctcagttacctgacatggagggtggtctaggtggggttttagaagccctggggccaccctgggcactctgccctatcctcaggatggccactgcagacaggaggctctcgtcatggggaacagtggcaagcaagggtggctggaggacaggatgcaaaggcagacttgcgccaccttggcctagagcagggggatacgggaggcctcccagaggcgcctggccagctggccggcctgctgcaccagcaggtcagtggggatgacagacaggtgcagggccagcagctcgtagcacctgacagcctcggttgggcggttcttgctgtagtagcgcaggagcttcctgtagtagtctcctcccagcatgccgataggcactgagtcgtcggagaggacgggcacctcgatcatctggagtttgtacccctgaggagggaggacagggaggcagtgggtgtgggggtagtgcaagggcctgagtcagacgcaccgggcttgcggcctggcttggctctgtcatgtgcgctgggtgcttgggaaaatgcctggaccttgttttttcatctttgaagtcagaatgacaacagtcaccttatgaacattagagaaaaa

SEQ ID NO: 322454 - DNA, 478 bp, Homo Sapiens
agtgaagcaatttgaacaggtggcttgacagtgacagtctggttgacagaaccgtaacctgtaaacctagttgttgatggattcccagaatcctcagaattgctgtctgtgtctctgtctttctcttcctcactttcaaaactttctcttccatcatgtcggggactagatggagaactgtaactctccgaagatgtttctccacatgtgtcatgtccagagccaatgtccaaattcacatctttcacagtaccaccatgggcatgctgaggagtggagagtctaataccatttattctactattcaatctgttgtcagttttcttaattttctccttttctgtttgtggctttcctttcttcttatttattgaagataaactccgtttttcagcagaatgctggtcagccgaggtcacacagtgctctgggtgttgaatggtggtacagctttgcttcctccaatccacaattccat

SEQ ID NO: 322455 - DNA, 1014 bp, Homo Sapiens
  misc_feature (736)..(744): n is a, c, g, or t
tccattcaggaccattttaggactcccatgctaaagggtcagataatgaggtaaaggtcaaggtggttggatttttgactacaagggtagtagagtcttgggcagcctaagtcttgaccgtttgttagggaataatgactataagcctggaactgcccaccctgccgtgtacttgcaggaatacaagaaagcaggtcacctttcaagaaaacctggctttatggattatgcatgaagtcagtctcttcctggtacttttctttcagcctcattagtaatccccttcccccatgctattcactccatgtgattcctcagcttcagaaatagaccctctgtttagaatttttggcaaatgctttctggtttccacaggtggaagctggaacgcagtcccaagtgtcaatggcagaacacagacacctgaatccagttccacctttcctgtgtatcctcttcccacttatcttacttccccttcatgttgaaccaacgttaataggtgcaaggtaaggaggactgggttgaagctgctagtaaaggcttccttttcagactagaagctagtaggacagaaacaggtaccatgcaaagagcaaagccattagctggtgattggcaaatggcgccagaaggaaataagggagtattgctaagagtatcagcagaagctagacatacaggttttagcaaaagtattttggtaaacacaaggactagaggaagcgggagggtnnnnnnnnnatgaaggcaaaagacacattaatgcagtcttcaaggagctaagaccttgatataggatgagggcagagaggaagggatgtctttggagaaacttttgatgtcttgcaggcacgagatgagttcacaagcaatcagtgctggaaggatgtgcaaaataaaagttaagagaagctgaggatatagaaggcatcctgaaagtaaacagctgaggaccacaaagcatatcatggaaaatctgttaagcaggggaggtcaggtaggagaggaaga

SEQ ID NO: 322456 - DNA, 556 bp, Homo Sapiens
  misc_feature (83)..(83): n is a, c, g, or t
  misc_feature (533)..(533): n is a, c, g, or t
acaatgaaaacgctccttcttttgctgctggtgctcctggagctgggagaggcccaaggagtccttcacagggtgcccctcangaggcatccgtccctcaagaagaagctgcgggcacggagccagctctctgagttctggaaatcccataatttggacatgatccagttcaccgagtcctgctcaatggaccagagtgccaaggaacccctcatcaactacttggatatggaatacttcggcactatctccattggctccccaccacagaacttcactgtcatcttcgacactggctcctccaacctctgggtcccctctgtgtactgcactagcccagcctgcaagacgcacagcaggttccagccttcccagtccagcacatacagccagccaggtcaatctttctccattcagtatggaaccgggagcttgtccgggatcattgggagccgaccaagtctctgtgggaaggactaaccgtggttgggccagcagtttgggaggaaagtgttcacagagccagggccagnacttttgtgggatgcaggagttt

SEQ ID NO: 322457 - DNA, 903 bp, Homo Sapiens
  misc_feature (326)..(326): n is a, c, g, or t
  misc_feature (834)..(842): n is a, c, g, or t
agctcagcaataaccagggccaggcttagggggcacagggggctgcctgccatcaataagttagacatacatcgcaccttgccgtcctcacgcagggagcccctgggcactgctcatgtgctgcctgggccctgctgctcagaacaccaagggctcccaatgagggcctggggaattgcctgggcacactggggccaggcacagggtctgttctgaattcagggaaggtgaagagaccccacctctatccagctcaagcccaagaacaaggcagacagagctgtggacagcacccgaccacagacacggttctgcctgctgctggnattgaagaggcctggtttctgaggctgcaagcatggcactggcattgcctgtgctacagatggggactcctgcgagtctcacaaatcacagggagaatttcagttcacacaacccaagggccctgtgtgcagagcggccctcacacgagcacagcagcattcaacagagctgggcaagggaaggggagagagagtcaaggattgaaatgaagggacttcaaaaagaaggaacaaactaaaaacccaacccacacacaatactgttaataagccagcgactctacacacacactccttaaataataaagtgacaggtcccggctggccccgcaagaccaccgcaagagggggtcccgccaccagagggggtcccgcctgccactgcacggctttcctccctctatctacaggacaaacaaaacacgggagaggggaaaaagcccacattttcttcttgataaatgctgttcaaaaacccatgaaggactcaaagtgacatggtggtttnnnnnnnnncctaaatgatcaacagatgttgctttctatatttttcctttgttctgtttgaactgggcta

SEQ ID NO: 322458 - DNA, 758 bp, Homo Sapiens
ttagtcagtaactgtagggatttcctcttactagtttccaaggtatccaagcgagaaagagcatctccccgacgccaggtctcaaagctctggaagagggactcaaaggcatccctttcctgagcataggcatcttcaatagaacagaagacatgtttggtgtgctccccacgagtagcacagatccccacaaatcagctgcatatcagtccaggccagaaaatgttgagaggctgccccaaagtgtcctttgcatactggcattttgggagagatcttgatcttgttatacttttccacaatacccttcagggagtaattaacctgcaggctattaattccagtagctgaagtttccttacggcatgtaggacacttgaatggagctggtctccacaaggaattccgcacactcccttctaagataccttctaagcattttttgcagaagttgtgggagcaaggcaaaacccgtggatcatcaaacagactacaacaaatagggcatgtgagatcttcttcaagcagctccatcacatcctctgtctcctacaagctgatgtatttggcagggttactatttcccagggcaaagcaggtcttttttttcacgttttgactaacgaactagaggctactccggctagtgggaaaggccgcgcgaccgcccgtcctccaactacagggaccgcacggtacgcgccaagcacagccccaaaatggactcgcggctccggctagctccgcccccttccctc

SEQ ID NO: 322459 - DNA, 1067 bp, Homo Sapiens
tgctacctaatttgaacatgtatagattatttttggaaggaatacttttggaggaaaatatgtgactagaatcgttgaccaaatctgaattaccactctctattctctaacaatttctaacaaaagaaaactgcatacttgaaacagattttataatagtttatatttgcacacaaattctgccacattgttcagtaccaccaaagtaaaattcttgaatctttcattgaaaatgaaaaacccatctgtcacctgttcccagtaaaaaactgattgttctatgaaatcggctgttttagtcagataggaactgaagtttgaaagacagcctttccaagttgccaggtcatcaaataatgaccattctaggaacatggtaggaccaaagacaatgacaaggccaagcagaaggattagcaaaaataacttataaaagctccagggaatcttgctaatgaatgtgccagtgtcttgaggcaaagaaagtttatccacatcgactagttttatgtcttcccactgactggtatcaaagttcttcattaaagggcttgcaggcaaattagagggaggtaaaggagtttccttgattactttgattttctctctaaactcctgcatctgttgcagaaatacaatgggttctgacacatctttgaaagcctcagcaatgttaaaggccatccgttgctcctgcaagatggtgttgagtttgttgatctctgggtcatatgcttgcataacagcaagtttcatggtctcaaagtcagacagaatttcattcttcttttgatccagtgtgtgttgtaacttctcaaaaaattccttcactttatctgaatctttagtcagtaactgtagggatttcctcttactagtttccaaggtatccaagcgagaaagagcatctccccgacgccaggtctcaaagctctggaagagggactcaaaggcatccctttcctgagcataggcatcttcaatagaacagaagacatgtttggtgtgctcccccacgagtagcacagatccccctcgtgccgaattcgccacccaggcctcgctac

SEQ ID NO: 322460 - DNA, 851 bp, Homo Sapiens
  misc_feature (276)..(328): n is a, c, g, or t
aatttccccgggttatggcaacgggatttcctttaatgccgggttacgcggggctattggaaaattaactgggccccttattaaggagacccggccagtttttccccctttttccacaaaaagctgggtccagggaaccagctatggcccctgggcccattccttccttctttttccccacccggcataagaaccctggaggtagagttactgtgctgcttccggggggtataccgggaggatatctttattgagtgcactcagactcaggtgacnnnnnnnnnnnnnnnnnnnnnnnnnnnnnnnnnnnnnnnnnnnnnnnnnnnnncactttcccaaaaggggtgggttaacttgatgtaggcttacagtggcatgaaaacagagatacagagggagaacaattaatcaaattgtgacagttcataactcggggattacacatgactgttgctttgcaacctagatgtctgttatctaggttttgctcaaaagagccttgcactggtttgccttataaccttcactaggtgcccagacagctgtagttcaggccttctcaggcgtctcatgaccttcgcagtaccaaattttagatgtctggactccaagtgccagttccttcctggtgttcagccactgtgttaatcctctgcgagggcctgctacctgcttctctggtgagggattccaccggggcaatttcctacccaggagggctctttggatcatgtcactcaggctggctggagtcccccacaggggcactccacaaggcaggcttaagttgcctaaggggctgcctcagctgtctgtcagtcacgttgcttcccggtcagggagccaagaaa

SEQ ID NO: 322461 - DNA, 408 bp, Homo Sapiens
cccttttggctctcctgagattttcttccatgtgctccagctgttccatgacacattctacaatctcaggcttgctctccagcagctcaggggcaaacttttcattcatccaggcctgctccaatctttcaatgagctctgcaggagttaggaccacttcctcactacccccatcagagtcctgtcccaggaaatccacttcttcggtcatcttctctgaaaccaggaactcggggacctgggagacagcgaggcactccacagcagccggcggtaaggacggggcgttcgtggggacgcagtcggggcaccaggaagcgggaagacagaggaacaaactgctcaaggacttgccgggaccaactcaaccaagcaacttctcagctcccgcgctacttcagtaggcca

SEQ ID NO: 322462 - DNA, 506 bp, Homo Sapiens
  misc_feature (238)..(238): n is a, c, g, or t
cacagaaaaccaccagactcacacagcttgtatttgaatgaaccaggagagacttcaaggatcaactctaaagtgctagaagagaaatctgtgtttggggcactgaataaacaagtgatgtcctagaggatcaacaccccatcagtcttaggagtatgaccctattcatggacaaggggtttcaatggacagcctgagtgctcagccccccatcctcctctcctagcaagacaagcangtctgttgctcagagggggaaactgagtgtcatttaacagggggtcaggatttctggttctacttcaacaaacagtgcataattttggacacagcatcagatttcctgacttcttacaaaggacagctaattaaaaacgtgtcaatctgtagtaattagttggagattaacaagggcagaagagaatccaagtcttaaaactctatgtgggatacatttctgatgaagcttctatttgactaatatactgtgatgatggcactattcg

SEQ ID NO: 322463 - DNA, 996 bp, Homo Sapiens
  misc_feature (114)..(122): n is a, c, g, or t
aaacaggctggttaccggccggaattcccgggatatcgtcgacccacgcgtccgattttaaataacttatcattccagctatgttggactagggtccaaagcattttataatannnnnnnnnaatctaggaaaaagacccaaacaaatctaacttcttgctttctcacctatttgaattttctcctacctaatttgtttgtgtctttattatagctcagtttgacttctcaaacttttcaagggttggggcagctgcacttttaggttgcctataggaaatattgcatatggagattacagtgtttttctgacctagttcaagaccagaacatgggtcatagggtttttattcagcaaaatgaaaacgtatcttcagaacttaacatattactggatgtgatacagattttgctttctgtggaattgaaaattcacaaaaattcacagcttaaatttcccatcagtgactggaggaatttttttcaggtgcttcctatattaccatccctcgtgcatattaactctttagaattttaggttaagtgatgtctatagaagtagcctggaaaaccatgagttttggagttcagtgaccccctgctttcctctgcccctcccttcccaaggcattgaagctgaatgtgccaactggcagttagaagcgaaagatggcattgggagaaattttagagagctttcaaactctttattctcatgttccacatggtctaattttaacataaataatatgccttcacactggattgtaaaaggcatgtgatttttgagattttattttgtgatgtattgtcttctgcagtattaaagggaaagaggtattaatgtgcattaccctatcttgtttttgaagccagggtagttgtatgattttgttaccagcagtgctaacctgaatgtgacctggttaccttggaaatgcaggaacttatatgaatgtactataaaataaaatgcggactgattcccagaaaaaa

SEQ ID NO: 322464 - DNA, 631 bp, Homo Sapiens
  misc_feature (315)..(315): n is a, c, g, or t
tacagaaggcactttgaggttacatgataaataaaaatacattaatagaggcaggattatttattggttccttcagtgtctgtgtccatggtgatcattgagagcccagttttgtacttcacctttggcgaatagtgtaaagaaaatggcaccaaaaacattaatagcagcagcaatatagaacacggtttgccattctccaacagtgttatcaggggtcagacttttagcaatgacgggcccaaccattcctggaatagtggcaaatgtatttgtgatgcccaggaggataccagcatacgaaggagcaatatnccagatggttgatgctaaatccagaagagcaaaagcctcccagtgttgttgatatagttaggaaagcaacggccaaagaataatcacagccaatgaagccagcagctaccaggaatactgcaggtccaatcattcctataaggctaaaaattctgcgaacacataaagttgaaaaattccattttgcccttaaattgtcagcagcttgaccagacaggatcatacataaccaagagcctaaataaggcaatgaagataaaaacccattctcttgaacattgaaccttaggatctccttcatataagtaggcaataa

SEQ ID NO: 322465 - DNA, 880 bp, Homo Sapiens
gcctgggtggcgaattcggcacgaggccgaggtccgggatgtgcggccctacattgtgggggccgtggtgcgaggcatggacctgcagccagggaatgcactcaagcgcttcctcacctcgcagaccaagctccacgaagatctctgtgagaagaggacggctgccacccttgccacccacgagctccgtgccgtcaaagggcccctgctgtactgcgcccggcccccacaggacctcaagattgtccccttggggcggaaagaagccaaggccaaggagctggtgcggcagctgcagctggaggccgaggagcagaggaagcagaagaagcggcagagtgtgtcgggcctgcacagataccttcacttgctggatggaaatgaaaattacccgtgtcttgtggatgcagacggtgatgtgatttccttcccaccaataaccaacagtgagaagacaaaggttaagaaaacgacttctgatttgtttttggaagtaacaagtgccaccagtctgcagatttgcaaggatgtcatggatgccctcattctgaaaatggcagaaatgaaaaagtacactttagaaaataaagaggaaggatcactctcagatactgaagccgatgcagtctctggacaacttccagatcccacaacgaatcccagtgctggaaaggacgggccctcccttctggtggtggagcaggtccgggtggtggatctggaagggagcctgaaggtggtgtacccgtccaaggccgacctggccactgcccctccccacgtgactgtcgtgcgctgacgccaggggccgcctgtccgcgtttgttttggccggttttgcggaggtttctatgcgggcaatgctgaaattatccgttaa

SEQ ID NO: 322466 - DNA, 574 bp, Homo Sapiens
  misc_feature (155)..(262): n is a, c, g, or t
atgctgctcactatgacaggaatgtttcaagttcatttgataatatgtgagctgttgttcaggggattggcaggactcttggtcctagccttaaagaaaatttgagaatcactagcatacagagcttgtcagtgcagtaaaagtggtatattccnnnnnnnnnnnnnnnnnnnnnnnnnnnnnnnnnnnnnnnnnnnnnnnnnnnnnnnnnnnnnnnnnnnnnnnnnnnnnnnnnnnnnnnnnnnnnnnnnnnnnnnnnnnntcttttaattattattttaagtatattcccttgtttataactgattagcttatttcagttgatggtagatgagacctatggtggtggatgagacccagaatcttcagagagaacattcttttgacaacattgttttaatcgtcaaagtcaggtggaagaccgtgttctcggaactattttaattgttaaaatgtatcacctaagataatgaattcttccacaaatattttagtcatagtttttaagtaccacgtattctaaggttatcagaaaatatgtcttaacagaatgttttgcatactgaataatttg

SEQ ID NO: 322467 - DNA, 1389 bp, Homo Sapiens
  misc_feature (757)..(757): n is a, c, g, or t
  misc_feature (809)..(809): n is a, c, g, or t
  misc_feature (1017)..(1017): n is a, c, g, or t
accatctccaaatggttttttattgaacacccactttggctaggcaatatcctccccctgccctctaatccaggctcaggtacccccagtggagtatcctcagaaggcaactcccaagaccaggagtaatgagagattgggcagagggtaagggacagcagggagacggaggaaaatgaagacaccagggaaagaggagaggcctgaactggacagctgatgctttgtcctgcccagcacccattcgtcccttcttcaggtaatatcatctgccaccacaaccaccagcaccaactctcagtctctgtgggtacatgccaggcctgtccatttggtgtattccatcttcctggccacaatgatgacttgaggctggataccttcgtcgtctggaccaatgagaaccaaatccagcagttctgtcagcaaaggggagctctttttatcaataactggtgctgtggggccacactgtgaagcccaagaataaagccaactcaaatgaaagcagagctgagagccaaaggagacagaatccctgtttggagttcctggggatgcagcctgaacgccccatttagcccaatccttttcagctacggtgagcccattaaattccctctgcccccaagtgaactggaaagagtccccaaccaaggtcccttcccatctggttgttcttctggaagtattttgaggacaaggagattttcatctccagggttataaaagtaattgtgtggtgacaggctgttcntaggtccctggggtgagagccaccatggagacagagtccagctcgcctttcntaggatacacactcacgactgtcaacacatcttcgaatacatcagcacataattataaactcctattgtttgtagtagctattgtttttgtcttcccaccaccttgttttggatgaagaaaaggtcatgacccagactggattaatcatgtggccaaacatgcatggccacagtgactgatccaagaggacatggaactcacaacaanaccattgagaactttgggagtttccaaattcgaactggaagggaagaaacctttcattcagagcccccaagctaggaggatgcaggtctggagctatcagctgtcatggctccaaatgcacggcgaaggctcatgtgcagcaggaggaaaggaagccaacaaagaggcctggttgagtctgcttgttgtctcccaatggccattcttcccccactcctttttactagcagaatctccttcctcagagttttggctgcccaagtagaaactaaatttacagcctcctttgttgctaactgtggccacatggcaagacagtaggaacctgggtgcctgatgacatcatcctcgtgccgaattcgccacccaggc

SEQ ID NO: 322468 - DNA, 1166 bp, Homo Sapiens
attcagaaaggccccacccgcgggccagccaatgggcgcaaccaaaccacgggcaggattccccggtttcaagctggtgggaactcccacgagctgcagccaggtcagtggaagggggtctggcccatcatccatggtgaaggtacaggcggcctccttcctcggttggcagggatgagataatggttcactttctgcagggggcacaagagaggacaagccccgggggttccgctgactctcccggaccagaaacaggccgtctaccaagccctgctgtccaaataagccgctggctctcctcacgggaaatgcgcccgtgggaaccagagttggggtgcggtggatggctgcactgagggctcgtgcccggaggctggcatgggcaggctgagggcggtggtttgtctttttccttccaggccttgggcttcttccagggccccactcagagcctcccgggggttctcaatgacacgccccagcatggccagagaagtccatggccaccagggtattatctgaggcacttctcaagggtggggagcccaaacaagatggatgcagatggcgagactgtgcctgctggtaattcttgtacagctgcaccccgtacttgaagaggcggaaggcagccagccagcaggtgcggctctgctcatcttcactgcagaagatccgaagccccttgtggccatttcgaagcttgttgggcttgacacagaaaccgaagtcagtgggcatcccgtagagcttgcggccctgcgtcaccacgtacacgttggactcgttcacatctgccacgtactgcaggtgcctcggatccttagaggtgcccttggtggagtaatagaggccagatcggcgcaagaagcagaaaaagcgtttccaaagcttccgtcctgaaccccgcagctgcagaaagccctggatctcaggaaagctgccagcattcaggaagttctggatgaggtcttcatgggatataccagtgtgtgcatcgagacagctggagaccattttttctgggaacagggagtgtggggagctcttgaacagttcgtacttggcgaagtttttccggaagacgaagcggctatctccgcccacgggccaggcagcctgcacttccaccacggactcgtggtcctccaaaccccgctcca

SEQ ID NO: 322469 - DNA, 584 bp, Homo Sapiens
tcgagcccagaattcggcacgggggcccaatctcgtcaggcttgccagagaaagttgttgctgctcatactggtctcacagtctaagtaagtgtctgtgatgctcccaggcaaaggaaatgcaagctctggaaattcgttaatgtatttgatgtcttagtgttttagtgactagggagaccattaactagtttatcattaaccacttatcagtgtattgatgttaaagcatttccctgttagctaaaagaggcctgttcatacaagccaactggtatatacgtgtggttcatccatcatctgctgcacatagcagactagaattctgggaaccctgtgcaattcagtctgctctcccttgtggaccctggtaaagaaaagcctcagctcatagtgaacacagcagacctagaaatgtagcgagcagcctactgagtagctttcatttactgatcatctgctgtgactgtggccctgtctggaggttcctaggttttgagatttagagcaatgcattctggagacagaaccagcagaacagccatttttcaatttttctttaaatcagtattccatcaggcagat

SEQ ID NO: 322470 - DNA, 1162 bp, Homo Sapiens
  misc_feature (1121)..(1121): n is a, c, g, or t
ttttctcagttcactgatatcaaaagaaaggactttggcattatgttcctgcaccaccttgtatctattttcttgattaccttttcatatgtcaacaatatggcccgagtaggaacgctggtcctttgtcttcatgattcagctgatgctcttctggaggctgccaaaatggcaaattatgccaagtttcagaaaatgtgtgatctcctgtttgttatgtttgccgtggtttttatcaccacacgactgggtatatttcctctctgggtgttaaataccacattatttgaaagctgggagatcgttggaccttacccttcctggtgggtttttaacctactgctattgctagtacaagggttgaactgcttctggtcttacttgattgtgaaaatagcttgcaaagctgtttcaagaggcaaggtgtccaaggatgatcgaagtgatattgagtctagctcagatgaggaggactcagaacctccgggaaagaatccccacactgcgacaaccaccaatgggaccagtggtaccaacgggtatctcctgactggctcctgctccatggatgattaattactcaaaactacaagtcccaagcaaagtgaactatttgttcctggaagtatttaataagttgcaaatgcagttcctttcataatatctcagcaccagaaacaaaaattaagattatcaaagcattttgaatagtgcactgccatgtgtcctgtctgtgaatgaagaagaattaccattctctctttgtaggcatgctgtatgtaattgacacaagggaacagtatttgcatttgtactgtcttagaatattatttattttttttgtatttgtaaatctgtggaacaaaagaggttttcctcactccttttactcactgggctcatggacagtgaaggagatgctccatctgcttctccccctttctcttgctgtagtccaatgtgctatgagcatcagcttactttgtcccttagagcaagcaaaacccagtgcaagagtctcgttcagctctaaataggtttgctttcttttagttacagtgcccattttgaaattgcctatacagtcttagtgaccatttaaaccggacgaactaggtgtntaattttcactcttcatgttcaattagcagttcaaattaaa

SEQ ID NO: 322471 - DNA, 627 bp, Homo Sapiens
attcttcgagacctctgtcagcgagttccaacttggtctgattttccaagctgggctatggagttactagtagagaaagcaatcagcagtgcttctagccctcagagccctggggatgcactgagaagagtttttgaatgcatttcttcagggattattcttaaaggtagtcctggacttctggatccttgtgaaaaggatccctttgataccttggcaacaatgactgaccagcagcgtgaagacatcacatccagtgcacagtttgcattgagactccttgcattccgccagatacacaaagttctaggcatggatccattaccgcaaatgagccaacgttttaacatccacaacaacaggaaacgaagaagagatagtgatggagttgatggatttgaagctgaggggaaaaaagacaaaaaagattatgataacttttaaaaagtgtctgtaaatcttcagtgttaaaaaaacagatgcccatttgttggctgtttttcattcataataatgtctacattgaaaaatttatcaagaatttaaaggatttcatggaagaaccaagtttttctatgatattaaaaaatgtacagtgttaggtattatttgaatggaaagacaccc

SEQ ID NO: 322472 - DNA, 473 bp, Homo Sapiens
ttgcctgaaaatattttttaaaaccaaaactatatgaaaaatatgtacaaatcagtcatcaatgtcattgacatttttatgaacaagtttcaaatgaaaaatatcccatcataacaaaggtacataaataaataaatgctgacaatactggccctaaagtctaacacaactgttagactaatcaggataccgctttctactacgtgaggagcacataatcaatgtttccagcaaaaggcaagtactggtttgtgtagggtttatttaggccagttgacagccacattattttgaggtgtgggctacttgtttctcttcatagtgttgaatgggcacagtgcaaggcattgggcaccagaagcatgagcactaggcagagccatttccaccatgctgacggcaggcaagaagaagacaaaaatgaacccctttcatgcttgtttagaaatgtgacggctaggcgcagtggctca

SEQ ID NO: 322473 - DNA, 887 bp, Homo Sapiens
ggggtcactatagcacctactttagatagtgtgattagggggttaaacaagatggtcattcaaaaaatttatcacactgcctggtcaataaatgttagctgaaaatactattagttgtggtattacaggggaaccaaaaggaaaattctgtatttctcctcactgataaagttttcagggacaaactgtggcaaaaagcagagataccagtacatttgaggccagtacaaagagattgaagacctagtcttatgaatatagatacccatttttatataagaaaaaaattacagggctccatatcacaaaatttaagatcttcctgttaaacatcacacaattcccatcatcattatgccctacatacactctaaattatgtagagtttctactgatatttaacaacaacaaggtccagaaatttaactaaaacagctgcagaactgcatattgggcagtaatctgtgtgtaccacaagagcttgggccaacacagagggccaggggttctgcctccatggcctgggactcctccacacacagtcagacgagtcaggttcttgcagaccttcaaatctccattcatatcccccttcaagagggccgttttcagaggtgaaggaaggagcagccactgggcacgaaacgccgcactcctacttcagtatgatatgatagctatcattggtttctgctttcattgtgtccagaataaaacatgcttcttcctgaaagttctgtatcatctcatcactgatgagcacatgaattcctgttggcccctgcttgtaaatctggctgatctggcaaggggaaatgctgaaaagctgagcaattttttctgtcaattcaacagctgttagttcttctagatagatagcatggtat

SEQ ID NO: 322474 - DNA, 726 bp, Homo Sapiens
  misc_feature (303)..(303): n is a, c, g, or t
  misc_feature (636)..(645): n is a, c, g, or t
  misc_feature (671)..(671): n is a, c, g, or t
aaggaatgtacttttgtcatgtttatagtaatgttcagttacggtacattttatacaaatccagaaagactgactctatgcttatttaaaaatgcaagaatataatgaaaaagtactaagattcccaattatttgcagttccaagtataattgtgaaatgccatctttcataacttattagattggagctggagtgagccttccaggaattttggctgccaaatgtggtgcagaagtaatactgtcagacagctcagaactgcctcactgtctggaagtctgtcggcaaagctgccaaatganttaaccctgccacatctgcaggtggtaggactaacatggggtcatatatcttgggatcttctggctctaccaccacaagatattatccttgcatctgatgtgttctttgaaccagaagattttgaagacattttggctacaatatattttttgatgcacaagaatcccaaggtccaattgtggtctacttatcaagttaggaggcaagtatggatgacccttactttttatatgtaacttaagccttactctaccctacccatgcgatacataatttaagaatagaatacatctgaagcaaaacagaaaaggcatgactttaaaagaacaacnnnnnnnnnnaagtgctgactggtcacttgaagctntactctacaaatgggatatgaaatgtgtccacattcctcttgagtcttttgatgc

SEQ ID NO: 322475 - DNA, 1069 bp, Homo Sapiens
ccgaggacagggggtccgggcccagcgctttcgattctcggaggagccgtgttctgggggagccggagctatcaggacagtggtctctctgcaggtgctgcatctccagtatggaatgtatgtttggccctgtgctgtgttcctggcacagtaccgttcgtttgacagaagatctctcccaggcaaggacgtcccagagattggagctggagtgagccttccaggaattttggctgccaaatgtggtgcagaagtaatactgtcagacagctcagaactgcctcactgtctggaagtctgtcggcaaagctgccaaatgaataacctgccacatctgcaggtggtaggactaacatggggtcatatatcttgggatcttctggctctaccaccacaagatattatccttgcatctgatgtgttctttgaaccagaagattttgaagacattttggctacaatatattttttgatgcacaagaatcccaaggtccaattgtggtctacttatcaagttaggagtgctgactggtcacttgaagctttactctacaaatgggatatgaaatgtgtccacattcctcttgagtcttttgatgcagacaaagaagatatagcagaatctacccttccaggaagacatacagttgaaatgctggtcatttcctttgcaaaggacagtctctgaattatacctacaacctgttctgggacagtatcaatactgatgagcaacctggcacacaaactatgagcagaccacttcagcttgagaatgcagtgggtctgaagatggtcaagtctgtttgccttagattttgatgtcacctagacaacacttaaactcatatgaaacaaaaattaaaatacgtattacaaggaaccaaatgcagattcgaacgtaattactggctgtctggccgccgtcggccactcaaaaagcttttccaaaacattccgtttggcggggcggccccacagcaggtaaagggtaacatgggacataagcggttttcctaggaagaagcctgggtccgtgaccaagggcattgtgattccccccccattt

SEQ ID NO: 322476 - DNA, 1448 bp, Homo Sapiens
tattaggggatagtggcgtgagtagtgttggatgtagttgtctgtgtggtgggggtcgcactaacgccttcgcgcgagttgttggtacgtgtgcgtgagtgccagggcctggtttgagcttggggaatcggtgatcaagggtgcggtcactgttcttccggagtcggccccaggtcaggtttgtgccagtgggggacgcgcattcgtaatattgaaggttaggaggtagggtgacaggacaccagtcacatcgtgcgcagtcttgcacaggaggtcagctcatgaaagagtggtataagagggcacgacgatgtagtcgatataatagtaaggatatgttagccaacccaccaataatcacagccggtggggcgagcggtaagggggtgatgaaaacacacgtggtgcttttgcagggccctgcccatggtccgtgccgggggctggatctttttgtctagaaggtaagagtgagtaagatcgaaaatcttgtttggtacagggtgttcgtgtgtcctcgtgtgggtgtgtgtggccgtgtccttttctcttgttactgtggtcttgggtgctcctggccccacgggcaggtagatggtcattggccagcaccacgggctggaactgctggctgggatactgcatggtgttcaggttgtagctgaggccttccacaaagggtgtcttctccaggaagaggctgttggcaccacctccaaatacctgggccatgtcaaagctgctgctgttgcaggtgccagccccactgcctcctaacgggcctggggtgccgctagcctggccatcggccgcatcaaagaagaggctgggtgagccaccaccgttgtacacgaactcccttggcattgggtgagagctgggactgaggggccgggttggccgtgatgaagttcagtgaatgcatagacagagagaggctcttgtgcttcagcaggctgttggtgggtgagcgggccatgcgaggctgctgtggtggctgctggccacccgccccactgctggctacacccccaccacttgctgccccgccccccttcttcatcttagtggagccaaatttggtggcagcgaaggaggcggtggtgaaggtgatgggctgagcggagcggggaatgaaggtagggctgggtgactggccaaaggatggcgatggggagttggacagggagctgtcctggctgccaatgggcacgaacacctgggcgtcaaggttgaagctgctcttgatctccttgtccagctctggggcaccgcaaccctcactgtcatccaggtacagcactttcacagctcccttctcaccaatctggtagggcacctcaaagggatcaatccagacactcagctcctcatgcacattggcccgcacatcttccactgccaggccactccgcttggcggccagctccaccacggggtccaccatc

SEQ ID NO: 322477 - DNA, 938 bp, Homo Sapiens
cggtccctgttctttccggtttgtgccgttcccgttgggtgcatcgcttccgcccagtgggggcttgttccccctgccgtggcgcttcctgctgactccgttgcccccttcactgggggcccccatttcaggccccccccacgggagcctgtccggccagagctgccctcatctcaagtgcacggcctcgcttccaggtccatgcccgaccagaggatgttgctccatagtcatctcataggttctgagtccagtccctcaacagacgtggcctcagtttcacggattggtgccagcctgggcttaacacatcacagaccgtgcccagcccagcgtgcagtgctgatggctcctgttctccactccagaccttttacttctttgacctgagtcatcctcagagcgtcggtttgccggcacactgcagagtgactgtgatctcgtacctgggaaagttgtgcaagtcatccagggaaagagacagtgactgacccccaggtgctcctactacgtgtaagcgataggtgtctggatccaggttaggtacaggcagatggttccgggtgaagaagatagggttgggtgtgatgtagttttctgtcagcagctcagggggaggctctgcattaaagggccgctggctgttgaccttcagggctgggtgacgtacaggatcatcagcataagggtcagaggtctccacggtgggggctaccttgtcttcaggattcagctccccaatcttgtactgagccagtaactcacgcacatgggactggttgtgaacagcatagagggcccagaagggctctaggggacccccagctgctagcatcagctttgaaggcccccctggatgtaggtccacaaattctgtgacatcaaagaccttcagagcccagagtcaccggacgcgtggcgacgcgtgggtcgacgat

SEQ ID NO: 322478 - DNA, 1632 bp, Homo Sapiens
  misc_feature (19)..(19): n is a, c, g, or t
aataatgtttattccacgntgtcccgacagacccctctgcaggtcccctcggtgtactctgaggtgggaaaccctccctgggggcggtgaaggggaactcgggccaccccaccagccagcagatgctccagcagccagagccccagcctggagctgaggctcttcctggggctcgccgggcccctgcaggcttttcggaccctcagccagcccggcttcctctgctttgggcagcagcaagctggcccttgggcccctgggactgctcaccagccgcccagccctgggtcctgctctccagggttccttctagcagatccatttctgtcagagcaagggactcaggcctggaccatcttctgggctgtcactggggctctcagtggccatcccagctctgcgctggcccttctggagtgtgtaggcagacggccccagccgcaggatcttcccgctgcccaggcactcgtcccccttgtagaacacagcaaactgtcctgtggcaagggcacgcacagcctgcacagctgtcacccacacggtgccatcttgattgagggtcagcacacagggcactagtgccatctggtggcggaatcggaagtggcactccatcatcttgtcccggaccagtgctgcgggaggctcctccgcaatccagtgcacgcggctggtcctcagcaggtccctgtacagggctgggtggtctgtccggggggcccacaaacacgtcacccttgacgctgtccttctcccaccacgtacccagggctctctcaggcccacctatgtttgctctctggcccaaggtatacaggaaccaacctttatgtgttcccagaaccttattgtcttctatggaaataaagtgaccaggtcgaggctgcagatactgaagaaggaaatgttcaaaattcctcttcccgatgaaacacatgcccatgctctctttcttctgaagcacatgatgaagtctattctcagcagcgattttctttacaaactctttcgttaatccccccagagggaagatgtttctcctcaggggcatcctgggaaacctggctgagaaagaaggtctggtctttaaagctgtcagctgcctggaggagttttaccgcatttctaacttcaaaccgatttctgaaaagcccttcgggcttcttaacgtgcttctgctcaaagacttcttcatcttccagggaagttcttgcatagtgacctgtggcaatggcatctgccccaagattatccacagcataatgaaaaaagcaactaaatttgatgtgcttgttgcaaactatgtcaggattgggagtccttcctttttcatactcattcaaaaagtcactgaacacatcattccaatactcctttacgtaggacacttgatggaaagggatgtctaagatctggcaaactctgtaagcatcttcacagtctttgtcggcagtacagaccccatgttcatccagtgagtcccagttcttcataaacacccctgtcacctggtaacctctccgcctcagcagcagcgcggccacggcgctgtccacgccgccggacagggcgcacacgacgtgccgcaaggcctgcatccgccagtcgcccaacttcgccagctgcagctcc

SEQ ID NO: 322479 - DNA, 950 bp, Homo Sapiens
ggaagaggagggcaaggtgtctggctgcgcgtttggctgcaatgagctcggcctcggggctccgcagggggcacccggcaggtggggaagaaaacatgacagaaacagatgccttctataaaagaaaagtacaaaatggaccacaggaggagaggaattgctttaatcttcaatcatgagaggttcttttggcacttaacactgccagaaaggcggggcacctgcgcagatagagacaatcttacccgcaggttttcagatctaggatttgaagtgaaatgctttaatgatcttaaagcagaagaactactgctcaaaattcatgaggtgtcaactgttagccacgcagatgccgattgctttgtgtgtgtcttcctgagccatggcgaaggcaatcacatttatgcatatgatgctaaaatcgaaattcagacattaactggcttgttcaaaggagacaagtgtcacagcctggttggaaaacccaagatatttatcattcaggcatgtcggggaaaccagcacgatgtgccagtcattcctttggatgtagtagataatcagacagagaagttggacaccaacataactgaggtggatgcagcctccgtttacacgctgcctgctggagctgacttcctcatgtgttactctgttgcagaaggatattattctcaccgggaaactgtgaacggctcatggtacattcaagatttgtgtgagatgttgggaaaatatggctcctccttagagttcacagaactcctcacactggtgaacaggaaagtttctcagcgccgagtggacttttgcaaagacccaagtgcaattggaaagaagcaggttccctgttttgcctcaatgctaactaaaaagctgcatttctttccaaaatctaattaattaatagaggctatctaattttacactctgtattgaaaatggctttc

SEQ ID NO: 322480 - DNA, 1287 bp, Homo Sapiens
  misc_feature (866)..(902): n is a, c, g, or t
cacttggtgagttttcagccagtttgttaaacttttaattaagttttgtttataataaaaatataaatggatttgaaagtttccattttttaaagttaccctcgtttttcaaaggtattttctaaacagatctttaatggactatttaaaccgaatttaaggaattcacacacgacagttgacaggtcttcacgcaggctggttggtaacgtgctgccagcacagggctgggtgatacgtacaccctaagccgggggtgcctggggctggggggcgctccttgcaatgcccctccagccacagggcagtgaggtgctgcctgtgtgagccgtcgggggagcggccggctgtgggggcagcgcacaggaagcatcgtggggcctttccttctcggctggttctctgtgacggtggcgtcggctcgcctctgctcctttcatctagaaagaagccactgaccctgacagcccacggcgggtacactgagcagctgcattggtgctgtcacttttttaaggctttctgtccagacttcaacactggtttcttttcagagtttcgaaggattaatgacttcctcagcgcccttgctggcgggctgagggtgacagtcacgtccgtttcttctgtattagaaggctgcggtgattcaattagattgtcccactgctgagacctgtagggcagcttctaacatgcttttttcaaggggagaggagtagtgacaagtcgtgtgtcggaattggatttgagaacactctgaatgacccctggaggccgagggggcaggcttcgggcgtgaactgaactccagacccctctttgtgttgggcagtgtcatcttgcttacaaactgtaagacacannnnnnnnnnnnnnnnnnnnnnnnnnnnnnnnnnnnncagcactcacgcctctgacagtcttttgggaaagagtaacacccacatacagaatttgtcacatccagagtagcactgttccttaatactggcataatgcttccaggaagtttttcttttttatatttaaaatgttacttttctgtatgatgtgcatgcaagtttaccgtaacttttcttaaactttttagtgccgtttctagtatattcctgtaaatgtcagttactgaaaatgagtccaatgtaagtagtttagcttgtttattgcaatgctggcctcaacacaacagaataaaaatggtagaaagtactctttgatgtttctggtaatcatggacccttctcctggggcatttgttttgttttcataataaaaagcaaaaaa

SEQ ID NO: 322481 - DNA, 579 bp, Homo Sapiens
  misc_feature (82)..(145): n is a, c, g, or t
agtccctttgtgagatttgtccccatttctcggacaccatatgagagacttcagaggctgaagtgggaggattgcttgagcnnnnnnnnnnnnnnnnnnnnnnnnnnnnnnnnnnnnnnnnnnnnnnnnnnnnnnnnnnnnnnnngaggccctgtctcaaaaacagccaccaccaaaaactatctgaggatttgaataggattacattaaatttgtagactaatttgagaattgacatctgtacaacattctaggaatgtgctgcctcatgtactcatttctttttaatgtctttcagaagagttttagggttttcatcatatagattttatatattttttgttagataaaagatctttgcatttttgttcctaaatactccatacatttgtattgctattgtaaatgggatcttccttccattttctaattagttattggtggtacatgggaaaagtagttgaggtctgtgtgctgctgtcttgatttttatatagccactgtattgaattctcatattacttccagtaagacaaacttagttgattctcttaggcttccttggctgtctcacattta

SEQ ID NO: 322482 - DNA, 1169 bp, Homo Sapiens
aagtacgcggggccctcggggtggccctggaccccttcaccccacattggctccagaccctttttgggcccatcccctccccaaggcactcgcttgtggtctgcgttgcttgttcatcccaccccagttgcggggtctcgcggggagttgcagctgcccgaggacatggaaggtctggttgctctcagcagacaggaagttcagagctggcacttgggtgagcagcaggcagggtgcacccacactctgccacccaagtcctcgatggaaagtgctggaagatgctgctttgggcatcgggggcaggaggcagggataatacccctcccctggcccaggagaggggagaaatcagcctctggtagcccctgttcccctgaggagctgccagcgggagaggggcaaggccacgcagtgcccagccgggagagcctggtagccagagcgggggtggtgcagctacagctgagaggggacgaggccaggaggagctcagccagcaggtggggggacagcaggggcctgctgcggaggatgggtggccacggccagggaggtcgtggccccaggagcaggtgctgggcttgggactctttggaagaacctagcgtgtctggcctggcagcccagccattcccacggctggtcaggatggcactttgatgccaaagtttttgcgtagctgttccagaaacacaaaagtgagcacggtgtgggggatgaggcggatgccagctgggacgaggcccttgtaaaaggccagaggcccgagcttcgctgtctccacggcgcagtggaaaacgccctgatactcccccttggagttcatcaggcgagtcttcagcacatccaggggctggcacaggaacgtggcacatccacctgcaataaagctggcgacaaagtgagtgaagatgttgtcagagaggtacccggtgctaaggaccagctgcttggcctggtcgtagcaggacagctggcccacagtgactaaggcccctcggctggatgccatggttgcacccgagaacagtctcctgagaccctcttcacgagctacgcggtacaggccatccagcgcatgggcgtagttgcgccgctgaccctggggcagcttcacgtcgttctgcatcctgaaacagaagcaggggcgggaggggcgggcgggc

SEQ ID NO: 322483 - DNA, 893 bp, Homo Sapiens
ttgaatgcccaaagtttttgggttagctggtcccggaacccacaaaaagtaaccccgtttgggggatgaggcggattccagctgggacgaggcccttgtaaaaggccagaggcccgagtttcgctgtctccacggcgcagtggaaaaacgccctgatactcccccttggagttcatcaggcgagtcttcagcacatccaggggctggcacaggaacgtggccacatccacctgcaataaagctggcgacaaagtgagtgaagatgttgtcagagaggtacccggtgctaaggaccagctgcttggcctggtcgtagcaggacagctggcccacagtgactaaggcccctcggctggatgccatggttgcacccgagaacagtctcctgagaccctcttcacgagctacgcggtacaggccatccagcgcatgggcgtagttgcgccgctgaccctggggcagcttcacgtcgttctgcatcctgacgttgaccaagtctgcgggcgtccccacgaagcctccagctaaaccgctgacggagcccagcaacaccttctcgtggaaggggagagggcccctggctgcccttggccacgcggtcccgcacagtctcgtagatggcgaaccgagtcagggagtaggtcatctgtctgcacagcgaggcgctcaggccgctgtagagtgccaggatgccgtcggtacgcaccacccgcagcgccatgcccgtcatgcgcagcttcacctcctgctgcgtctgcagatgcaccttgagcaggtccagcgggtgcgtgcagcaggcggccccgcaggaggccagccccccgaagtaccagcgcgacacgcgcgcctcggctgccatggcccaggagagcccaatcccggcccgaccacaa

SEQ ID NO: 322484 - DNA, 649 bp, Homo Sapiens
gagccaacaggggcccggaccatccttcttgacacaccactggtgtgggagccagggatgaaccagagacagccgttctccagcgtggcatcctccactgcgatccacacgcccagcacccggcccaggggctccgtgtacaggaaggaggcgtcctgatgaggggagacttcaccgccaaagtgaggttgcttaaagatgtacatgctctgcaccaccacgggcatctggaggcccagacttctggccaaggtctgcaccttgaaaggagtgtgtgatgctcttgaaagacggggtcgtgggcgtgcagagcgtggccaattttgttgatggatttctccggagggaccaggaaatttcctttctcatcaaaaacgcctttctcaaagaagaatcgaatcttgtcaccactgctcaagaaatagtctgtgctgccctgggctcgaagctgctcctcttcctgggtggagaattctgtgcggcagtggagaggaacatccatttcagccactatctcgccaatcctttgttgcatggccacacactcttccgcagacaagaatccttccagcacccaggaatccatcctgttggaacttctggagctgcgaggggctcaggcaaggccatggagacgctcagggcactg

SEQ ID NO: 322485 - DNA, 814 bp, Homo Sapiens
  misc_feature (22)..(22): n is a, c, g, or t
cttggctctgcttttgctaggnaccctgcccctgggccgatggaagctcgtaccagtgtagatgccccaggaggttgtagaccagctgctgggagggcctctgggtgctgttggtggttgtggtggccatcaggcagtcactggccccacaggacgtgagctgctcttctggaagggtctcttggctgggagtctggccaaataccagcgatgagatcaagttgccccacacaccggatgactggaatatgaggaagaagatgccaaaatactggttcaccatgtctttgccacgctttcccgctttctctgcatgtgtgtttcccgtgatcgtgaggtatgtgcactgtgcagaccacagcggggcggccccgagtcccagcagtatggaggtggggatcaaagtgtaccagctggcgaagaagttgcccacggagaaggccacgtagccacacatggagaggatgatggtccccttgcagcccagcctctcgatgaggagcggtgggaggaacatggaggacaggagcatgcctccatagagggtgctgagcgctgtgacacccaggccctcctcgctgtacagtgtgctctgcaggctctgcagacctccataggctgtaaagagaagcaggaacccaaaggaaaccacaaggacgttccttagacttctgtccattgtgctggatgaaaagatcaatcaccagtgaacccgtaaatttgtagctccctaaaagaaaccaattgaggcatgggaaaaacaatcagtaccaagaagtcccattctctctctcatctgagctagaggtgaaat

SEQ ID NO: 322486 - DNA, 1018 bp, Homo Sapiens
gaatagaacctaatctactttcgcttccatccacttacgatcattttcaatacctcttctttacccctgagatcctttctcgcaaaccccattctttttttccccacaacccactttaatctccccgccacctgtcccgctttcacgcacacctttaaaccctggagcgtcaaggcccgttcccctaatttagcatattatttttcaccgcacagttaatacccaatttggataaatttcaacactttcctgacccatcccaccgccgacctgatattcgtcttcccccaaaatgttcaagctttgatgatgggaattgtctggatgtatgaaggcaatgttgtggtacgttcctattccaagctcatccaggttctgcttcatgaaggcaggctttggcatatcagacataaaaagctggaggaacttgaggattcttttgtgggtaagtatataaagtgcattcccactgatagggtcacataacgggcaatctgtggattttattctttgatcaaggacgtatacagcatcgaagaggcttgcatctggagatatattcactaaaggcttaaatgtttcttgtaaataaagctccctccatgtttcaattttatgttcctctaacttcataaatctgtaccataggtgatttatagtatctatgtagtatatttatgaaatctgtaattgttagcattcctaccaaactttgttttttactctcccacacgtggcgctgctccgacaccgttggctaccaaagcaaagaaggcctttttaacttgtaatgtagtatcaaagacacaagctttgaactggttggaacgatgtcataacacttgtgtgacctcatgaatcgcatgtcaacaccactttctgagtcttctactgcttcgtcctcgaactccagcttctccacgcatgccggcttccgcggtcccagggccgccgccagcgccgcccgacgcgtgggtcgacgatatcccggacttccggagcggtaccagcccttgcc

SEQ ID NO: 322487 - DNA, 913 bp, Homo Sapiens
cgtaattggcccacaggcccactggtggccctccccggctacacacacgcctgttccattccaggccagtcatcagcccaaggtagcacatgactgactggcaagtacaaactcaacgcttgggaaaccagggtggtaagatgccggtggctgacgagcactcccgagttttggcaggatgctggtcccattatgctggtggagaagctgatctccacccgtatcttttctcagcccgattcgatgattggatcccactcattcctttgaagttccactaatgtctcgggctcctccaccctgtagcagatggtgtcggtgtccagaaacttcacggctgcccggatcagctgatccttgtttctctgggttgggttgtccaatgatgtgttgcacaatgtggtcaggtgcatggtgtagtacttgatggtatcctgctgggaatcccactcagtagccactgcaattgccagggcctcgctggggacggtaaagagcttggcttggggagttttcagcttcctgtggtccaggtttatctcaaagccaccttcaccctgtgtgatgctgacattctgataaaacctcttcctttctgtcggcggggcgtaagcccgggctggagacgggatggttggccccggactcatagaagcgctggggccacccgccggccgattcaggagacggcgtcccccgtcccgcagccggaggcagctcctccacatcgcgcccgagggtctgggaagatgcgagacgcgaaacctggagcaggaaacacagagcgatgggatccccaaagccgcacggtcgggctgtacggaaacctctcaacgcctcctcagagccctcaacctccctggacgccgccgacgcgtgggtcgacgatatcccggaattccggaccgtaccc

SEQ ID NO: 322488 - DNA, 512 bp, Homo Sapiens
  misc_feature (347)..(347): n is a, c, g, or t
  misc_feature (380)..(380): n is a, c, g, or t
cagtgtgcaacgttttcatttaatttttaaataatttatatccctctgaaacaaaaccctgaggctcaggtacatcatctgaggttctcttaaatagaagagttggtacaggacaccggagaaggccgggacggctctggatcggtaagtgctgaagatgctgaggctgtggggcagctttcccgggacaaccacgtgggagagccggctcacctggtccccacggtgaggcgcaacaaggaggggctggcacaggccaggcacctttataagccagaagagaggtgcacaggccagaaagaggtgccccccagactcacaggagcccccgtggtgaaggaaggatngggggaacactgcagttcaccagcagacagaanggacaagtggccccagcatctggccacatgggaacgtgcaagccaaacgccactccctgctccctgcctgagcaccattcgcagtcttgtttcctgtttcctctcagcaccctcatcctaacgggctgagct

SEQ ID NO: 322489 - DNA, 1294 bp, Homo Sapiens
agaacaaccctgggaggccctctcttgtcccaatttcccttctgggttatcaataagatcctcaatgactttggggatgaagccagccgaattcattgttgttgacaccaacaatgctagggacaggctgaaagtcggcagaggccagcagctcctgggggtgcctgggcaggaagaccccatccaccactccggggatcatcttgaaaggcttgttaattgcaagaatctcctctttactcttgccccgcaggcaacccaccagggcctcagagtcaacttggtcacaggcagacaggttggccaccaccgtggagatgacaatcagctgagctggcaatgaggccgggcaaggagggccacgccactctccatgatgggtccgtggaagagtccttgggatatgggggacacaacaagcgaaggacacactcgtgccccccgcagactcgccaaaaatggtgacccggtcagggttgcctccaaagtgggcgatattctgctggacccagcgtagtgcagccacttggtccaggtagccccagtgcccggttgcgtgcttgtctccagtgctgaagaagccccaggacacacccaggccggttactggatgatgaccaccacccacgttctccaaggcagccagcatggaaccatcatacaaggaagccatgccaaaaacaagcgcaccaccgtggatccacaccatcaccggcaggttagagccttcatggctatgggccggcgtgtagatgctgaggtacaggcagtcctcagacatggagtcggaagggaaggtcatgttgaactggctaagaaactctgactccactgcggtgaggtcctgtagacacatggccggatgggtggttccatccctcacaccactccaagattcagggggctcagggggtgcaaatcgcagcggacctagaggtggcttggcaaatggaattcccaggaaggtttggaccccggcattggcgcccttcacatggacaagactccccagcacctgccccgtgtgtgtggtccggatgggactggctgagtcctggccctggccccggacaagaagcagcagaagcccacaggccaccgcgctcagccgcgcacgaagtctgtgcagccgcatggtcggctcgctggtctcggttcgctgccggcggacacgctgctgttcacccagaggctgccccgggtctgtccagcagtggatcagtgccttgcccagccttggagtttggactgggcagggagtcagcggggcctcgtgccgaattcgccacccagc

SEQ ID NO: 322490 - DNA, 898 bp, Homo Sapiens
  misc_feature (26)..(26): n is a, c, g, or t
  misc_feature (34)..(34): n is a, c, g, or t
tctatttaaggttttgatacggaggncgttgcgncggagcgaatgcagggcaaccacgcaaccagccccctgagccaaggccccgatgttatacacaggatccgttcccccctctctgagtactgaatgcccacagaaccgtggggaccacgggggcagccacagccaggagatccaccaggaagctgctgctccagtactgcctcacgacgcccccgcgagccagtgggatgacaccatccaacctctcttccacgcaggctgcaaaatccagctctctcatgaggcggtttgcatgaacttctgcatccacattggcgtagggggtctccacgggagacaaaaggatggctgagtttggatcttggagttaaatcaaccactaaggcagagagggactctgggaagctctccatcgagtctggttcagactcatcaggggacgccaagctcgaagggacaggggtccctggaagcttctgcaagcacactctgaatgagctctgagatggctgggctgtagggcaccacgtcggtctgaacggctcgctccaccaccacactgccctcctcctgacccatgactatgggcagcagctcccaggacgttagccccaggggtggaatgcacaagctccaggtcaccagattctgtggtggtggctgtcactatctcatcgaacaaatctgtgctgttggctatgctatctcctaccagtagctccctgtcagccccttcccccgtgacctgctcttccagagataacccatctgccattgtgtcaagaggggggttgagggttaagctcttctctggggaatcacatggaaagtctaggcacagttcgtccctcagagagccactgtgtgccatctccatgctctgaaggagagactc

SEQ ID NO: 322491 - DNA, 911 bp, Homo Sapiens
  misc_feature (751)..(751): n is a, c, g, or t
  misc_feature (759)..(759): n is a, c, g, or t
  misc_feature (798)..(798): n is a, c, g, or t
  misc_feature (804)..(804): n is a, c, g, or t
  misc_feature (817)..(817): n is a, c, g, or t
  misc_feature (824)..(824): n is a, c, g, or t
  misc_feature (833)..(833): n is a, c, g, or t
  misc_feature (838)..(838): n is a, c, g, or t
  misc_feature (864)..(864): n is a, c, g, or t
  misc_feature (884)..(884): n is a, c, g, or t
cagtgcaggatttcttggcatttcttgcttgtatcaatcctgatgatagccatcctgaacagatgcttctggtctgttttcctggaatagcagacatccttttgaacactaatgatgccaggaagagagtaaggctagaggaggagactcattttaaccccagtccagtggcttgtccgacaacaggccatttccctttacattcctccacagacagaaatggctattaaaaatgttttaacctcatgtatgaactgaatttaaaaaaccactaaagtgatactttatacttctgttttactccctagtgggttttctttaatttggatttttgttgggatgtagcttttcctagactgtatttctgtagctctttttctctggtgtattcatggaaagcatctactgccgcacgacactagtactgtgccttctttcactgccctctgctctgcagctctcacccagcttggctgcttcaagtctgtgcagttgacttggctgtactgaaaagtgaacagcatggattaactcatcctgctgctgagggcagtgcaaacaggtgcttattagaggtagtgacttgcttaattagtgacactcttaatttctactatggataatttcaaagtagaatcactctatgcttagagttttggcaccaatgctgtagggcagcagaatctattctcagtaaaataacttatggtttattagatattctgtattgggattttaccagcttgacttnttactgcncagatgctttgtttccccccctttagacgctgttaattnctcttngggaagagttacnattcttnagggtttgnacagntacccacctttagttgtaaattgggntagttttatatttccggggnctttttaaatgaaaatgtgggatgtta

SEQ ID NO: 322492 - DNA, 1018 bp, Homo Sapiens
  misc_feature (81)..(81): n is a, c, g, or t
  misc_feature (172)..(354): n is a, c, g, or t
  misc_feature (736)..(736): n is a, c, g, or t
ctcactggactcaatgttcttgactattaattgaaagaactggtatagatcagttggttttcaattctggttgtactttcntagggcatataaaagataacaaaagataacaacgctcagccatatttacccagaccaattaagccaagtctctggaggatatgttctagcnnnnnnnnnnnnnnnnnnnnnnnnnnnnnnnnnnnnnnnnnnnnnnnnnnnnnnnnnnnnnnnnnnnnnnnnnnnnnnnnnnnnnnnnnnnnnnnnnnnnnnnnnnnnnnnnnnnnnnnnnnnnnnnnnnnnnnnnnnnnnnnnnnnnnnnnnnnnnnnnnnnnnnnnnnnnnnnnnnnnnnngactaggcatatgtgtaagagtgactgtgcgtgtgagtgtgtgtccccaggtgaattctaatcacaaaactactgtatagaaaatatcaataaggttctaagttttaggatactgagattttaatataataagagttgttaaacatcaagatgatttatagaaaggagacctatggacaaatatcaacttattggtcaataaaacttgttccttaaagtcttttacagtattttttgaaaattaacttttttttaactgcatatatgggtcttcacttcatttttcagtaaagacaacttatttggatatcagtgtctcatcacttgataagaccagtggaggatttggatagtagccagctgtttttgaattgcttgaagnggaatcttgtaaatttgtaggtccagagggtaattctgcggattgcttcaatacttggaattgcaatagtgctgtaagtactgattctcttacaagaccatgtataaaccaaggagtcttctgtattttccagtcccaaaactgaatcaataaaaaaagagccccattttttagatgaagtatttaaaggttttgcttttggtccctcatattttcctttcttctctagaggctctgactcctcaggcctctgactcctcgtgccttcatcccctctgagtt

SEQ ID NO: 322493 - DNA, 448 bp, Homo Sapiens
  misc_feature (15)..(15): n is a, c, g, or t
  misc_feature (44)..(44): n is a, c, g, or t
  misc_feature (85)..(85): n is a, c, g, or t
acacgcacagtcacnccttacacatatgccctagtcccagtggntcctcaaagtgtgatcccatagacctaatagcatagcattnccctgagaacttgataatgcatatttgcaggccccacgcaaaacctgctgaatcagaagctctgagagtaaggcctaccaatctggtttaacaagcccgtcaggtgattctgatttacagtacagtttgagacccactggctagaacatatcctccagagacttggcttaattggtctgggtaaatatggctgagcgttgttatcttttgttatcttttatatgccctaggaaagtacaaccagaattgaaaaccaactgatctataccagttctttcaattaatagtcaagaacattgagtccagtgagattaagtgatttttgcaggctatgaggttttatgctattcctgtgttctccaa

SEQ ID NO: 322494 - DNA, 1090 bp, Homo Sapiens
  misc_feature (60)..(60): n is a, c, g, or t
  misc_feature (104)..(201): n is a, c, g, or t
  misc_feature (313)..(328): n is a, c, g, or t
cgcggcccccgcaagagggatagaaattttttttaatatcccgcgcggggcgagggcccnaaccgtttttttgctgtgttccttaaaaaagggtgtttaagaannnnnnnnnnnnnnnnnnnnnnnnnnnnnnnnnnnnnnnnnnnnnnnnnnnnnnnnnnnnnnnnnnnnnnnnnnnnnnnnnnnnnnnnnnnnnnnnnnactgtttcaatgctttattaacagttggaaacaaaaccaacaaactggaggtgatgacatcccagaagcctatgaggcaagggaaataggtttgcattttgtccctcacacnnnnnnnnnnnnnnnnttttttttattaaatgcatcttagcaaaagtagattaaaaaagaaagggtcaaagccccagatgtcagcgagcagggaggaggtgacccaggggagcaacagacgccctgcatcagagtcctcccaggaatagtccaaaggagctgctcttgcccctttatacacaagcgccagcaaccaaaaccctccctcctggcaataaggcctcactatagttgccctcatgcttcctaagctctctcttgctctaataactctaattctgggccaagcccaagagtgccattctttcttcctagctggggatggaaagctgagaggggcacaaggagggcaaaagtatcaccctaagccagagaattgcagcttcctgtggttggggccaccaaacagttcgagtgtgcccacccacttctcttttagaagagagctggggtacagtgtatgaaggcactcctggtgcccagttccccagaatgtccagttagcatctgcacatttggcttgatacatttatacatttataaaaaactctgtggtcttagagttcctgctactcttaggcctggcccagctcaaccagagaaggggttcctcctgtgtcggattccctgggagagaggatctgccttggactcaagggtccagaaggtccaggggcatattcaggattgggcctgtgagaagaaatcccagaactctgtaacctgccaccaaagcttcttacattatggaggggaaagggggaaggaacagtttttt

SEQ ID NO: 322495 - DNA, 1488 bp, Homo Sapiens
  misc_feature (46)..(63): n is a, c, g, or t
ggcctgggtggcgaattcggcacgagggagagaactagtctcgagnnnnnnnnnnnnnnnnnnactgcaacttttgtagaattttatttgtgctacaagacacgttgcataggaaactatttaaagcccctgaggaaaaaatatccatggtttaaggtgcaactggttttgtttcttctttggggaaaaggtgatagatggtctctgggagaaattatggggtggagttgagaagcacaatcgaaggttatatggtgggatgattggcgaattgtgtgtcctggttcttgcaggcataaaataggttaatgtttgttcttttttttcagtccgttggtcttcagtatctgaataagtagctatacaacgtttcaggccagtaagggagtatacattgattatactaaggaagtaacatgtttcaagaaagcagttttagagaatgagattcgggatcccaaatggtccctgacaactgcaggcacacaggaagtgtcctggcacgttgctaaggatcacctcactctactgatttgccagtatcagtccttcctcctgctcccttccaacacgcgacatctacgacgcattgtgagattcacacagcatgtctgcaccctaaagttattaatgcaacactgtgtcaagttcctgattttatgtgagtcacattttcatttttacaaaatgctcatcttgctcagatgatctttacattgtacaaaaaatggtttcatctaaactatgacttccttccgaggagacaccggtacaccaggaaggaagaggggttaagccttagatgaaatgaaatgcagagtttggcaaatggcagctggcacctctgcacatcagcataaggcgttgcttgtgaggccaaccccagcatctgcaataagcacgagagtcagtggccaccaaggctctgattcggtcatgaagttttcttcctgtccacagaagaggcagcaaactctatgggaagcactgctttgacctcaaggaaaaaacagtacaatggcctcgcagcagcagggaccacctcactctcaaatggcattgttcttgtcaatgactaattgcacactggcaggggccctaaagactgtcaactcatggctgctttctaatctattggcagacacagctcagggcacctaaatgctaatgcgggacctcactctgcccactgaagctcaccaaagattcacatattctatggatggtcatttactacgagtgaggcaaagcacggaagacaatcaaatccgaggagggagcaggacctggggccttctcagaaagaatgagctgtacccgtttactgaaaagccactttttcccacgtgattcaccttcttacacgcagggagtgaaagaggtccaacaaccgaacgagcatctttccgggctgagtgttgaaatgcaaagtgtggccgggaatcagaaacgctcccagtgacctttaaatacctatatacatctcta

SEQ ID NO: 322496 - DNA, 997 bp, Homo Sapiens
aataaaggtaggcctattccccacctttttccggcgcccagttaagggggagttattccattggttttttccttaaggggaagttacccagttttccaagaaaaccagttttttagagaatggagattcggggatccccaaaatggttccgtgacaactgccaggccacacagggaagtgtcttggccacgttgctaaggatcccctcactctactgatttgccagtatcagtccttcctcctgctcccttccaacacgcgacatttacgacgcattgtgagattcacacagcatgtctgcaccctaaagttattaatgcaacactgtgtcaagttcctgattttatgtgagtcacattttcatttttacaaaatgctcatcttgctcagatgatctttacattgtacaaaaaatggtttcatctaaactatgacttccttccgaggagacacaggtacaccaggaaggaagaggggttaagccttagatgaaatgaaatgcagagtttggcaaatggcagctggcacctctgcacatcagcataaggcgttgcttgtgaggccaaccacagcatctgcaataagcacgagagtcagtggccaccaaggctctgattcggtcatgaagttttcttcctgtccacagaagaggcagcaaactctatgggaagcactgctttgacctcaaggaaaaaacagtacaatggcctcgtagcagcagggaccacctcactctcaaatggcattgttcttgtcaatgactaattgcacactggcaggggccctaaagactgtcaactcatggctgctttctaatctattggcagaaacagctcagggcacctaaatgctaatgcgggacttcactctgcccactgaagctcaccaaagattcacatattctatggatggtcatttactacgagtgaggcaaagcacggaagacaatcaaatcccctcgtgccgaattcgccacccaggcctcgctacctagacc

SEQ ID NO: 322497 - DNA, 445 bp, Homo Sapiens
  misc_feature (35)..(35): n is a, c, g, or t
gggacccatttggggatcccggaatcctcattccncctaaaactggctttccttggaaacatggttactttcccttaggtataatcaatggtatacttcccttactgggcctgaaaacgttgtatagcctacttattcagatactgaagaccaagggactgaaaaaaagaacaaacattagcctattttatgctgcaagaacccaggacacacaattcgccaatcatcccaccatataaccttcgattgtgcttctcaactccaccccataatttctcccagagaccatctatcaccttttccccaaagaagaaacaaaaccagttgcaccttaaaccatggatattttttcctcaggggctttaaatagtttcctatgcaacgtgtcttgtagcacaaataaaattctacaaaagttgcagtaaatttcatttggatatttctt

SEQ ID NO: 322498 - DNA, 1723 bp, Homo Sapiens
  misc_feature (745)..(799): n is a, c, g, or t
cggacgcgtgggcggacgcgtgggttgactcttcccttccaatgtaatctctgccaacaccatgaggcttaaggtgctctaagtcatgagtgttttggtctcaaatgctgcagttttaataatctgtgactcctgagagcccatggttttttgaccttgtggttctaaaattccttgtctgacccctgtagatcttttccttgccatgtcacctcccttggcctttgatcctggaaaggtggcagagcctccactgagccaggcccagagctccttgcagtgccttcttccttgtttacctgtgggaggaaacactttttttgtcaggggcagcctggttcagagctcagaggtcacactgtatcaaagatctcaaacagcaaagtcagcatttgctgtatagagctgccacccaactctaagcaggagaaactgtacagaaagggctttgctatttttcccttttgggaaaacaatgaagtgttttaagtcctgggtggactgagagatggtttgcctgtccagacttgctctcaagcctcatccagagaaggagctgcagatgagggagcccgtacactccctgccaccactaggttgtaagcctgtagctggctggctgatttcattttggaattcatttgccatccacagccttacactaggcacacactttagagtctggggctccagtggggcccggcctaattttttttccccccaagacagggccttgctctgtctnnnnnnnnnnnnnnnnnnnnnnnnnnnnnnnnnnnnnnnnnnnnnnnnnnnnnnngctcaagcgatccttctgcctcagcctctctggtagctgagactgcatgcccagctccaaatcaccttgattcatatcagcagtaataatcacttgtgttctgaaagaaagggcaccagaagttctagcaaaattcagttgtgttctgtgagctagcactttttcctctgacccaattttcttacctataaaatggtgataaaaaccgacaggttgttcaaaggcccagatcagctaaagcatgtatataagagcacgttgtaaacttggaagagacaaaggcacaaatgtggctgttgattaatttgactgcttctcgttgctcgtcacctccatgccaggcactgtgcttgctaattgctttatgggggcattctcttatttattccccagccctgggaaataggagctgtcattatccttctctttctgcacaaggaaaaattaatgccctgagaattgtcataattttcccaaggctgcccagctggtggtgttaagccagaatttgacctcccagagccagtttccattagctgccatgctctgctgcctctaattcacagaatgcactttctaccctgtgtgccatggagacctcctatggaaaaatgatcagccaccttaccttctactgggtacctgctgtgagtctgcctatgccagaaggattaaggaggggaggttacccaagaaacaaagcctacatgccgcttacagcccccgttggatggttgctcagtacaacagtcttgcattcagcaggtgtttgttcatcacctactatgtgtcaagctctatgctaggtactggggatacaggagagaatcaagcgtaaagtctttgttctcaaggaatttgcattctagaaagtagaagatgtaataaatgtactgtgggacatgttaataagtgctataaaga

SEQ ID NO: 322499 - DNA, 411 bp, Homo Sapiens
gaaagccaagcccaagaaatgtgcccggcgtttcaccgactactgtgacctgaacaaagacaaggtcatttcactgcctgagctgaagggctgcctgggtgttagcaaagaaggacgcctcgtctaaggagcagaaaacccaagggcaggtggagagtccagggaggcaggatggatcaccagacacctaaccttcagcgttgcccatggccctgccacatcccgtgtaacataagtggtgcccaccatgtttgcacttttagtaactcttacttgcgtgttttgtttttggtttcattttaaaacaccaatatctaataccacagtgggaaaaggaaagggaagaaagactttattctctctcttattataagtttttggatctgctactgacaacttttagagggtttt

SEQ ID NO: 322500 - DNA, 778 bp, Homo Sapiens
  misc_feature (573)..(573): n is a, c, g, or t
  misc_feature (608)..(608): n is a, c, g, or t
  misc_feature (643)..(643): n is a, c, g, or t
  misc_feature (649)..(649): n is a, c, g, or t
  misc_feature (717)..(717): n is a, c, g, or t
gggtcttttctgtgaattatgactattcatttgttaaaaatacctaagagcaattatagtgggacatctaaggtcctctgtaaacagtgaattagcaaacctcagcctatgtgtttctaccctgatttttttcttttcatgggtatctgaagcctctaagttttttcaaaaatggagtatcacaaaattgagtgaaacacaatacttaatgtattgtactagattgccaaattcataaaatgttaatggaagctttttgatgtgattataatggcactattctggtcattatcctattttgattttatttaattttttaaagttgaagaattaaatattttaatggttctaatcttttgcattccatgttgcattaaacctgtttatatgagtagtcttctgttagaatcacatctgtgcttttcttgagtctgctgttgaactattagattaagtcataattcataaaattttagtttaatgtgctctttgtaaaatgaaattgtaaaggaaaataccagtgtttctcatccccattgacctcacaccacggtcatctggggattttggggnattccctcccatgcaggccagcctatagggtgggngtttcccaaaacaacagggaatcccttcacccatngggggnggcacctactttccctgccttatagggccctatacaggcggggacctgatcctggtccctcggggggnacggggcaacaaggctaggggtctgggccttttcagggaggggcccctccacccttgacaa

SEQ ID NO: 322501 - DNA, 699 bp, Homo Sapiens
atagaaatcccacttggttttcttgtaaatcccatttggttcaaaaggagggagcaaagaatgtagacctgaagtaggagttggggcccgatgatagcatacgttgttgaaattgagtgagtgtgagacaatagcaagtggtgtgagttttgctgtgtttagagaaggtaattgttgccacctaagattataatctcagtgttgctggatcttctaaaattgttaaaagcagccaggaattcagattccttttctgtgaaatgttctaattgataaatgttggcttgaagtctaaaataatgaaattaaacaaaacataccaggctgtatttgaaccgcaagttactactttgtgagctcatctgaaatttcacctgggttcaattctaactctgcaactagtaagcactgtgaccttgctataccctccatatagccatatttttacaagatttgggggtgtcaggaattaaatatggctatatgttttatatacctatatatttctctctccagtatatagaataagacataatgccacttaaaagattgagaaacttaaatgtttatctgaggtgaaactgctaaggataggagctacctttactaaacaagtcttcttacttctaccccagtgctttttccattattagtcttatggctttcagcagaatcaccttggggttcttgttaaaaatg

SEQ ID NO: 322502 - DNA, 480 bp, Homo Sapiens
gactttatagctgttttattacctttatctcaatatcttgagacataccatagaatctatcataacctggtagcaggatccaaaaattcaatcacagaaaatgggggcaggtgccattactgtgaggccagtgaaaaacaatgttttcagctactaacccagccatgtgtgaccacggcctgggctcggcactgccctgtgtgttggccagtggcccatgatgatctagtgaggctggaaggctggatggagccaggaagcaggtgcaggctgaggtcgcggggcagagtctggtgctgggtgatggggagagagaggacgcttcggtctctgtacggggtggggagctggtaccagctgcagccgacaggtaactgtttctttcactctcctgagttcttgttcaggatgcttcagccctgaggctttgatgggtgaagaaagttcccaatggctgtgatacactcttcccacgcagaa

SEQ ID NO: 322503 - DNA, 469 bp, Homo Sapiens
gggcatcagcctgtgcgggagctggaataaaggggcccaagacctccagggccgggtgcaaggtgaaggcagagttggacctcaagtctcagctctgggaattggactcaaggtcctattttcttggaatgaaagttgaaaaaaataagagatggggattgctgtgcttcccaaactcctatctgaagctttgcacctggattggaaatcgaggcagcgtctcatggtcaaagtgacagatgctgcaggctggctgagacgatcccttctgactgtgcgatgtcaaacagcagcagcgtttcccaggatctagcgacaagtgaccacgcccattcacgtccatcttccagaatcagtgccaactcacccagctcacagggcagccagccaggccactctgtctctctcaacctcacgccccaacgcctccccacagggctgtgtgccttccctggttgttttcttgtct

SEQ ID NO: 322504 - DNA, 787 bp, Homo Sapiens
gtctagttttagtttttatttttgcaggagtctattgctaaagaattttattttgatccttgttaaatttttattttaattaataaggtagtcattcctgtagagggataagatgcttgtagagttgtgggtaccattccaaatagaactgttatgatttgggaaatattctttactacaaaggacttatttcataattacaaattttccttcatatttgcctttgtttataaaatcttcaggaatgacattctctagcaataaaaggaatgaaccgttatgtttctaagctgaaaagaggaacaggtgggtaattatcctgccatacttaaatatagtggaaaatcctctattgagaatgtggataaatgaacaattgtaagttttgcatcataaactgagaactttcttttgacaggggggaggcgggagggatagtaggtgggggtgatctgcttgcttcttttaccacaggtgatttttaagtaacttgggtttaatttacagagatgaaacatgacagtctgagtaaaatacccagtgatgtagaagtgtgcctgtttattatgtagatacagacatccagcaaaaacaggagaatcacatgctttaaagaacactttctcttaggtttccttgagatatgttcctccagtgcaagcaagataatggtttacagaatttgctttacacaaaacttgtcaagaactcatctgttaaaagcaaggaataactagtttatattttccaataatgttcaaggttttctccttaatatgtttgaaat

SEQ ID NO: 322505 - DNA, 1634 bp, Homo Sapiens
  misc_feature (61)..(61): n is a, c, g, or t
agccagcactcctggcccccattccactggacaggaaggcgtgagaactgagggacctgcntgaggcccccacagctgaggcgcagcggagccctgcctcccagcacagactaaaatcccagcaacacaggcccaccggcacctccagcctgccttgcgggatgatcttcaggcgaatatacaaaatacaaaagaaactactactgtattttgttgccctgtcccttcaacttggctccaaattgcttggctcatcatcacagtggcctccagaaggtggcgagctctgcttctcaagtttcaactgtggaaggcacatctggtcccagaggaaggatgaggggctctctggggcttgagggcagcccaccttgtgtcctcagaagcccattcgaggcttcttacggaggggctgagagctagagaggacgggtgtgtgctgctgggagcgagtggcccggacgctggaggcctgggagtggggagttgtgttggcccagcttggggtgtccctctggggtggtagcttggccatgtagtcacggagcatctgccgctgctctgatgggacgccctgggcgcatgcatccggagtcaactcctgggagggcagggtcgtggggggcaggggcagagcatcagcaggtggccactcagggctatgaggggagctggtgtcctctgagggatccacatggccactgagcgaaaagctgctggacagctgggtccggcgcttgggccgcctggtctgtctcccaggctccgaggtcctgccctgctgcctctcccaccaggcagcccctcggcctgcccaggcttcccccaggcgctcactgagcttgtcctctaggcctgactcgggtgcagggggtggctctgccgcagggagggagcccaggtctctctgcagcaggagctgccctcgggccatggccttgcggagcacacccagccgctgcccttcctcttcctccctccgcagctctgtgctgcccagcatctggcggtgggtgaaggtgggtgctgtccacacaggaggagccaggggcacttttagcagggccttcagccactggctgcagccggcagtgtcctgggaggtccaggaagctgtgggggcatggcagtcaggttgggtgtcgccaggaggcccagcatctctgcggaggctggagtccacctgggggcggagctgctggtagaagacatctcccgccgccgagagctggaagagcaccaggcctggtgtgggcgctgagggcaagggcgggacgacggcagccagacctatggtcggtgctttcaggcgctcctgcagccgccactggatcttaggctccagcagaggaaatgcagggagggagtcgatcctggaaggaagagactggggggggcctgccaggcggggcaccgacgccccttctcctgccaggtgcagcagctgcagctgcccaccctggcctccgaggagcaggggctgcacgcagctgggccggggcggaggcagcagtcgggccagcaggagcggggaggggaggccatggttccacttcagcatcggcaccaggggaaggcgctcgtccactaggtagagagagaactggggcccgagaaggaagggggatgtggcc

SEQ ID NO: 322506 - DNA, 238 bp, Homo Sapiens
gaatgaacacatgaatgtgtctaaaatatgtaaactaaggcaaatcaatggttgagggtgccacttaaaatggaactctccaaaagaggctgtattccattatcacgaggttaggagtttcatgctttacctacctagctacctcaaatcaatatgttcttaggtatttttttggggggaaaatattaattttccaaagatgatctctccagagctattgtttcttactgtgccgaat

SEQ ID NO: 322507 - DNA, 1350 bp, Homo Sapiens
  misc_feature (21)..(21): n is a, c, g, or t
  misc_feature (32)..(32): n is a, c, g, or t
  misc_feature (43)..(43): n is a, c, g, or t
  misc_feature (54)..(54): n is a, c, g, or t
  misc_feature (534)..(534): n is a, c, g, or t
  misc_feature (581)..(581): n is a, c, g, or t
tccaccttattcccagagccngccaatttaanacgacgtagtnaggagtttgtnagggagatgtttaaccataaggaattttccctattaaaatgaagatgaaaaaggggaatccctctgacttccacgattataggcatcagtgaccaaattttaacctggaaaaggcattcatggatcagttcatgctcctgggcagaattcaatattgaacatgattcctagctattgatttggtaatctgttctgcagaaatgtttgaatttctcaaactccaatcccaaagccattgcctgaagcaagcttcctatgtcagagactaagcacagatggtttccatcaacacacgtgatcattagtgctctccacaggtcacaggagagcaggactgcgctgggcccccgggaatatcgaaatgaaaatgtaggttagtgcatagttagtgctctcagtattccctggctcagtgctcctgtgccagctccagcggggggccttcacgtgtgctgcgcacttgtccggggtgggtttctntgagtaatcccgctctccaaaaaatcgtgcttcctattcggacattngtagatcctacttcaaccgcatgctggaaatccgcggacatgcccatgctcagctcaactgggtcagcagggatgttcagctttttacacagctcctcccggagggacaataacagctggaagtctggatttggtccttgactaagatcatgcccaaagcttcctatggtcatcagccccacaaactccaggttaggacacttggcgtttatgtgctccacgatggctatggtctctgaaggtggaaggccatgtttactctcttctccgctggtgttaatctggaccataacctttaacctttcaggagaaccttttctctgccaggaactgttcactttgtctgccaacttcacagaatccactgtttccagcatgaagagattggggacagccatcaatttgttgacattttgtttctgtaggtggccaatgaagtgccatttgatctcaggacacaaagacagaattttgggatttgatgctttttctagcagttcctgaacgtagttctcgccaaaagtgcgctgcccatgtccataggcctcgatcaccatgtctgcaggtttggttttgctgaccgccactagccggggctggatggctgggagatcccgcggccgccgcgccacagcctgctgcacgcgctcgttcaccgcccgcaatgcgcacccgactcccagctcggccgacatgctgccagctctccacatcccccggggaccgacgccgagccccaggcccccggcagcccgtggctcacaccatc

SEQ ID NO: 322508 - DNA, 503 bp, Homo Sapiens
  misc_feature (12)..(12): n is a, c, g, or t
  misc_feature (77)..(77): n is a, c, g, or t
  misc_feature (102)..(102): n is a, c, g, or t
  misc_feature (106)..(106): n is a, c, g, or t
  misc_feature (108)..(109): n is a, c, g, or t
gattcggcacgnggagagagctggcagcatgtcggccgagctgggagtcgggtgcgcattgcggcggtgaacgagcncgtgcagcaggctgtggcgcggcgnccgngnnatctcccagccatccagccccggctagtggcggtccagccaaaaccaaacctgcagacatggtgatcgaggcctatggacatgggcagcgcacttttggcggagaactacgttcaggaactgctagaaaaagcatcaaatcccaaaattctgtctttgtgtcctgagatcaaatggcacttcattggccacctacagaaacaaaatgtcaacaaattgatgggaaagtctgagttcttaataaaaagagaaaacatcatgccaagaacagaatgaattcaccattttctgggttatatatacttggaaacctacccaacctcatgtttattattatttggtggtctttcagaaaaattataaagaattgtagcccataaatttttttaactagc

SEQ ID NO: 322509 - DNA, 2658 bp, Homo Sapiens
  misc_feature (71)..(71): n is a, c, g, or t
  misc_feature (385)..(385): n is a, c, g, or t
  misc_feature (394)..(394): n is a, c, g, or t
  misc_feature (2236)..(2236): n is a, c, g, or t
gtacataaggggagagggtcagtcaaccatcttagatatgggaacttaaggggacttcatggccctgcggnaaaaaagctcaaatgtgtttttttgcattgggcctgcatgggacgtaagtgtttcgggagtgaggggaggccttggaagggaactgctattgctaatgatgattaagagatgacttcgtgtgggaaccaccactcaacccttgcttgtctgtacaatctatttccagcctcagcccctcagaacaaggggtggtttttatggtgtctagcctggaactctctgtcagtaaaagctggaaggggccaaaggtatctgctcagtgttcccccttgcacagccctcactgccccggagcacctcatgccttacttgnacaagctgncagtctggagttatcagaccagcctgtgtcccatccctgagggaagtacacggccgcttccaattcccactgggggcacccattttaagtccgctcagaaagaaagaaacacacagagagtatcagacaaacacaaattcttttggttttaatctttacttccaatcccaaacaatcttgtttcttttcattataaaagtactaaacaaacacggacaggagaggaaactgacatttgcaaacgatgtaccttcaacaggcatctcaacagccccatcaccaacacctgtgtgcaaggcatagccatcacgcagaaaagtctcaggactcagaactacaccataaatgcaggatctttttatttcatataaaaatgatcaatgtgaaaaaagccaaactgtatgctggttttacagactccgacccttcctgacagtcttcttgtctggccaggctggggtgccagcattcctggaagggagagacagcccagcatctcagtatttcattgggacaacaagctggatgtggcagggaaagctgagagcgccaaggtccccttgctttatcccaagctcggagggacgcagcctggcatggctctggcctagcagtccaggtgacatggccaggcaccttcctgtacaggcactgtgggctcctggcccaggctcactagaaggtcttctctgtggtgcctacctagggagctgtgatcaagccgagcagccgtgcaaggcgtttcagtctgaccttttcatcagatccccgctccagcccctcggagaaggaaacatcagtccacagtgccattgtaggatttgttgaacttgttgaaggtgaagtccacagtgtgcgtggagataggctttctgtataatggatttgaagccatttcatagcgggccctggatcgctcgctctgaaactttgcaaactccctccggtcgtggatggtgacaagcagcttccagatagccaggagtgcaagcccaacaaggaggatgctaccgaccacagcccaggaggatggtcatggcgttgggggtgtttccacactctggctccctgaggacggtcaggttggacttcccactggggagctccacataggtgaacatcatgacgcagtccttggcggttttgtagaaacatagcacagcctcctggtcatctttcacgatggtgtccacccatgtgatcacctcatccctgcataggctgtggcaggtctggttgtcaggtttcccagagtggagcagcaggcactcgacgcaatctctcttggtgctgcatgcatccgggcaggtggggcacttctcacacatctccccaaaggcccccggctccgtgcattggcactgcccacagagacagtgcccacgctcgctgcagatctggccatctctgccccggcatgtgctgatgtctgtcgagcagttacagttgtccccgatgtaacctgcatggcacttgcattccccgcagtgacactcgccatggcctgagcagaggactcccttgttcctggcacaggagaagttttcgcattcccggaaaggcccatagatctttgccaaactcgctctcgaagcaggagcactggttgcagctgcagtccccacgcccgctgcacagtggcttgccttctgcctccgggcacaggttttggtacacgctctggttctccccatccctggcactcgcacctggtgcccaggtagccggggctgcactcacacaggccgcagacataggtcccgctcccgttgcacctggcgctgttgggttccagccccacgctgcagccgcacgtgcagttgtaggtgacccccacctccnaggctgtcccggaatcccaccggccgcagggcaaacacatgctccgtgtgtctgctgggacagcttcgggcctccaatgatacttcaaaagatgccgtgtccccaatcttcagaccctcacacttcctctgaccaggataggataccccatcttggcaggtagcagtaaagaagagattaagatcctcaggctgatcccagactgacaactccactttagaccggatactattgtatgcattaataatcagttgaataatatttttggagtctccatctaaaatctccaccgttgttccaggtatcagggctgtaaaattcttgtacagcatataatggttttttgtcactgcaaagatgaggttgatgttgttctctgccaatttctctccaagcctcgtgccgaattcgccacccaggcc

SEQ ID NO: 322510 - DNA, 436 bp, Homo Sapiens
  misc_feature (425)..(425): n is a, c, g, or t
atttatcagacaaacacaaattcttttggttttaatctttacttccaatcccaaacaatcttgtttcttttcattataaaagtactaaacaaacacggacaggagaggaaactgacatttgcaaacgatgtaccttcaacaggcatctcaacagccccatcaccaacacctgtgtgcaaggcatagccattcacggcagaaaagtctcaggactcagaactacaccataaatgcaggatctttttatttcatataaaaatgatcaatgtgaaaaaagccaaactgtatgctgggttttacagactccagacccttcctgacagtcttcttgtctgggccagggctgggggggcccagcattctgggggaggggaggaggacagccccggcatctcaggtattttcattggggggccaccaggctnggatttgggcc

SEQ ID NO: 322511 - DNA, 685 bp, Homo Sapiens
taatggtatgaatctcatttattgaaaacattatttctcacctttctcaaattgaagactgcaaaaaataaaagcagtgctttattgagttgtcatgagcctcgggcgggagcagcagcactgcctctccacgctccgggaaaccgcagctggcgtgtgccacatcggtcccacctcgctttacaaaacagtcctgaagcttaatcaaataaaactattgtacacaacatttacattagaaaaagagagctgggtgtaggaaagccgggcctggtgttccctttaagcgaaggtggctccacagttggggcatcgtcgcttcctcaaggcaaaacagcaaatgaacccaaaggggaagaggatgatggccaggaagatgcccaggaaggtgaagcagtcctccagcaccccaaccctgcagacaggacagcctcctacgaccacgatagagttggcaggatagcgggtgacggtccggctgtggatgttgtagaccctgggatggtgggtgggtatccctgtgacgaggtaggggtagggcggcggcgggggcgcggcggggatggcgccgtagccgtgcgggccgcacgcgtagtcgccctggccggcctccaggttgtaggcgggcggccgctcctgcagcagcggcttgtggtccatggcggcccggccgcgcccgccgctc

SEQ ID NO: 322512 - DNA, 862 bp, Homo Sapiens
tggtacggccggaagtacgggatatcgtcgacccacgcgtgcggggacaataatgagtacattgccagacgaccagataaccaggaaggggcttttgaccccaaagaatatcctcacagtgcgaaagatgaagcacatcctgttgaatcagcgctagaggagaagcagcaggaatgatgctttgatactctggaggagaagttaactcaagatggaattcatgttctgatttgaggaatgaaaatgagatgatcaggcaggaaactgacattccaaggatctaatccaggaagtactctcagtggggaccacctgctttcatcccctgacattgtgggagaaattttgcaatgtatgctaatcaaaatgtatttatatgttctctgctgatgttttatagaggtttgtgaagaaaattcaacctcagcaacttcagaaactgcccctgatacgtgtgagagagaaataaaatcagattttgagtgttgaagggactgaggaagtgaggataaagagcatgaggacagcatggaaagaaggaggcagaagtggaactgaactttcactctccatgggacagatcaatctcattatcaagtctgaatagcaaccagccctctcctccagcccggtttctcctcagttaattggaggctcaggtcaggtgattattgagtcttgtacagcactgaaatgaactccacagatgaagaagcattgattgtattccaagattgaagcacgctcatactttgtatgtgcttagggaaagggtgggtgggcactgggcttgcgggtgcttcatgtatcgggactcttgacttatgacgagtttaaatttgaggattgcactttggaattt

SEQ ID NO: 322513 - DNA, 626 bp, Homo Sapiens
gtcaccagcataaggccttgtgctgcggaaacccagtaggctcctggaggccctggtcagcttgcttggaaatcaagcaggcagctggggctgagtgaaaacatctgcacaactgggcactggacagcttttccttctccagtgtctaccttcctcctccactcacagccatctgtataaacacaatcctttgttctcccaaatctgaatcgaattactcttttgcctcctttttaatgtcagtaaggatatgagcctttgcacaggctggctgcgtgttcttgaaataggtgttaccttctctgggccttggttttttaaaatctgtaaaattagaggattgcactagagaaacttgaatgctccattcaggcctatcattttattaagtatgattgacacagcccatgggccagaacacactctacaaaatgactaggataacagaaagaacgtgatctcctgattagagagggtggttttcctcaatggaaccaaatataaagaggacttgaacaaaaatgacagatacaaaccatttctatcctgagtagtaatctcacacttcatcctatagagttcaaccaccacagatagggattccttattctttttttaatttttaa

SEQ ID NO: 322514 - DNA, 827 bp, Homo Sapiens
  misc_feature (14)..(14): n is a, c, g, or t
  misc_feature (75)..(75): n is a, c, g, or t
  misc_feature (131)..(133): n is a, c, g, or t
  misc_feature (135)..(137): n is a, c, g, or t
  misc_feature (140)..(140): n is a, c, g, or t
  misc_feature (143)..(143): n is a, c, g, or t
  misc_feature (150)..(151): n is a, c, g, or t
  misc_feature (153)..(153): n is a, c, g, or t
gttcacggcccagnatttccctaggcaaccccgctatggcccatgttccccttcccccattggggccccgcgccncccacaggaaggttttagaacgcttctctcgagggccgaggcggcccgaccatggnnntnnnccncgnctccccnncntttttccggctgtttttctagagggtttttctcaggggcttctcttagtgctgtagctgctgcaggctgcgcagggcctccgcacatgcgcggataaggccacacagctggatgctagtctccagggaggtgctagagcccagttcagcagaggcccaggtcagcttctgcaagagggctgtctgtgtgcaggccatgacatctgtatttggaggcacagcaggagcaggtggcccctgggctgccttgagtcctgctgcagctccctcacagtgctccggacgaggtactgggggctggggcgcaggtcgagagcccagggggagctctgaggctgaggccagctggtgctcccgagcttgggagagggcagcctgggcattcagagcgggattatctttatccacgtctgagtcgagttcctgacaagccacgcagtagattttccgctgtttgtcttggaggaggatcgtcccgcagtccgcacacgtctcgcccagcatgcggtaaccgcgcagcagatagtcgcccatgagccgggagatgcgatcttgccgctcccgtcgcgcctgcagcaccttcgtctccgcctcagtcgggggctcccaggagaagtcgtcgacttcagctccgttcagggccatgttgccgttgtcaccgccgggctcacagga

SEQ ID NO: 322515 - DNA, 419 bp, Homo Sapiens
ttaattttccaactaaaaccttattaaatatttgaggttttattttttctgagtcctcaattttgattagcatttgactgaaaccaaatggaggtttcttaccactttggaagttctccaaatatgatgacagaagaaacctatcccctacagctatcctgtttcacccttaacaattattttccagggctttttcctttacagtctgcttccttcgtagaataggtgtttacagaaaggatctcaccttctaaattggctttaagaccagaaggatcctcaaaattacacagtttcagggatgctccttctgcattagaacagagcatcttgactccctggagattcgcacactgcaaagaaaagagaaaagtcctggttgtaaggttcataattttgttcaaattagctcaaacagt

SEQ ID NO: 322516 - DNA, 607 bp, Homo Sapiens
agactatttcaacgattttgccaaaattaaaaagccgtataagaaggtaagaaggtgggacctagttccctcatcaccttgacgctagggctcacctctcaccctgctcagaattcagcatccagcgagtccctccgtgagtgaacgttcacttgttgtcctatcagcccaagggaggcaataggctctgcggacgccacctccctgggacggggctctggtgagaatggccggggccctgtggcatggccctcgaggtggagggagccatggttcccggagaggcccgcgtgccccgtcttagctccttgccttccactcactccctgaggccccagggatttctttccgcttcagaccctccttcctgcaggacccaggttcctctttcctccaaagtgcctgccgcgttttccagatgctgcggtcgttatcaaaggacagcagcagccactgacacgggcctgtctgtggaccgagtgctcatgcgcggcactgcctcgcccgcgtctgtcctgctgggggccggagctggcctggtgcgggggtccaggtcaccgtcactgttcccccactgagcccccgctcctcctctgcggtgagatgc

SEQ ID NO: 322517 - DNA, 657 bp, Homo Sapiens
gatgtgcacacccagcggaaaggcccaaatccttgggagaatatgtcccccatgatgtgctgcacataggaagggtagcggaactctgtcctgccagcacctttcttctccacatccgctcctgctctctgggcctccaagaggaaggcattgccgtagtcccagaagaagaacttctcctcggccaacctgttgatggctgagacttgcctcctcaggctttcctggaccaggtccttgaacacagcagggttggaggccatgaggctctgggcctccgtgaagctgagctgcacagggtagtagccgccattgaacgggttgtggcaggatgtctgatctgaccccaggtccaccaagcactcccccgtcgtgtccaattcgtggaccaggcgctcccaaagagccaccacgttgccatggtaaccaaggctgagcacctccttttttttccttgcttccctgagcctctggatgcagcggtccaagctgtcagtcacttccgtcagccagccctgcctgtggcgtttctcaagggctgctttatccacctctgctatcacaccgatgcaccccacgatgactgcggccttggcctgagccccactcattccgccgagcccagaggtgacaaagaccttcccagccaagtcctcg

SEQ ID NO: 322518 - DNA, 603 bp, Homo Sapiens
  misc_feature (50)..(73): n is a, c, g, or t
  misc_feature (336)..(362): n is a, c, g, or t
catgtgaagctcagagaggggtaatgatttgactcacaagaccacacagnnnnnnnnnnnnnnnnnnnnnnnnaaataaggtagatctaggatgctaacccaggtgtattttatcaaaaatatcaaatcagggtctttcagccactctcacacacatacacataggcacacatacactgcagtgaatgttccactgccccaggacaaaagtgctcattttttgtggatgtactgcaaggtcactggagttctcctttctctgtccagccatatctgtggcctagagcagagggccagcaacagctggattgtgtcaagtctcgagtcagatgacannnnnnnnnnnnnnnnnnnnnnnnnnnaatcttgaaccttagttttttcttctgtccttggagattacaatattatttatctcagacagccgtttggaaaatgaaacagctgtctgagagataatagtagaacattcactaacccattcatccatccattcacccacctacctgtcgatagaagcaaccattctaataattgctgaatgtttgctatataatgagtatgacacaggagcagagatgaagagacatgaggacatcctac

SEQ ID NO: 322519 - DNA, 665 bp, Homo Sapiens
  misc_feature (542)..(555): n is a, c, g, or t
agagaagaacattcgaaatgatccgaaaatgttcaccacaaatgtcatttgttctgccagtcacaagttgtcaacacgggtgcattttgcagcaaactgtcctggctagaaattgaaaacctgcattcatttcagaggacaaataatttctccctctcccctcattggttaaaaagcataaaagatattctttttattcctgtaattttataaaacactacataaaagctggcgagttttaaagagggaaaaactccattgaaaagtataaagtctcacaagggcaaagtccatctggggcaacagttccaacatcacggacctctcaggaggagaactggtctcatgagatgctccgtacacccctacccacatacccttcctgtcaaaacttagaccaagcatgccacatctgacaagtcaacttcaaacaattcgtggtgcttttctttcaggctagaaatcatctgtagctattagaaccattcagcaaagcaatatggctttaatgggtacctatgctttgtgaagatatatttatnnnnnnnnnnnnnncgtgtgcttggggccaatcctgagaccatatacctgaggatcactgtctagcagtggctaatctttaagcggtgttaggacagacactctgggaaacacgcaggacattt

SEQ ID NO: 322520 - DNA, 1678 bp, Homo Sapiens
  misc_feature (824)..(824): n is a, c, g, or t
agtccgtaaagaagaattgtcatttggggaattttatttcaagaagagcatggggtgtatcccgacagggggcgttttgttgatgtggggaggaattcccaaagcccacttagtacaagagccagggatttctcgttagggaaaacaagcttatgacccgtggtgcaattttccttaagggggccgggggcggccaaaaggaattgttttagaaaaggtttcttaagggccgaagggcggccggacaatgtttattttgttgtggtatttgtggtgtgtacgaaacttaagtttatttccctcactttcacttaaaacttgattttataaaacacatgaaaaaacatttttaagagttctgtatcacagaacattaaacagtacaaatatccattgcttcataggttcaagttacataaattaaagtcaaataattggaaactgattcaatagggaaaactatacatgaaatgaaggtcaaaaggagctatacagcaatatttcattgtttatagattatgagttactttcaggaccttaacaaagattctgaatatttagacttcctttgttgtattttatacttaaatatctccctacctatactgagtcaaactacttgaccaaaacatctgatttaggaaagcatctagctttatagcacaagtttttccatctacagttactatcttcaaaggaatatacatcacaatgttgacaaaaaaacctcctggttccttttgaacaatgtgcaataaattcatgatgttaactccatggtaagtcaaataggtaccaaaaaaataaaaggaacaattacacancagttcagtaagtatcattttggttttctccatgtaaaaattaaccaatgaaataaaacatatcaactatagatgccctgatttcaggaaaacccacatttccaaaattacaattacattattttcctcatgtcatcttcagtcattgacaggaattttgtaggcccaccatgctatttactttgtggattgtagtagtaaatgaacgaaggcggacttcctcagaaattggtaataaactgtggtcccgactcttcccatttttcaggtacaaccaaatctttgtctgtataaatcagcagatcaaatgaacaagaaacttccaacagtggcagaaatgtcaccgtagctgtgatctgtctgatcactgaacggatttcatcctggatagctttctgagacttttctctgggtgcactgtcatcttttgcagtcttgtcacactcaatatcaaactgccatctttccaggacctcaccactttcaatatttgagataactacaaccagtttctgaactgaacacttgtataaccaatctttcagttgttccaccacattatttaggtattttatgagctcaagatcagtagttacaagcaaggtgagtccgtatttctgcactcgagtaaaggtttcagatggatatatgccacgctgatataaaatgctgttgatgccgaatgagaagaactcggccacgatttcggcgctcccgcgcagggtgattccctgctcccgggagagctgcagcgccatggccagggacacaaacaaaagcacgcgcttccactccgcggacagcaaccacagcggctccaacagcacttccccgccaagcgtttcaaaagtccc

SEQ ID NO: 322521 - DNA, 665 bp, Homo Sapiens
agaaaaattttagatgagaaaatttcattcccctaacaaatccagtgtataaaacttcaaagaaaaacaagcgacaagaaaatgtggaaaaatatcgcagaagtggttaatacctttaggggactaggatatttcttgacaagatgcttagattgaagctcacctaagggatggatgtgcggaaagcatcattttgctcttgttgcactcaacagacacacacactgtctttttgtttttacaatcaaatatatataagcagtaagttcagcttctaaatatgttagtgtacaataattgtttcacctcataattacatttgaatattcttgattaagaaaaatttagcagttttgaaaagaaggctgcatttacagtgcatagctgtaacaaaaaagaacattgttgtatagtatatacataaaataaaaatactccatttaacatctgtaaatacttaactacatcagagaatgtagcaattacactatctgaacacatctcagagagttctacccaactctcattagtaatgtaacccggtgtccgctcctcagaaagaaccgctgaacaagctgcacgcttgaccattgacaaggcttttgaaatttgcagtggaagatcaacattttggacatttacatgggtgtcaggattaaggatga

SEQ ID NO: 322522 - DNA, 427 bp, Homo Sapiens
  misc_feature (80)..(80): n is a, c, g, or t
ctgaagtttgccataaaagttgatggagattacctttgggtaagttgaatggcagaatcagtgctgaagtgttgcaatgnataagtttaggaagttatgttgtttctgagtcttgaatttagaattatctgcccccaccaacctcatccatgtactgtgtttagtaatcaccctcgcttcctgtggtactctctgcaggttttcatcatcaagtgctttccaaaacatttctaacatattctgcattgcacacagctggtttctcctttcctttcaaagacttaggccaacttgtggaaattctgtttactctgtgttgtaaattgagtttttatcatcatcttttcttctccatgctctctacacttactgggtaagtgacccagaaaaaaatgatagatatatgttaggttttagagaacccatt

SEQ ID NO: 322523 - DNA, 284 bp, Homo Sapiens
agtcatcactgactttgggtagcccaatgggtagagaaacaacattttcagataaaaatgaaaacattaggattttcttgatagaaaattataagcattagtataaattattttgagataaccttaatctaaatgttaactcattatttgctagtaagatggaagaatagctttcacaaagtcagtagaagaaacaggataagaagacagtcctactgaatactaaaaggaattacttatgaatcacagaactgttaagcaacaggggactctggttattatta

SEQ ID NO: 322524 - DNA, 424 bp, Homo Sapiens
  misc_feature (52)..(201): n is a, c, g, or t
agccaaaatcttatcaataaaaccacctctgtttagtattttgagagaattnnnnnnnnnnnnnnnnnnnnnnnnnnnnnnnnnnnnnnnnnnnnnnnnnnnnnnnnnnnnnnnnnnnnnnnnnnnnnnnnnnnnnnnnnnnnnnnnnnnnnnnnnnnnnnnnnnnnnnnnnnnnnnnnnnnnnnnnnnnnnnnnnnnnnnatcttttgtactgtatgtgggtgtaaaaaacagaagtaatcacatgtatgtacaactttgaatcctgccattttttagagataaatttaacctttgaccatatagcaacttgactcttgatgctaacaaattacctctcttctctcttttatggtgtttattttctatttccattgaacagttgtattttatttgtgtctttcactgtaaatcacctccaatc

SEQ ID NO: 322525 - DNA, 651 bp, Homo Sapiens
  misc_feature (235)..(282): n is a, c, g, or t
tgatgtaagctaggagggttgtatctttccaggaatttatccatctcgtctaggtttttctagtttatgtgcataatggtgttcatagtagccttgattgatcctctgtatttctgtgttgtcagttgtaatctcttccgtttcatttcttatttagcttatttggattttctctcttcttagttaatcttgttaatggcctatgaattttatttatcttttcaaaaaaaacagnnnnnnnnnnnnnnnnnnnnnnnnnnnnnnnnnnnnnnnnnnnnnnnnactctgatattggttcttttcttcttctgggtttgtgattcccctcttaaggagtacttctaagaagtgtgggcctcagcccagcgctttagagtccttctttagaaggtaaaaacgcagttctttaagtaattttaatgtacccccaagttagaccatactgcctgtacattttatagactcatttgttcataggaaacaccaagataatttagaaacaaagagaattactggaaattgcaaatgagtagtacccacatcaatgaggtttcatattggttccagtcacttccattctctctcacttagagatttataccttttgggtgtgtaacacataccttcctcccactgttgtccccttccttg

SEQ ID NO: 322526 - DNA, 610 bp, Homo Sapiens
taaatccaggattgtaaatttattttaattgcagtttcagaaaactaactttaatttagctggctgagaaagcaaaagagaaaaaaattaaatattaatattgaactgcatgaaaatactagatacaaaggctacacaaaacccttttatatataaacatccatgaatttgcattcattgatgcaaagacattgttgagattatttgttctgacaagttttttaaatgagaatttctcctaaaggttttgtagcttctacatgtaagggcattttggtgtttggggacagatgaaagtttcagtggtccagtagaaaggacacaccttggttcagtttgccgtcttactgttatttgcagcttggcttatcagtgttcctagttcgagatgaaataatcactgcaatgaaatgtccaagttttcccagcagggagcatttaatgaagttcttagaacaagtctgggtgatacacattcatctgtgtgagtcttgatctgtccaggttcgctgggctgtttagaatcactgggtcttcagccatttccaaaacgcagaacacagttgatattttaagccaatcaatgtattgagagttcagcgtgtgtcag

SEQ ID NO: 322527 - DNA, 543 bp, Homo Sapiens
ccgggctccagccgccagtcatagggggcggcgcgcacagtctcgtcccgcacgtagccattgttgaccaggttctgcaccagtgtgtgcaggtaccctgccagcttgctgctgtccaggtactccacagagtaggtcttgccaaagccagggacgcggatctggacaccaggggcgttggacacgagcccagagctccggttgtagacaaccctggtgttatcgatccagcagtctaccccaaggggtaggaacatgttgagatccagccagatggtgaagaagtcctctgtcttgcggtagcacatccagttcaccacatctggtttgtccagcttggcttctagctgattccccaggcagccgggcacgaggatgacgggccgtgtgtggttactgagctcagccttgggcgtggtgtgcggggggaagagcacattgaggagccagaagggggcggcaggagggagcagcagccccagcagcagcgtcacccactgccatggggagccgggcggccccattccagccctggtgcctact

SEQ ID NO: 322528 - DNA, 702 bp, Homo Sapiens
ttacggtagcaaaggaaggtctttattcaggaggcgggggctctgggctggcagtcggggatgcagggggacccgggcggtaggcacccagcaggatggcattgatgtgctccagggtcaggttgctgaagaccatgttgagatgctgtatcccgtgcaggggcagcaggtgcacaggctgtggctggcggccctgccacaggccacagagctcggtgctgcgggtcgccaccgtgtcatcaccatcctcatagagcacacccacagggtccgtgtaggggaagccgtggtcgtagatgtaggtgcggggcgtgggcaggcccagcttaaaaagacagtatacttccacaccaggtgctgggagtcctgcccaggaggtcacgtgactgcagccacatgtaccagccttcctcaaagtgcaggtctgcaaagaagcgttggaagtcacggcctgtgtagttgaagctgggtgtggaaatgaacacgtggtcctcaggccagccatgcgagagggaaacatccagggggaggtggtggttatgcgctgctcctctttcagcttgatgctggacatgatggggatgccctggttgtcacctgaggccaagaccagcatgggcttgatggagccaccccagggagccccaagagagatgaagccatcaataaagcggtccttccaggccgtggggtggcgcagca

SEQ ID NO: 322529 - DNA, 895 bp, Homo Sapiens
ttggtgtctgtttgatgtttattggtgggtgtctgatgagcgtttctcttgtccagactgtgtttctctctccagaccagctcccaggggtacagggggtggggagtaggtggtagctgtgtcagtgctgggccctgggtgccactccctgaggccaagaccagcatgggctttgatggagccaccccaggggaagccccaagagagatgaagccatcaataaagcggtccttccagggcctgggggctggcgcagcgggaaatagagcaagtttagacagccgaggctgtggccaattaggaagacaggcttcccattaggcagcgttcatctcctccaccagccctgcgagcttgcggtagtactcctcctgctggccgggctccagccgccagtcatagggggcggcgcgcacagtctcgtcccgcacgtagccattgttgaccaggttctgcaccagtgtgtgcaggtaccctgccagcttgctgctgtccaggtactccacagagtaggtcttgccaaagccagggacgcggatctggacaccaggggcgttggacacgagcccagagctccggttgtagacaaccctggtgttatcgatccagcagttctaccaaggggtaggaacatgttgagatccagccagatggtgaagaagtcctctgtcttgcggtagcacatccagttcaccacatctggtttgtcccagcttggcttctagcgaggatgacgggccgtgtgtggttactgagctcagccttgggcgtggtgtgcggggggaagagcacattgaggagccagaagggggcggcaggagggagcagcagccccagcagcagcgtcacccactgccatggggaggccgggcggccccattccagccctcgtgcc

SEQ ID NO: 322530 - DNA, 587 bp, Homo Sapiens
  misc_feature (437)..(437): n is a, c, g, or t
  misc_feature (449)..(449): n is a, c, g, or t
  misc_feature (465)..(465): n is a, c, g, or t
  misc_feature (479)..(479): n is a, c, g, or t
  misc_feature (541)..(541): n is a, c, g, or t
  misc_feature (577)..(577): n is a, c, g, or t
cattttactcttttgtccatcgtttcattggctgcacagccgcaacatttttgcttgtgttctgatgagtttcaatgtgtacagtactttctttttctttatcctttccctctaacgcttctaaatctcctgagtcacttggaagttttttctttttcatttccctgaataaaaaagacatgaaaacatttcattcttagaatttgaaattcttagtgccctaaaaaagttccatggggaaggcacatatacagtatataaatggtcatggcttctgcttcacttgataatcaccaagttagaaaatacaaagatgcttaaaatcatcatgtggggaaaaagatgcaagtttttcatctctcatgggatttatctttctttccatcatccaagctcaacatattgtcacccctgactcatcccttactcactagggnccattttgcccntgatcacccttgatgnccagggtctggggntttggaggcctttgtcccacattggattgggagggcttggggatccaataaaccacctgttnccgggttgggtgcctaatgggttaaaaatcccaggntttggtgggg

SEQ ID NO: 322531 - DNA, 694 bp, Homo Sapiens
  misc_feature (111)..(119): n is a, c, g, or t
tttatttaaaatgttacccattttcaaatttctgagccaatatcatgatttaattatagtggcttcatcgtaagttttagaatccgataaagcaagtcccacttcattagnnnnnnnnnctttatataatatgtcctagacattcattttttcatgtgaaaaaatgaaatgcagaattttaataaaattctaattatgatggctgacatcacaattaaaatcctgcatttttgtttagagggctctttaataatattaaatcttagcactcaagagtcttcgtacatcattgaaatcttttggtcttgttattggaatattcttcacgtaagtatatcatagctaactgaatttatttctaagtatttttacagttttatttcatattttgacattgtgaattggtttttttcttctcatttgtaattagctatttttgacaatatagacaacctatagatttttgtatttttatcttctgtctaatgagcttatttaatcattgaaattacagtagatttttaagaatataatattttgggttttctagatatgaaattatttcacctgaacatatagatcattttatttcctcttaatgtttatactgattactgttacattagctggatttttcaaaacaatgttgaagagtgatgacagacgtgactgtcttgttcttaattttcatgga

SEQ ID NO: 322532 - DNA, 464 bp, Homo Sapiens
acacctacgataagatgaagttgaaaggaagctcaatccaactctcagacaaaaagctttgtcagatatgccaaaatcccttttgtgagcctgtgtttgttagatacccaaatggtggtcttgtgcacacccactgtgccgccagcagacacacaaaccccagctcatccagtcctggcactcggacttgaaaagcttggcccaagggtgcgaggggaactccgagttctttctgagcctgctggacatgaagagcagatgaccaccatgctctgtgtcagccaggacgaagggagacatctgggtgccagggagccttccgtccatacgcaacaaggactcctcgctgctgaccaggctctatgaatgtacatggaaaacccctaaaaatccccaaaacagaaacatacaagagttcacctgtccaggtacatagtaatccaagacagaggtctactttgaaa

SEQ ID NO: 322533 - DNA, 1343 bp, Homo Sapiens
  misc_feature (1304)..(1304): n is a, c, g, or t
tgccttggtaaaaactgcagtgtctttggacctgagagtggctactccgtggttttgtgacctgtaagcgtggggttcaggggtgtgtggccctgcagggtcccacgcctccctgagcactgactggaagtttcactggctggtggctgtcccttctcccatcagggtccccagcaaagttaactacacagaggacccaggggaaacgagctgtgtagccactgacttgctcgcgcggccgtggcctctgaggggcactcgccggttaagacagggtgggagtagtgctttccagttcagactctaacttctcccaaagtgtcctaagaaaatactggatcggctcatagatttatgctccttatgatgccctaacttggaaggttgttctagggacaggccgggcagtgtccccacacacaccttagagttcgaaggccccaggccccgctgtcacttgcccaaaagatcccttccggcaggtaagggactaccaatgcttacgtcaaaacagcagaatcggctttgcagtgcactttggggagcagatattaacttatttttgtgttggacagtagtgaaatcttgtgatttttaatcgctttgataatacttccaaattttatgatttttctgaaggaaataatgcaaacattttaaatatgtttctccccctttccaaaaactgttaaactaatgagcaagtaacactaactttgaatgtctctacaatacccgttgataactcagtggagccaggctttggggtagcggccctgagcttgcagggtttctcgccactggggctgaccacgcccccagctgtgaccgtgggtgtggctggctctcggccctgcccagctttgttctgaggacgtggtgacttcctgaacatcagcttcaatcctccatcattaatgtgaagcaaaacacaaaaaccgccccaatccctcaggattccttggcatccgaaaccagcatctgcacctaaacccatacccacccgtgtgcgcccacagggggatgtgtccgaatgggcagcttaaaatgtggtcacctgtgggggaaactcttcaggcacctgaagtgagaacccagctgtccgtcctcaggcccgcctttcttccggcgacacccgtccatggctggctgggtccccttcgcagtgtttgtctgtcttgacatctaaaccccggcgtgtgcagtgcccatcttccagggacttaccttattttccagaatttaaacctgttttattaattcaagttaaatgcaaatgactgttcagttggccaaatatcttngatccttggagtgttggttgatggatgttagtcagtatt

SEQ ID NO: 322534 - DNA, 769 bp, Homo Sapiens
  misc_feature (674)..(674): n is a, c, g, or t
atcatcccagccttacgtccttcgttatgcagccaagttctataggagaaaaaattcctggaacaaagctctcgaacttttaaaaaaggccttggaggtgacaccaacttcttcttttctgcatcaccagatgggactttgctacagggcacaaatgatccaaatcaagaaggccacacacaacagacctaaaggaaaggataaactaaaggttgatgagctgatttcatctgctatatttcatttcaaagcagccatggaacgagactctatgtttgcatttgcctacacagacctggccaacatgtatgctgaaggaggccagtatagcaatgctgaggacattttccggaaagctcttcgtctggagaacataaccgatgatcacaaacatcagatccattaccactatggccgctttcaggaatttcaccgtaaatcagaaaatactgccatccatcattatttagaagccttaaaggtcaaagacagatcaccccttcgcaccaaactgacaagtgctctgaagaaattgtctaccaagagactttgtcacaatgctttagatgtgcagagtttaagtgccctagggtttgtttacaagctggaaggagaaaagaggcaagctgctgagtactatgagaaggcacaaaagatagatccagaaaatgcanaattcctgactgctctctgtgagctccgactttccatttaaatacatactctaggaaattagctctaagtttttcccttcattttgggttctcct

SEQ ID NO: 322535 - DNA, 723 bp, Homo Sapiens
acttctgtaaaccaatttcattaaaaattagctttggtgtaaattcaggagaaatcgccttattaattaatcaaaattatgttcacatcaacttaattttacaagtttattatagctcatacctgggaccgattaaggtgtcaacattttaaaattactcaagatattaaccagaaaagatgattatggcctttaaaactattggacaaactgatgctatttaacattgttcacagccatttaatttgaataacaaattttagattctaagtaggccataacttctttgcaaaacaattgatttataaaggtacagtttcagaaggtaacagcatgagactagtcttcctataggcacattttagtagactgctcttctcatccctggtcaaggagcttctctaactgatggttgatatttcgcagatggctttcggctcccagaagtgttcttgctttaaataacagagctggaaggctggatgaatcatacgtttcctttacgtttggttcttgagcttgaacatctgaataatcttgataaagctgttttaaattagataagaaatatgctgcattcctaagggaagactttctctctttaagttcatcatattttgtttgtagttgtttcagctgtggctctaacctaaaacaaaaataagtgacaaataataaaatgtaccagcctatcgtggtgaaactgaggttgtaagtacgctg

SEQ ID NO: 322536 - DNA, 876 bp, Homo Sapiens
agatgagactcaatagcactacaaagaaaatacccaaatttctgcaaaggcaaagtgaattaaaataattacacaactaggtgaagactgaaagggacaaatgttatttgcaattttctttttaacttgtttttaagccttacaagtgtagaaattatagctaataaacaaaaagtcacaatcttcacaaatggaactacaatagaaaaataaatcaaatgaaacacttagtaataaatgaagcctattttattacttcaagtgttaatgataaaaaaatttcagcacagctgttgcatttaaaaaagtgaaactacatactatgtttctagctcagtaaacagatgaacctgatgtctttaaatgacataacaattgagcattgtacagtacatcttatgaagacccgtaaattaaagaactactggtttaaagttagtgattatgaaacaaaaacatattcatagtttcagcttcttttttcttcctcgaccatcaggtgcgccatccattttacgtttctgtgttgaaggctttggtcctcgtttctttttctctgccttctccttttcttctagttccatgttttctctttcaatcaaagtaattaaggtattacatctcctctggagctccattgcagttctggacttaagaaaccagtcaaatctgaactgaggagagttgcgaatacactgtcgcaattcatcataaacattttctttgtcaaatccaagtttgtgaagcatacaaatcagaaaacgatcttcttcttcagtatagtttttttcctttgttagtaccatatgatattctcagctgatgaaaaggtgctttgtaccgtccaatctttgtgtcaagtgctttcttgatgcc

SEQ ID NO: 322537 - DNA, 459 bp, Homo Sapiens
  misc_feature (270)..(371): n is a, c, g, or t
  misc_feature (404)..(404): n is a, c, g, or t
  misc_feature (425)..(425): n is a, c, g, or t
tgaaatttgaaatggcagatttattaagtatttttaagccatcaagttacaaaaggctattaggggtcttaaaaagacaaagagtatacaataaaacaataagcaattacagattgttttaggttgaacaatttttgtacagttatatctatagtacattactaatttacttagcaaactttatcctgagatttgcaaatttaaaaaaatgaagaatcaaactatattttcttttctgtttttttgaaacagagtctccactctgtcatnnnnnnnnnnnnnnnnnnnnnnnnnnnnnnnnnnnnnnnnnnnnnnnnnnnnnnnnnnnnnnnnnnnnnnnnnnnnnnnnnnnnnnnnnnnnnnnnnnnnnngcatgcaccaccgtgctcggctaaattttttgnatttttagtagagatgggggnttcaccatgttagccaggctgctctttaaactcc

SEQ ID NO: 322538 - DNA, 785 bp, Homo Sapiens
ttttggaaaaggatttttattaaagagaaatctgtttggtgggtcagatatgaaatagatttacagaaactttacatcaggtgtctccaagacataaaaggccgcccaggaaaagcaacgcccccttgccaggatgccagtgggaggacggcaggatggcagcccaggccacgtggcgtggaccctgcgtaggaggctgcaggaagctccaggctgcccgacagtcacggcgttccccggaaatgggttccctaggagggagcagcaggcggcgggggttccaggcatgtctgtgctgggctcggagctcgtgcacgcacactgtcctgcttaaactcctagtccatgtctcgtgggacccccaaagccgtcccctaaggaatgtgctctggtacacaaggggaaaacacaccaacccgccccttaccgagacagcgggcgcaccagcctgggccacgtgagcctctgctgagctctttggcacagcacacctgggcctttaacacctgtcacttacaaaagtagacattcctgtagtaaaacttcttaaaaacacctatttctgcaaaataatgtgtttctgtatgtggagctctgcaaatatacatgtcctttgggaagaaagcagcgtggaccgagactgagggctggtccggggacgtccgagtgctgctggaggtcggtcaggcttcagtccctgcccgctgcccgcgctcacatgaggtcgttgagctccgcctccagcgccttggccatctcgtcggcctcggagctgctgccctcat

SEQ ID NO: 322539 - DNA, 742 bp, Homo Sapiens
gccccatttttctggcccgcggggtggccaaccaaaagccccccaagcccgggccttgaaggccacagccagaagggccaaaaggtgttttgcattctagggaccctgcagggctactccaggtccctccctgttcagtgacattcggaggtgtacgtggtctttccgggactccagatcaacgacctgcagacttcggagcctcgccccatggaggactccgggtgccaatgtggagaagacggccaccctaggccagagactctcctctttctcatgcacagcaatggtgctgacagctttaatgacatcactgtcctctgcaacctgccacacctgcagataacaacctggaaggccactggtaaccagcaatctggtatgtggcacatgctttagatcaaagatagacctgtctgaaaatcctccatggcgcactttgaaatctctttctgggaataagcccttgttttcctttacagaaagtctgagaggtaatttcagatgaagaatttcattctttttcaggctttcatagccagcaacaaagactcctttgtcatcaatccattcaaggactcgagtggctcctgacaggtcgaatgcatagaaatcctggtacgatttacaagcgcaaggattccaccagccagtcgtccccaggatccatggcaacgaccgcttccggcgtctcacttccgcctgcgagccttcgggggccgcgcggctctcgcgagatccc

SEQ ID NO: 322540 - DNA, 595 bp, Homo Sapiens
  misc_feature (165)..(194): n is a, c, g, or t
  misc_feature (513)..(521): n is a, c, g, or t
gataaaagttcagttcttaaaatgagtttttatgagataacagtcagtgatcttggtgttaccgggattccacatggggcagtgggaaagagttcaggttttgaaggtaacctagtttagatttgaattccagctatgtgacattgggtaaattagtagtagtcnnnnnnnnnnnnnnnnnnnnnnnnnnnnnnactggcgaaaatacttcacaagctcattttgagcactttaggaagtaagtgaaagtacctaaaatagcaggcacccaattgatgattttatatcttccttctttgcttgcagtgatttcaggatgtcctcatatctatttataggtctaaaattatatcttaaggtatgttgtagaataaattaaaaggataatctaaatcaccatttagattaagcttgacttgcaaactaggaagaagcacctaggctttctttgaaaatatttttttggttcgttttggtaaagctctataaattggtatctattattttaccaannnnnnnnnagtattaagtccatttagaactaaccatattatttatggaataattagcatgaggaaggtataattgcattttt

SEQ ID NO: 322541 - DNA, 946 bp, Homo Sapiens
gtgtgtttgtttactgttccgccgcaaaaaatttatattttttgtttctttcccccaaattccccaggtttttcaaacgggattttttccaaaaaagggatatttaaacccggccctatccatgaaattattttccaggatggaccccaccaacccaatttcccaaggaaacaaattcctgcaaaagtaacaaattggttgcttatccatgtccactcaactgtacaaggtttatttctaggacaatttcccagttctctgggaaggaagttctgtggatttataccttccataagggtcaagcaaacatgctaagagctgataccatcatgtttttatactaacagccgagaaaggcttttaaagaacactctctttcaggccaatgttacagcattagtgggctcatagacaggatgtgacttcatcaaaggaaatgcttctctcctcttggtctccctaaggtcctcctcctagtacacaggaggagttccccataataacaccctggttccaacagatggtgtgtagattatcaacacacaatgagaaaaagaaactgacccccttacctaccaaatacaatacagatctggggaggcagtttccagatcttcaacaggcagacactatgtggcctgtatttagtacacagcacattctcttaagagaaaacaggaatgaacattctcagaaacattcacattgctcatcaaatgtagctttacccaaagtatataggaaatggcaaaaacctaacctagctggacattttatacaagtaagtcaaagttcaaaggaatcatcctatctttattctcagaaatccaatgttgaatatcacagttcttctttaatggaagcagaagattcagagtccttgtctcccaaaatgcctcagccagggtcagcacagagagtggaatataaaaagcttaattgtgga

SEQ ID NO: 322542 - DNA, 843 bp, Homo Sapiens
  misc_feature (71)..(144): n is a, c, g, or t
atttacatggattttcttttttaatagtaaagcatcatttattggtcccgttattcccgacaccaaacccnnnnnnnnnnnnnnnnnnnnnnnnnnnnnnnnnnnnnnnnnnnnnnnnnnnnnnnnnnnnnnnnnnnnnnnnnnctatctgtctccaaagcccaggtgtggcccttctgcttggagctcaggctctgtgatgggagtctctggtctgccccactggaggaggcaggagaggcagggactggggaggatggaaggctcacccgcacagccagtgcgaagatgcagcgtcggcagaaccaaggtgtgagcaggggctggtcagcactgcccgctatggggatgtggcactgctggtggtaacccaggccacacttcccgcagatgaggatctcattcagcggccctgatgtcttccctaggcagatgttgcacttgggctcctctcctggaacaccggcatgctgtatgtccttccataggacccagtatttggaattatcttcgaaagtcacgaggcagctttgcttagagctgctgaccctcttgatcttcccgaggtagtacaggccatctgtccaccggcacagcacatactggccctccgtcagtttggacatcaagtctttgaagttgttcttgaccttcgccagggcccccttgttggggaggtggctggtggcaccataggagtcccgagtccctggatccagagctcgattctccatcagcttcccctgacacgcgaggctgcgtgtccgccggtcccacttggagtctggccaccaggcgcatcggtggcggaggcggctgcgctcggcccgcggctgcccgccc

SEQ ID NO: 322543 - DNA, 390 bp, Homo Sapiens
cattgaagtctgttaaaagatatttatttttcttgtaaatatctgaagctgtagcttagtggaaattttagcaaggtaatggattttgctttaaaatgtctgccttacaaattcataacaacaagatttgtcagtcagcatttattcatgttttccctgatttttatcttctcaccattttacctcttttaacaggagcctgagcacaaggtttaatgaggaagctggggctataaatatgtgtgtatatatgtatatgtatgtttgtacaaatctccatgatgtttgccaagtttgaatgcgcaaaacttggaaaatgtgacaataaagaataaaagtagtaactcaaattagtattaagatgtgtttacatacataaattttttaaaa

SEQ ID NO: 322544 - DNA, 994 bp, Homo Sapiens
  misc_feature (184)..(303): n is a, c, g, or t
  misc_feature (317)..(435): n is a, c, g, or t
  misc_feature (449)..(502): n is a, c, g, or t
  misc_feature (913)..(913): n is a, c, g, or t
  misc_feature (937)..(937): n is a, c, g, or t
  misc_feature (944)..(944): n is a, c, g, or t
  misc_feature (960)..(960): n is a, c, g, or t
ctttattggtattacagcaaaaaattcacataagatacataaattatgatacctcaaagctagacgcaaataaaatacacctaattatacaaattctatacaattaaatcaagaacattaggaaaatttttttgcaaaaatgtcaaaaaaagatttgatctggtcgggtatagtggctcacacnnnnnnnnnnnnnnnnnnnnnnnnnnnnnnnnnnnnnnnnnnnnnnnnnnnnnnnnnnnnnnnnnnnnnnnnnnnnnnnnnnnnnnnnnnnnnnnnnnnnnnnnnnnnnnnnnnnnnnnntatggtggtgtgtnnnnnnnnnnnnnnnnnnnnnnnnnnnnnnnnnnnnnnnnnnnnnnnnnnnnnnnnnnnnnnnnnnnnnnnnnnnnnnnnnnnnnnnnnnnnnnnnnnnnnnnnnnnnnnnnnnnnnnntccatctcaagagnnnnnnnnnnnnnnnnnnnnnnnnnnnnnnnnnnnnnnnnnnnnnnnnnnnnnnctgtgacttggttaacatttatttaattttgggaacacagtaaaaaacagaaacaaaacatctatttcttcacaattgtgaaaatgtctggcttgaaacacctttgacatttatctcactttcgctctcaagtttcaggctgctgcatccatggcggctagctggcagtgatgctcttttctgctctcaaggtttctttgggcttggaatagttccacggccgtctattttctgtgaatccataaagttttctaagggccactcgagcagcctcttcttctgcaaccaatactgtttccccaggtccttctgcaatcaactttttatcacagtataagccaacaaaatacaaaggcaaagtgtggtgccaccagactggctagtaagtcttgattcaggagctgaaacatncttttcttcagtcttctaccatangccccanggattaataacttccnatctcaagagcctttccagcattggggaattaga

SEQ ID NO: 322545 - DNA, 1326 bp, Homo Sapiens
atgatgtttactttgacttcttgggcaagctgagcttcttccacagatttagttcttctttcactaactcactcttcagcaagggggaactctgatgaataagttctgtatttggtatcttgtatggtttgttactaattatttcaagtctgattgtatcagaatggcaacgtgaggcctgtatggatattcttacggttacatggtcaaacaaatggaacgtaacagattccccatctgttgtagtagaggtaattttgttttgaaatcgttgaagggatcctggtttccattcagaacagctatctgggccacatgagatgactaaaccatctttattttttagataagcagcacctttaatcccaaaccttggtataaatagaagcacaccatttgttctaattgaataaataactccgtcagatatgcaacgctcctcggtggcagggtctttgtctttgaagtacatgcactggaagagctcagtagactgcttctgagaatgctgtgctgcttggtttctgttgttgatatgtctgcataattcctcaagatcttttgttgctgaacagatttcccttaatttccattttcttatcttttgaaatggctgccattaacaagcggtgtactacaatatctgaatatcttcttattggagaagtaaagtgggtatatttatctaatgcaagaccgtaatgatggaactcctcctccgcacaggatccggtggagaagtacagagcattcgacatggcctgcgtggccatggagcgcagtagcctgttcacaatgggatcgtgggggtcgttcgcattatccagagaatcagccagtgttttattggaccgtgtatctatgaagaagcctttggctttagcacatgtcccggagttctgcaaagaagctcctggtgtggaggagggtgctggcgcagcaaggcctgatgagggaagctctcccagatctttttggcgacccagtggttggccaggatcatgcattcagccactgtctcgtggacttccagggtctgcttggggatgaggtcgtgaatgttctttttgtcatctagctgtacgcaaacctctgaccccttccagttccagggcaccacatccgtctcgtttagctctgacatggcgagctatgtcggtcagctttccaattgcccacaccaactcctccagcttggcttgtctgctcttctcatccaagtctttgaattctggaatatcatcgacagcgcttaagtttccatccagtagttcttgggctgcttcatagaacagtttgtatgctgatcgaataatggttctgccc

SEQ ID NO: 322546 - DNA, 488 bp, Homo Sapiens
aatgaggaaaagatagaaagctttactgaaatacacttaaagacataagtaaatggagacatactatttttatgaataggaagactcataaaaatatctgttttttcaaaatctacaaattccatgtaagtccaatgaaaatactaacaggctttttcctggaacctgatggttgaataaacaatttatatggaagagtaaaggaacaagaaaagttaaagtgatttttgatggataagaagagcaggaagatttgacatacaaatgggtgcaggcttattaaaaacatcagtgaacgagggcagtgtgggcaccagcacaggggatacacaaacagataaagggaggagactggagaacccagtaacagccccccacgtatgacaatatgtgacagcagtgacatcataatcagtaggggtggggtaaggatggactaatcagtcaatgatggttatttaaatagaaaaaagaattggatctttgac

SEQ ID NO: 322547 - DNA, 195 bp, Homo Sapiens
aaaaaatatgttttttaatattttatcttctctttgcatttataacataattcacttcaacaatcacagactcctttttttccaatgccacagactgttacaaatgaaagctggtactgctgcttatccaaaatatacaagacaattgatgttttatataaaaccactttataagttcatttgttcccaaaaacc

SEQ ID NO: 322548 - DNA, 558 bp, Homo Sapiens
taaaaactctactttgaacgtgatgatttttataatctttgtcagtgaacccagcagttgttgctttcagttgtcttatggattgtacatttggtaataagaaaacagtctccaaatgattaacattttcccctgattcacaatgaaccaacgggcattctgacgaagatgatccatacaccgaggggagtttaaaagacaaataagtattcagcgaattgtaggacaagggttcataaatcttttaaaactttttaaatagtgagtttctgtaacatggacttacagctccagctaggaagcaactattgccccatcttttgttcctttatattgtcaccccaattataaataatttgtttcttttagtacaggaagatataaatgcaaatgtgcaaaaaaaggaagaaggaaagatggaccaagttcacctgtttggtacgtacagggtccacagctctgcagaaaggggagaaacctggtagacagagggcctgacgcaccatagcattgagcacattttccactgcttaattatgtgtgagattttccctttta

SEQ ID NO: 322549 - DNA, 280 bp, Homo Sapiens
acttttccactgttttattacaaaaatcaaatttcatttgttacaattcagcttatttattgtaataatcaaaaaaggggtttatacaaggtatttttatacagtttataattaaagcacttattttacaaaaggagggaagtgaataagtggacaagggctgaccaaatgttggccattataacataaatacatccttgcaaagcaccatcgtaccaaagtcaatgaacaagaaacaccagttgactttaagacaatgacgaggattaaagcttaaggg

SEQ ID NO: 322550 - DNA, 927 bp, Homo Sapiens
  misc_feature (309)..(565): n is a, c, g, or t
  misc_feature (576)..(592): n is a, c, g, or t
  misc_feature (633)..(642): n is a, c, g, or t
  misc_feature (752)..(752): n is a, c, g, or t
acaaggtttttttccatgttgtgtttcagttaggcggattttaaaatattttatttttaaaaataaatgtcaatgaccaagaggggacagaaaccacccagtggttgctagggggcagggagaagagaggaacagaggaacagaggggaatgtcctgggtggcagaactgtcctatcgattggttacaaaaccatgcatttgtcaaaattcacagattagacactaaaaagggtgattttactgaatgtaaattataaactttttcatttttaaaaaagagataatgaaggccaggcatggtggctcannnnnnnnnnnnnnnnnnnnnnnnnnnnnnnnnnnnnnnnnnnnnnnnnnnnnnnnnnnnnnnnnnnnnnnnnnnnnnnnnnnnnnnnnnnnnnnnnnnnnnnnnnnnnnnnnnnnnnnnnnnnnnnnnnnnnnnnnnnnnnnnnnnnnnnnnnnnnnnnnnnnnnnnnnnnnnnnnnnnnnnnnnnnnnnnnnnnnnnnnnnnnnnnnnnnnnnnnnnnnnnnnnnnnnnnnnnnnnnnnnnnnnnnnnnnnnnnnatctgtctttnnnnnnnnnnnnnnnnngataatgaaatgagaagagccaaacatttaccctaagtggnnnnnnnnnnttgggcttatgataggttttctcttatagacagtaaaaagaagtgccaggaatttaaagcaaagaacagtaagatgagagagatctccaatatacaaaatgtttcaaaanttttttttagtacaacatgcttatacaagaggtaagacttatttttgtgtttgatttgataatttgacttggaatttttctgtgggaataaaagtgttagaatgcttatttttaaatttctcaaaatttgcaggcagtaagcaaggccctcgtgccgagaatcgccacccaggcc

SEQ ID NO: 322551 - DNA, 547 bp, Homo Sapiens
  misc_feature (331)..(440): n is a, c, g, or t
actaagtattgggtaatatataaggataacagttcaaccaatatacaaagtgcaaacataacaaaaaatccccactatctgtacagggacgcatttacgtgctccgaaaccagaaaggcttatcacggttccctgcactgggggggacacagtgttttgtctctggggacaattgccaatcccttgtgacatcttcacgcgggagtctgacggaggctgtcactgtctctccggacatcagtgcaacagtaacacggcgatttcagaaagaacctgaagtcccgtcaaacgatccagactggaggatttatttatttttttatagttgtannnnnnnnnnnnnnnnnnnnnnnnnnnnnnnnnnnnnnnnnnnnnnnnnnnnnnnnnnnnnnnnnnnnnnnnnnnnnnnnnnnnnnnnnnnnnnnnnnnnnnnnnnnnnnacattgatgagtctttaggggagggctgcagaggcttttattctaggtggttgacaaggttgcaggtgaaattcttgtcaacctacttctgcattttattaaaatcc

SEQ ID NO: 322552 - DNA, 914 bp, Homo Sapiens
ctgatataattatataaaataataagcccttagttaatattggtagtaaaatggacatggaatcagagatcataattcaaatcagttttttcaaaggaaatttccagtgataaatgctaaaactcatatgtccgtttttctcaaattgacaatgagtattaaaaaatgtacaaaaacctttataaatcagttatacagaagataaactataatttgaaaagcaaaagtatacaaccagagctacaggccttacagcttaattcatacaggtatgagtttagatagtctcaatcaatatacagacttcagatttcctgaggagactttcactaatccactaccacactcctgatttttgttcctggctgccagtgctttcaaaaaacatgaagtcaatgaggaaacaggcaccaatcattacagctttcattttaacatcaaggtctaaagggaactggattccaaagttatcagcgtctgtaaatgcctctctcaaaattccagtccagtgcttggaaattttgccaaccacacactgttcatcaagagatttaatctcaaaatcaacatctccacaacagctgcacacaacacatggaccacttatttttagtacatcctctcttttctcattttgaattgtaaactttggtagacatgggtgccaagtctgaataacataacctattggtacaccaggaggagcttggatttctatctcctgaaggcagcagggacaacaacagctgctacatcttagtggtctctccagagttatgacttcttgacccatattatcaataatcctcaaggtaaaaggtctagatggcccacagcaatttcgggtacagcaatcagtatcttccgctgcaaagtaaaccctctgtccaaagctgttcttaatttcatatttg

SEQ ID NO: 322553 - DNA, 1047 bp, Homo Sapiens
  misc_feature (128)..(138): n is a, c, g, or t
  misc_feature (156)..(164): n is a, c, g, or t
  misc_feature (296)..(305): n is a, c, g, or t
  misc_feature (368)..(490): n is a, c, g, or t
  misc_feature (496)..(501): n is a, c, g, or t
  misc_feature (507)..(516): n is a, c, g, or t
  misc_feature (518)..(623): n is a, c, g, or t
tttttccccccaggtggcaacacaaattgttggggcccccatttggcccacattttgttcaaccccacctttttccccaagggggggccaattttttctgccgccaggggtttataaaaatgttccannnnnnnnnnnataaagggtggtcccacnnnnnnnnnaaaaaataaaataaacaaattgcccccaaatccggtgtaagaaaatccccacaagaaccccccaaaaagcctccaggcgaggtttttcaaaacaatttttagagtcccgccgggattttctttttaattggnnnnnnnnnncgccctttgggccccccggggggtttttgtgtggggacctttcggggccgcctccgcggcccnnnnnnnnnnnnnnnnnnnnnnnnnnnnnnnnnnnnnnnnnnnnnnnnnnnnnnnnnnnnnnnnnnnnnnnnnnnnnnnnnnnnnnnnnnnnnnnnnnnnnnnnnnnnnnnnnnnnnnnnnnntttttnnnnnntttttnnnnnnnnnntnnnnnnnnnnnnnnnnnnnnnnnnnnnnnnnnnnnnnnnnnnnnnnnnnnnnnnnnnnnnnnnnnnnnnnnnnnnnnnnnnnnnnnnnnnnnnnnnnnnnnnnnnngtaacatcttttatttgtatacaattataaattacaaacttgttttattaggttttttaaaatttatttttcgtcaacttagtcccttttatttaccagcagtttgctctgacagaataaattacaaactattgttttgtttaatccctttaaccatcatgtcaggcacacaggttggagaatattagctcccattttatggacagagtggaaacactgtacccatatttagtgtaagacagagctgggatataagccttgggcttccatagtcacaactgcttttttgcataactttgtaatacatcattttaaagtaatctgatttcacaatgttttacagtataggagtaacatctatagcatctcttcttggcaggttacctctggagagaaccaatctaattacctcatacgctggcac

SEQ ID NO: 322554 - DNA, 739 bp, Homo Sapiens
tcggcacagcaaagcctgcaactggaagaaatacaagttcatcgtgctcaacagcctcaatcagaatgccaaaccagaggggcctgagcaggctgagctgggccgcctttccccacgagcctacacggccccacctgcctgccagccacccatggagcctgagaaccttgacctccagtccccaaccaagctgagtgccagcggggaggactccaccatcccacaagccagccggctcaataacatcgttaacaggtccatgacgggctctccccgcagcagcagtgagagccactcaccactctacatgcaccccccgaagtgcacgtcctgcggctctcagtccccacagcatgcagagatgtgcctccacaccactggccccacgttccctgaggagatgggagagacccagtctgagtactcagattctagctgtggtgagaaaccctatcgttgcaacatctgtggggcccagttcaaccggccagccaacctgaaaacccacactcgaattcactctggagagaagccctacaaatgcgaaacctgcggagccagatttgtacaggtggcccacctccgtgcccatgtgcttatccacactggtgagaagccctatccctgtgaaatctgtggcacccgtttccggcaccttcagactctgaagagccacctgcgaatccacacaggagagaaaccttaccattgtgagaagtgtaacctgcatttccgtcac

SEQ ID NO: 322555 - DNA, 1026 bp, Homo Sapiens
aaatcattcagtttaaggtcactagactttagatgagtgaccctgcaggtttataaggcattctgctcagcagtcttgtaaatagtcctatatgaaagagccatgctactgttggacttggtcccactctggtcaaccttgctaacgtcatacgtggcttatggactggatagcactggattccgccgcagccctggccatactgtgccacacgttggaagaactgtgggatgtagaatggagggactccttgtcagacagtgacagcatcatagcatatgcctgcgatttggactttctgtgtaacggctgcttaagttcctctggcacatgggaagtactaaaagaagccagctcagcttcagaatattgattatcttcccattttcctcattttgaggctatctgtgaagtgccttatatgatctagagcagaaagtccacttttatattcttcctctttatacctcactggggatgtcttgcaactcatctccagggcactggtttcttcatagtcatcctcagggtttccttcatgtaaattacttgtcactggttcctttcctgtttttccagtaatatcattgtcttcatcctcctcatctaacaacacctcatcttcaacttcttcatcatccagcaagtctgaattttgactggtcaccaaagccttttcatctttaaaatgactgccattcattctctcctccacattcctgggagattggctgccatggttgctgttcccaatgaaatttcgaatttctgtgaagtaagcgtcttctttgtcatccagaatcgcacctgtactttccagttcagaatgaggcgacgatgttgctgtaccggacatgttcccattctcatgtttctttaggtgtctgtctaaattggtttgttgaccaaaacacctatcacataagtgacacttaaatggcttctctttattgtggatgttgcgaacgtgcctttgcaagttagaagatatgctaaatgatctgtcacagtatttgcatctgtaag

SEQ ID NO: 322556 - DNA, 1005 bp, Homo Sapiens
  misc_feature (541)..(567): n is a, c, g, or t
ttgaaattcacactaaaacaaagaaaaggatcaagtggactgtcaccttaatcccaagcacctcccttttagagttattgagaaaatatctttgaaaacttggattgaaggtgaggtccaccaccgccccttgtctcccaatacaatacccttccaagacagcctgattaattaagacatctgttttaagtttaatagaagggaagttcaaaaagggaaagcactgagatttgggaaaactagcagctaaagccagaaacaaggttaaggtcctcgtggcattccggactgggagtagaatgggagaaggaagggaaacaggtggtgggttcctgctgtactttggctttacatctttcccctgccctcccatttctcccaacagcttgatgcagctattggcctgccagaggggatgtaatgcccagaccaactttttattgagcttatgcagctaacagacttgtaaacagtgccagtcgacaaagttttgctgaatattacagcttgtgcccactaaacacacctctctctgagattnnnnnnnnnnnnnnnnnnnnnnnnnnntactgagagagaatgaagagacatatcttgagtcttccagaaaggcaaaataaaaaacgccacatggcttggtcccaggcgttcaccatgcctagagtgctgctgctatcaccactgtctcccctccctgccagtggctaggtagaggtaggggagaagggtcatcttggacatgctgcaaatacagcatttgctggtgttgacaccctcctggggctgtggtggcagactgctgtgtcaggagcccatttcctgggagtagcagagggagcccaggtcctcaagacagcctgagatggcagcccatacacctcagcaggggtaccttgccccttttctccagtgcggttcagcattgaggttgtctattcccagtcggtgataaaacctgagctgttttctcgtaggttccccctcgtccgaattgccacccaggcc

SEQ ID NO: 322557 - DNA, 709 bp, Homo Sapiens
gcttttctttcaaaatcttcaacttttaaaataccccccttttcataatcaatcatgtctgtgtcaacagctcggtcataatagtaagagaaagcatagaaggaacctctctggacctcctctggctggtgaagttttcctcgtaccaccctcagcacttcggcatagcagggctcaaagcccacctccccttcttggttgccaccatactggtatttcacacccccaaagatccactctgcttccaaccatctcggtaaacaggcactccggaaagtgtgcccatcagtcccttctgtctccagggctcccagggttgctagtcttgcagctttcaatccaaatcccaggtaactatgtgtatagagcttataagtgctgttaaacatctcaaaggaagtgaggtagcccctaggagtttgttccagagttttctcaaactggggcaggaacgtgatttgggtggaggctccccctaggtccaaggtccccacagtctcctgtctgtggccatgcagctgacctgtcagaaaattcacagtaacccaagctaatatgccttcgtcggatccatccatgatgctaacactgccctttggtaccaggaaaggtgacttcctgaagatctcctttacctcaaagagcagagccttggctttgtgttctggcagtaagcgtagtcctgctgttgcctttaggaccactgggg

SEQ ID NO: 322558 - DNA, 658 bp, Homo Sapiens
ttcaactatacccaatttataccttttctcatactcccatactgttcattcacttgttccttcattttttcccttgcccattcatccacaaataagcatcatacaaagtcagagaagtcatttcctcctttccaggagaggcctgcaaaatttcaagaactactgtgttgaagaggaattatgcatagctgcttctcacagaaaaacagtagtgggggatctaagtcagagggatgtctgaatgttttagcaactaaagctgaactctgaagggcaaacaggaatgagaaacatatgagaaagggggcttctgggttcaaaggtacttacggatgaaacaacttcatagtggggattctttagtctaactaggagaaacacgatgtcagatcaagaagggcctatgtgttaatgctgaatgagtttcattctacattgagaaattccaagcaggggaataaaataaccagacttgaattttactaaggccacttaggcaacagtgtggaatagatattggaggggtcacagatcaactaaggcaaagaaatactaagtctactacaataatctgggcttgaactaagacaattacgagggcacgtagtggataatttacagccttgctatattcagaagtggttctcaatcagcagca

SEQ ID NO: 322559 - DNA, 566 bp, Homo Sapiens
gcacagggatcatcttggcaaggattgctgggacctgtgctgtttagggtgctggtctccaataaagcggtgccagtgggaggccctgatgattgattgtcttctgtggtgggggacatttcattgttactttgtgtttcagaaggaaccattgtgattaatccatcatttggagatgaagcggtgattatgtcagaggtagctaatgaatttacatttgtggttgactcactgtctgcagcagtaggtataggaattgtggaggaactatgtgtactaattatggggggagcaggtgtaggaattgtggaggaactatgtgtactaattatggggggagcaggtgaagtagctgttgggaaagaaggtgtatttgctgtggtgctagcagtttcagggaaattagtttcagtggtatcagctgcagctactgtaggaccactagtcgcagtttctgtggttgttacagcatcagctgagttgccttggttggtggctgtgtttacagaaaggagagcaagaagagtaagatgaatgatggctttcattttagctgttcttgcttg

SEQ ID NO: 322560 - DNA, 733 bp, Homo Sapiens
  misc_feature (20)..(20): n is a, c, g, or t
  misc_feature (41)..(41): n is a, c, g, or t
  misc_feature (54)..(54): n is a, c, g, or t
  misc_feature (72)..(72): n is a, c, g, or t
ggttggcacaccaggcatangcactccagtgttagccaaantactattatctgnagtctagcaggctaaaangggatggataaattcagaaacaaagcccaagaaaggaaaggaaaaataatatgtccccaagttcaatgaaaattatgttttggttattagcaccttcaaaatatttgtgatactattctccactagcaaaaataatcaaaatccaacagacatatctacatgtttttcaattggcattactccctttcccttatcaccaactacagagaagactactgtaataatagacatgccaccattcaacttgacaccaaaaacgttttacttatttctctacatatagagagcaaataaaagccactatctattcatataagtcaaactacctactagttggagaattgtggtagattgtattatggttctcaatcacttcctacgcataattatacttccccatcccactaccatcaggcttggccatttttgtcttattttttctgacaaaacgtgagtggaagtgacatatataatttctgggcaaaagcgttgaaccaacacataattgggccactggcactcctttccttctactacaaggggagcatgtcctggataaagacaactccttcagccaaagcaaacccacacacaacatgtacacgagtgagaagtaaatttcactgtaagacactgagattttaatttttttaactgcaaa

SEQ ID NO: 322561 - DNA, 674 bp, Homo Sapiens
ttttaaattaaccagatctgtcttttaatagttaccagaatttagatgttaattccccagaggaaaaatgtccatggcacagtttttctggaaaagttcacatgtagacagtgaagcttctgaagttaggcgtcaaattagtagtgacaatcttttttttaatcttgaaagtccctagttttaaagaaagtagaatccatctggggcatgtctgcatcacagggtatcactcaagagtcatcatcaggccaaaaagactctgaagggaaccaggagggtttggcccttgctgtggaaagatgctactgaaagtataagagaacaccctaatgcacgcgtcaggcacgaaaccgtaccatgccccgctaagacatgggaccagagaacacgtcaacgtcaggccgctccaggaaaaccatccacaaagacaacagaagctaacccgaggtcgacactgccatgaagagtgttggctgaaaccgcagttaccagtgtctttactggacgcgaacatccctaaggacacagctgtgctgcttcctaagcatacgtgaccacgatactgtctttccccgggtctccttagcgccatcactgcaccaggcccagcatgcctcaagtcctccagagccttctcctgagacagcactaggggccacgtcagaatggtaaca

SEQ ID NO: 322562 - DNA, 877 bp, Homo Sapiens
  misc_feature (28)..(28): n is a, c, g, or t
ttccagcctaggcactgacgccataaancggtgcctgcctgaaaacagccagaaatcagttgtccatgatttctctcttaaggcttgagttgttgggcatggaaatcacagtacagaattgaatgaggtccatcaggagcccatatttcatgtacagaggccaagcgtcttctctggtcttctgctataacagtgaaatcattaaacatctattgttgcttatcacatgactatgaggtttttcaaatagacctgacaagccctttgtttctaacaaaaaaaggggatgataactcgtagagcttctcattattttcagccacaactacacagaccaagagatcataatacaaagcttttggccaaataatttaaaagtattacagcaaggacagggaaagatgaaaatcaatgacattactggaatgatgtaaacatttcatcatctgcataatacataattttttattcttgtttccagggagtttcacatgatattttaaagcagaagcagattctccacatgtagaacttggcagacaataataacgtattatctatgccctgctgggatacaagcacgcattcacacctcaatagcaatcctcgcaaatcgatactgcagagaggcgggaggcctcagtagcactaagcccctctgcgctgcaggctggctggacagcatatccagcaagcctgtcaagctaacaaaccccagggcttctccacagccaacagccatggaaaaatctccctgagtcacaaagcctaggagagttctggagcagtgcaacgtcacacgcggcagagggcctgaccacagccctagagtcagagcttcctgcccagccacgggctcttcccccgccgggccatc

SEQ ID NO: 322563 - DNA, 1373 bp, Homo Sapiens
  misc_feature (27)..(27): n is a, c, g, or t
  misc_feature (48)..(48): n is a, c, g, or t
  misc_feature (64)..(64): n is a, c, g, or t
atttcggcagagggcaggccatgcctntaatccgcactgccaggtctngtcggcccagcctggntcagaggaggaactcgaggagctgtgtgaacaggctgtgtgagatgttcaggcctagctccaaccaagagtgtgctccagatgtgtttgggccctacctggcacagagtcctgctcctgggaaaggaaaggaccacagcaaacaccattctttttgccgtacttcctagaagcactggaagaggactggtgatggtggagggtgagagggtgccgtttcctgctccagctccagaccttgtctgcagaaaacatctgcagtgcagcaaatccatgtccagccaggcaaccagctgctgcctgtggcgtgtgtgggctggatcccttgaaggctgagtttttgagggcagaaagctagctatgggtagccaggtgttacaaaggtgctgctccttctccaacccctacttggtttccctcaccccaagcctcatgttcataccagccagtgggttcagcagaacgcatgacaccttatcacctccctccttgggtgagctctgaacaccagctttggcccctccacagtaaggctgctacatcaggggcaaccctggctctatcattttccttttttgccaaaaggaccagtagcataggtgagccctgagcactaaaaggaggggtccctgaagctttcccactatagtgtggagttctgtccctgaggtgggtacagcagccttggttcctctgggggttgagaataagaatagtggggagggaaaaactcctccttgaagatttcctgtctcagagtcccagagaggtagaaaggaggaatttctgctggactttatctgggcagaggaaggatggaatgaaggtagaaaaggcagaattacagctgagcggggacaacaaagagttcttctctgggaaaagttttgtcttagagcaaggatggaaaatggggacaacaaaggaaaagcaaagtgtgaccccttgggtttggacagcccagaggcccagctccccagtataagccatacaggccagggacccacaggagagtggattagagcacaagtctggcctcactgagtggacaagagctgatgggcctcatcagggtgacattcaccccagggcagcctgaccactcttggcccctcaggcattatcccatttggaatgtgaatgtggtggcaaagtgggcagaggaccccacctgggaacctttttccctcagttagtggggagactagcacctaggtacccacatgggtatttatatctgaaccagacagacgcttgaatcaggcactatgttaagaaatatatttatttgctaatatatttatccgacg

SEQ ID NO: 322564 - DNA, 718 bp, Homo Sapiens
ttttgcaattcaatcaatgttatatttcacacacaaatttagaaaaatcaagagtataataaaagcataaaattaaacagaaggaaatcaatttctacaagaaatcaaatatatttacaatgagatttaaagggaaaaataagctacttggatcataaatttaattttattttaaataactttagctacctcagctgttaatacaataaaagcagaaaaaacaggctgccttttatttttccagatttaatcagaaaattgtatctacaataattgacacaactcacttcttgtccttcacccatctcatcaaaaattattgcattttcccccaaactgtattttttggattcctctgtgaatatactcatttcgtcctctttcctggaggcatcttggtttaaatccatctttaaaaaaaggagaaggggtacatatgtggaggcaaaatattctcttgaagccaacagatacagagttgctagagaagctgattgtacacacaagctgcctgggattgggatggggagggctgctgatttcgagacacatgacagcctttggtggacgggcacaggcaaagccccacgggcgccttcttcctgggcagggttgggactaagcggcggaggcggagcttcatctttcttcttggaacttgtcgttttggttctcctccaaaagccttcatccagataagaagccaatgactgattac

SEQ ID NO: 322565 - DNA, 390 bp, Homo Sapiens
acgtttttaaaaaatatttatttaaaaataagatttcaaaaaatacagtacttaatacattttgagaagtaaaaattccacaatttaaattaaaaacaatctgcaaagaaaatagaaatattacgtgaaaaaaactaaatcgctacaataaattaaaaacaacaacattgttcttaagggaaatacatggtttgattttccgattaagaaccagtgtagacttttcatctaaacaaatacatctcagctacatgggtcccacttgtcatttcacccattttactcactcttctcaaactattcttacatctctcaactactattttcctaattaccatcaacactaaaaatattggtgaagattttcttcaaattctcttaggggaaaga

SEQ ID NO: 322566 - DNA, 828 bp, Homo Sapiens
  misc_feature (91)..(108): n is a, c, g, or t
  misc_feature (111)..(111): n is a, c, g, or t
  misc_feature (117)..(134): n is a, c, g, or t
  misc_feature (137)..(137): n is a, c, g, or t
  misc_feature (139)..(141): n is a, c, g, or t
  misc_feature (148)..(277): n is a, c, g, or t
aagaaaaaaaggatggggggaagggttttgaagtgtatttagggggatggggctgggttttaggaaagatgtgtttgagaaaagttttttnnnnnnnnnnnnnnnnnntgngggtgnnnnnnnnnnnnnnnnnngtntnnntgtgttnnnnnnnnnnnnnnnnnnnnnnnnnnnnnnnnnnnnnnnnnnnnnnnnnnnnnnnnnnnnnnnnnnnnnnnnnnnnnnnnnnnnnnnnnnnnnnnnnnnnnnnnnnnnnnnnnnnnnnnnnnnnnnnnnnaattttaagtttgaatgtatattttgaaataaaaatggaaaataacaaatttgtacaaaattgtcacatagaaacacactttaagataccattacatgctatgtgtatttacaaaagttacaggtctagtaagaaaaaagaaactgtcattgacaaatgcgagctcattttttgagcaacaagaaatctcccgtgaaatgtcatactgacagccagtgagacttggtgcagtgacggctccgcacctgctgaggcctggagcctgcctcccgggctgagtgctcagctctggcctccggctggatgccgtctagagtcctatgtgctcataggtctttttctttcagtaaacagtataaaacattactattttcctttgattgtaaacttcaacagaaaataacatacttaagaattttgctacaaagagtactatgatttttattgcctcaccacctttagaacatttccacttcacaagtttctgatttgcttcactttcttacttggcgatggcgccctggcagcatcatccacacataccagtgcgt

SEQ ID NO: 322567 - DNA, 436 bp, Homo Sapiens
aactgaagaaatttatttacttttttctaggtccatagatgacataattatagacaagttttgatacataggaaaacccttccgtccacctttttttatgctaaatgaatcatcacaataatttttacaatttttaaaacaatacacagctttcttgggctgaagcaattgcaagaacatattggtactggtatattacagctacttacaatgtttttttaagaacagcaatggagaaaaataagttatttaaatattgatttcatatacagaaagtgcaatgttgttagttgttatataacttgctcgacagtttcttttctctatcaattttaaatcaagataacttgggactcagactattatatttttttctgaaaataatacagtacacacatggcagcagtgacttggcaagttgacctttttgctgcag

SEQ ID NO: 322568 - DNA, 2041 bp, Homo Sapiens
  misc_feature (126)..(126): n is a, c, g, or t
  misc_feature (256)..(256): n is a, c, g, or t
  misc_feature (368)..(368): n is a, c, g, or t
  misc_feature (372)..(372): n is a, c, g, or t
  misc_feature (385)..(385): n is a, c, g, or t
  misc_feature (614)..(670): n is a, c, g, or t
gggaagtaccgggcgcggggtacgggcgcgaaaatagtgggcgggaaataaatagcggtgccggcgcgagaacagatatcgcgcggcgccataactgagcgtgtgtactggcgcgtatctcatgcnccgcatagtgcataaatagtggacaataatcgcggtatatattctgcgcgcggcgcggatgaataataggcgcgaatgcgcggatctaggcgcgcgtccgcgcccggtataatatagggcgtgatccaancgagtgatggcgaacagcgtggacaacacgggtgggtataagagaacggcggcggcataacggacacactagagtctccgcgcgaggagtacgaggggggcctacgcggtanaganagcgcggaacganacggcgcgcgcgccttaaacgcgcacgcggcgcggctgtccacgaatcggcgggcgaccagcgcggcgacccgcaatacgcgcgcaatcataggtggaaaaatggagaggtggggtggtacggcaaacggggcgggcgacggccggttagcggtatcgggacgcggaataaaacgacgtgagatcggcgcgtgcggggaaaggtcttccaaatgaaggtaacggcggannnnnnnnnnnnnnnnnnnnnnnnnnnnnnnnnnnnnnnnnnnnnnnnnnnnnnnnncgacgaaggcggaatgcaggaggggccggcggaacaggggtggttggagagggcacacggttgggggcggtggttcgcagaggacgggacgggcgctcggtgttctcgcctgatcactcggcaaggctttcgagtggtgtgggagcgggagtccgcgtgcttcttgttttttggtaggtttctggcagagttttgggatgggtatgtgcaccggtggtttgcgcgcactcttcgtttggagtaaatacatttattgatacccatttcatatatagttcaatgaaataatctataaatataaaaagcatttttcttttggatatcaccatggtccatgtaaatactcaagtcagaatcatctgcaggaagcactccaagtcacactgttagctttacagacctgaatatacatattgcattaaacagtggcacttatgtactcaagtggtccagtggctttggaatatatgtctactgggcatgtggaatagaaataatgtgttaggtttaaatcaatggaaagggtatcaaccatcaacaaaagcaacaattatgaattcatatcctaggcaaagaaagtaccacagttgacacttggtgtcagaatactggagacaaagtatgtaaaacaatgcctgttgcagcaccacgtgctcactccaactcccagtggacagtcccccaatgccttagggtcactcgtggtcaaccaaatgcaatcaagaagctcgatagcttagaataaaaggtctgtagaggctgatatcaagattaaagtaagctaaacatttcagtgacacaatgagtttactcccctagaaggggactgtgggaaaacttttaattccctttgttacactgagcatgatcatttatctaatgcagaagaaagaacccagacatctggtactcagaacataggtgcaaaaattttcttccatttcaaagttttttcaatacttccgagggaactaatgcaaccaccgttgagccttgctctccacctgatgcagcataaaattttctctcatttcttcaatataggaatgtcttgctgcagactatgtgtcttccgagttagcaagcaaatgcgtttaaaaggtcttagttgtgcaatgtccaaaactgaaatctgagaggcagtgttagaacttaagcaaggcagaatttttagagtctactcaaatgaaagcctaagtgaagcatataaaaattcagtcttttctattattttcaactggaattgatggcaacattccctggtaaggatgggtaactggtgttatctccaggtccaaaatatcccaactacttaaaggggacccaaaagaggagaaacacacacttgagttctgtggtctccagaatttt

SEQ ID NO: 322569 - DNA, 944 bp, Homo Sapiens
  misc_feature (179)..(179): n is a, c, g, or t
  misc_feature (342)..(342): n is a, c, g, or t
gtccccggagtctcccagcttctcccaaggtacacacttgggcttccagtttctattaaccgtctatcacctttggcactaccagggggttattctgtgaccagtagcccagtcccttttccagtggagatcacagctgtggatgcctggtgagattgggccacttttctgcttggcanaactctgatggtgagctgctccgttggtgacctccctggctgcagtcccaggctcaagcctcatctttttggttacaggactgtcagggtcttcacattttctttcatttccaggagcttccaggttactactggcttctactgatgagttgtgggcccaatntctgaagacaggacagcaaggctgatcttcaaactcaagcatcggaatgatggaggcatccccacagggtgtatggctggagaaaaacacaaaaatgaggtctcgtctaagtttccacactcctttttgagttcctgggacaaagatgctatcctctttcagggtggctgccaactggagttggtggagaaggtacctttggaaactccttctggctatgacctcagcatggctatcattgaggatgtctccgttcttcctcattttggactgtcctatgcattttgttcctgttcccattgacacaacttcctttgtcacttgcaccggcttatcaggggtgtcgcaggccttgtcagctggagattgtatcttcaccaccgctgccaataatgtccactcatggtttggctcaggcttccccttcttgggcagcctgatcccatagtgttcatagcatagctgagcaatctcatccgcggtccacatggtctgagctggtattgagacctctcatttctagggaggcatcacaaggcagtatagtttatgaagaccacctggccatcgaccttcacctcgtgccgaattcgccacccagg

SEQ ID NO: 322570 - DNA, 1443 bp, Homo Sapiens
  misc_feature (936)..(999): n is a, c, g, or t
  misc_feature (1425)..(1425): n is a, c, g, or t
gaagaggtggaggaagaaccccgcccggcagccaaggtagtagagagggaggaagcagtgcccgaagccagcccagtcacacaagcaggtgccagtgtaatcacagtagaaacagtgatccaggaaaatgtaggtgcccaaaagatacccggagagaagagtgtacacgaaggcgctcttaagcaagacatgggagaagaagcagaggaagagccacagaaagttaacggagaggtgtcccatgttgacattgatgttttgccacaaattatttgttgttcagagccaccagtggtaaaaacagagatggtaacaatttctgatgcctcacaaaggacagaaatctccaccaaggaagtccccattgtccaaactgagaccaaaaccatcacatatgagtctccacagattgatggcggggctggtggtgattcgggcacgttactgaccgcacaaaccatcacatctgagtccgtgtcaacaacgacaaccacacacatcaccaagactgtaaaaggtggaatttctgaaacaagaattgagaaacgcattgtgatcacaggagatggagatattgatcatgacccgggcactggctcaggcgatcagggaagccagagagcagcaccctgacatgtcggtcacaagagtggtggtacacaaagaaacagagttggctgaggaaggggaagattaagtaagaaagtcattttttaaacaacactcaactttgtgaacccctgaagattttttgaccgttccaagtcttaatgccacaccactattccagcgaatttatgctacaactggtaacaatgaccagaagcctgaagaattaaaatgccaacaccaaacctttccttaccagctctggtctatattgctcccatgcatttaatatattattttgttttataaccacttctaaatattctnnnnnnnnnnnnnnnnnnnnnnnnnnnnnnnnnnnnnnnnnnnnnnnnnnnnnnnnnnnnnnnngcaactacctgcttttaatgactcactttgatcaaatgacagtgaacaaagccagcccaagctgttaaggtgctgttcacttgaacaggtgctgttgcgcagaaaggaaactctgtgactaatttagatagtggctttccttcttctggattcttttcattgaattctcacagtaaatatttacggagttttcaaattgcagcaaatatactgtatgagaaaatattaatacagattaaaagcctttcttacatcttgaaaattttctaatatttgaggaatttcacagggatgttttttatattgggacccttttgactttccagtcctgtgactttctacttttaggtaggaggagtcaggaatctctgggactgggaggattaatggaggaagtttcaccgaccgtggcaccgtggcttaggngaccccgccgcaccacag

SEQ ID NO: 322571 - DNA, 629 bp, Homo Sapiens
  misc_feature (464)..(464): n is a, c, g, or t
  misc_feature (524)..(524): n is a, c, g, or t
  misc_feature (536)..(536): n is a, c, g, or t
  misc_feature (551)..(551): n is a, c, g, or t
  misc_feature (592)..(592): n is a, c, g, or t
  misc_feature (603)..(603): n is a, c, g, or t
ctgtttactttgtgtgcaactacctgcttttaatgactcactttgatcaaatgacagtgaacaaagccagcccaagctgttaaggtgctgttcacttgaacgggtgctgttgcgcagaaaggaaactctgtgactaatttagatagtggctttccttcttctggattcttttcattgaattctcacagtaaatatttacggagttttcaaattgcagcaaatatactgtatgagaaaatattaatacagattaaaagcctttcttacatcttgaaaattttctaatatttgagaatttcacagggatgttttttatattggacccttttgactttccagtcctgtgactttctacttttagtagagagtcagaatctctggactggagaataatgaagaagttcactgactgtgcactgtgcttagagaccctgccgaccacagtgccaatgcttgtcagacancatccttcggcagcattccagaacaggaggggaagagaaagagaaaactttcttccctcnactaaaagatcnggcagccttaaaccntagtgccttccttcctaacatacccaaattcaatccttccnataattggacnctggggaggaccctgccttggaataa

SEQ ID NO: 322572 - DNA, 916 bp, Homo Sapiens
ggtggaaaatttcgaggagcttgagggaccctgggatctggatgtagattatacctaggtccctgtttaaacaggccttattgtggactgggttgccatgaagatgtgcctgagtcttcaaaatccacttgacctggggtacactggaattcccaattctttctgataggaccattctgaaggtcttcaatgtagttttgtctttctaagcaatgtccccggcacctattgaataattcaattgcatcatctggcctcacgccttctacatcaatcaaatatctgcaaatgaggtagccagtcctgtttaaaccatgggtacagtggacaccaataagtttatcattatctttattttctttcaaaaacccattaacagcgtgtttgaatttaaaaatagtctcatcatcaggcacttgatgtccaactgtaaaaatttttaagtaaggaacagtttctggcaaatcctctggtttataatagcgttgagtatatgttaaatcaataatcagtccaagttcttcattttgttctcggattttgttaaaaagatccaaaggggaaaagcattcttctggagcaagtttcttttcaaaactcttttgcaaaggaactttgaaagcaatgaaacgagtcccaggcatccgctgtccaactgggagatagtctttccacctttcggggatgtggtttccgcccttcttcttggctgaggagcgtcctgaaaagtcgcgtctccggccccagccactgcggggatgatgccactggctcatgtgggtcccaagaagccgcccacccaatgccaagccggccaaaagcgccagtccggcgccctcaatgccaggataagaccctaaacaggaaaagactcggcagccacctacgccgcgctccagcgtctcgctattgcccc

SEQ ID NO: 322573 - DNA, 572 bp, Homo Sapiens
tatattttgatgaaataggtattgtgtaaatctataaatatttgaatccaaaccaaatataattttttaacttacattaacaaacatttgggcaaaaatcatattggtaatgagtgtttaaaattaaagcacacattatctctgagactcttccaacaaagagaaactagaatgaagtctgaaaaacagaatcaagtaagacagcatgttatatagtgacactgaatgttatttaacttgtagttactatcaatatatttatgcgttaaacagctagttctctcaagtgtagaggacaagaacttgtgtcagttatcttttgaatccataaatcttagctggcattagttttctatgtaatcacctacctagagagagttgtaaattatatgttaacatgttatctggttggcagcaaacactaaagccaataaaggaaaaacagtaaatgttccgaaagcagagaaaagcaaccaaacatattgttatgaactaaaagctttccctttaagatgcatacttgtcttactggatgaagaaaattgagggtacatgtaccttatactgtcaag

SEQ ID NO: 322574 - DNA, 1491 bp, Homo Sapiens
acccgagggcccaaaatgtttccccctttattattgttccattcagttacccaaggacagaccacattgggctcaggcagctcaactgccaggttggggaacatccagctccagaaacagggagcagcagcggcaccaggagaatggcaaagcaggtcactgggaccccagaactgacctgggccctccttcacccgaccccaggccagaccttcctacaaaagatgaatgtgtgccctgcccccacttctcatactggttctctccccgggaaagtgcatagttgcctggagatgcagcatcccagggcctgaacaagctgggccacacaccgggatcaggcttcccaagggtagagccagagcatggccatataggtccaagccaaagaggcaggtaggacaggaaactgattggaggtaacatccaacaggtcatggatgctaggcagggagctggatcacaggcctcctggagctaccagagagagaagggaaagggagccaaagttctggggtaggggagaggaagggaaagggaagaagggcctagacctaggtaccttttcaggtaccaggggactgtgaccattgctcccaagagagaaaatgggagaggggagaggcaattatattttgtgcccaaacctaaaggaccatcaggaagagaatttccagaggcccctggctcaggatggcctgtaagcctaggtattgggttccaagctgaagccaggccagagtagccaagtggggtttggatttttgtccaaacagctcaggcaagcttctggtgggagaagggaaggtgggaaatgggcagatgctctttgggcgagaacccactccccttcaggccccgcacacagctagagcctctaccagccatgttctcacactgcttggaacagaacagccccacgggcctaaaaccactctcctgaaagtggtagggagttccgactgggtgaggacaagccaagaccaaggcctgtaggcagaagggagcaagttaccttgatttggaaaacaaaacaaaactaaagccagagagcctcccctcccaccctgcctaacctgaaatcccattcaggctattgtgcttgcagccaggactgggcctgtgcttctgcttcggccctgagttcaagtgcccagaaccgccctgtgaccaagagcaagccagggtgggggaaggcatgctcccctctcactgggccctgcctgccttctcctctgaccttccctccgtgcctagccctctgagccctgtcctaccagatccaaacagaacagctactgcttccaggaatccaacggtcaccgagagatacctaaatgcctcactgtgctggagccagccagaccttccccagggaccaatcattactgacatgccctctgctccagctgtgcctttacatctgacaactgcccagcatgtcccagctcctcagcctcgtgccgaattcgccacccaggcctcgctacc

SEQ ID NO: 322575 - DNA, 1293 bp, Homo Sapiens
  misc_feature (512)..(512): n is a, c, g, or t
actgatttttgttttcttgtaagcttttttccaaagaactttccaattcaagaattctagttctgtaagtctctgcttcttgctgaaggtcccgaagtttattttcactttctgtgaggattgcttttttctgcaactctaactcttctagggccaaagattcttgctgttctttttcttggctgatcttcaaatattctgattgactcttttcaagagctactttcatttgttcctgaaattccctttctcgggtctgaagcttcttggtcagttcctgctcttttctggccagctccttttcatgaagcttctgtagcttagcaatttgttcttctgaggattttttcattacatcaacaacctcctgtttcacccgacttaattcctgttgaagactgatgcgttcctcctcacttgttttttcgatagtttttatttgttcatccatttctgccttcagttttctccgtgcttcctctgttttttgggctgtactcaaagcttttttncaagttcctcaaaaggcagctctttcgggctttttctttctgttcccggtaattcctctcccctgggtagtcatctgtttgatgcgactacggagttgagcaatttcttcttctttcatttccagggtttcatgcatctgacgttttgtctctgcgattaccattcccttatcttgttcaagctgttcaattaagttctttgcatcacgcaactgagtgataagtttagtcttctcggccatatgaaggtcctttatcttttctagttcttgaagtctttcatccagttgttcttgcagagcttctttttcactagttaatagtgtacattgttccttatgtgactgaattgtttccttacaacgcttaagtaggttctcttgacgcttcactctttgctggagtgtttccagtgtttttacagaagttccatcttccactactggctctccatcactttctggattctcttctttagtgaagacttcagcctgtggttccagctgaggaagtggtttcagtacatcaacattcatcgggccatttcgtaatcgttgtttcagtagagaaacctgagtttggagaacactgatatactgatctttctcctctaaagatgcatcaaactcctcttgcagatgtttctttgcctgctggtccatttggagctcctctcttaattctgctattctccgaagtgatttatcctgactctgacttaatataccttgtagctttttcttctctctctgaagcatctgataagctgtaacaagctccc

SEQ ID NO: 322576 - DNA, 1895 bp, Homo Sapiens
  misc_feature (172)..(172): n is a, c, g, or t
  misc_feature (248)..(248): n is a, c, g, or t
  misc_feature (261)..(261): n is a, c, g, or t
  misc_feature (317)..(317): n is a, c, g, or t
  misc_feature (324)..(324): n is a, c, g, or t
  misc_feature (664)..(664): n is a, c, g, or t
tactgtaccactcctgcgtgtcaaggactcgggcgcctcgcatctggacacccaaacacataatgtgtctgacgggtttacacccttgtttataagacaaaaaatgcgcggcaaaaaaacatgtgtttgttttaatacaccggtattctccccaactgatttacaagaaccnactgagtgtcccattcacacgctcacagatttcagagactatttaaaactttgctctaactgcaatttctagtgcntagctcctcctantacggtctaagcagtcagataagtcaatctcacaatcttttccagtagaatgaccntcagtcntggtactaaccgtacgcagaatgcaaagtatttcctagggttgatttgcctctgtttagtctcctgttcatgatagggcctgggtgtggctcaggtctggaagcctttgtgtattatgagctttagacccaagaaagaggacagttagaaaattcagaccataaattctccccttttctcaactcgacagcaggtcttcgtagctgtagttctccctggcccatactttgtccgcccagggtgagcctacgcctgctgaagctgaggcagggtgctgagtcacttaaagcagctgaggggcaattttggaaactgacttggtgcttgcccactatccttncaggcttacagcccctcagacgaggcaaagggaggcaaatcgatttgagaccactgattagcaataacgtatttagcattttgctctggttttggcagataagggtaagttaattatcaacatcatactttccaaagaaagaattttaaagaaatatgcaaaggggacactttccttgtgattactggttacgtagtaagagttttacaggatgaatatagcactagaaaactactgaaagcttgcagactgcattgttactttcttaaataaatagaaaactcttttcttaaaatcacaagataattttgctttaaaaacggagtggatttggagtaacagttcaggatgagcacactagtggttgccatttactttttttaaaaaaataaagttctccttaactaacttcaaatggtgagtacagaaaattacatcaatcacactttaagcaccattataggcgagctgacctcctgtcttgctgcaagttggtccataggcctattttatgactttgggagtctttgtctggtgtcagtactcagtttatttgatggcaaataaacacggtcatgtaaatgtaatgcaggcctactgggtgtcattttgttatatgcacgttttataagagattttatgagcaaatttccatatcctccccacctagtactctactgagtatatcttcattatttcctcttctggaacatgaattagtgaatgcagacattgtacgttgtattattctttttagtacttccagaataacagatcttcctaaatccagctatgaaatatctaagttaaagaaggactatttttgaaaattaatatttagcttaataacttaatatccttacatcactggaacagacaaatgttacattagcaagaaaataatagtttacaagcaaacaaggataaagtcttaatttctgtctctaccattctttcccctgccagtccaattctagaagccttatattcatgaaatgggaaggaagcttagggctgcacaataaatctccataaaggaattacattttcaagggaaaacttgtgtggaaaccgcatttaaccattatcttaatatgtatacaatcattatttgcttagagctgggtaatagttctcaagctaataatcacttctaaatcttaagacaaccgaacgcgtgggtttcgacgatatcccgggaattccggaccggtaccagcctgctttttaa

SEQ ID NO: 322577 - DNA, 554 bp, Homo Sapiens
aaaaccggcccaaggctgggaaaaatgccagaggatgttccagccatccagattttggcaactgagagcctcaaatccaagaatatgtaaggatgccttcctagatctgcaggcccaagtcagcactaaaggaaacagaaattaaagaaatcacagtttcttttcttcaaaaaataactgatttgcagaaccaactcaagcaacaggaggaagactttagaaaacagctggaagatgaagaaggaagaaaagctgaaaaagaaaatacaacagcagaattaactgaagaaattaacaagtggcgtctcctctatgaagaactatataataaaacaaaaccttttcagctacaactagatgcttttgaagtagaaaaacaggcattgttgaatgaacatggtgcagctcaggaacagctaaataaaataagagattcatatgctaaattattgggtcatcagaatttgaaacaaaaaatcaagcatgttgtgaagttgaaagatgaaaatagccaactcaaatcggaagtatcaaaactccgctgtcagcttgct

SEQ ID NO: 322578 - DNA, 1722 bp, Homo Sapiens
  misc_feature (536)..(763): n is a, c, g, or t
aagactatcatagctttaaaccataatttgtcctcctttcatttcttgcctttcatttttggtagctgcttaaacaggttgcctaattagcagcttttgggtgattttgtaaaatgttatatcaagatttcaagactgtgtacattttaaattatttccaaagatagtgacaggagagaactggaacaaatttaccaactttgtggacctacaaagcccttacactttaaagggtaagacaaaggcttaagtttgaaaggtagagaactgtttagcatctgagaagaaatactttattaggcctgtaattttggttcttggccttaaacactttctggaacctttaaatatgctgcatagacaatgggaaagccttaggtattcacacatttaaggaactctaaacaaaatactattttcctttagttcatattaaaaattaatacactttaaaaatttaatgtcaaagtctggtaacatttgttagtaggatttgagttattattttttgagacaggatctcaggctggagtgcnnnnnnnnnnnnnnnnnnnnnnnnnnnnnnnnnnnnnnnnnnnnnnnnnnnnnnnnnnnnnnnnnnnnnnnnnnnnnnnnnnnnnnnnnnnnnnnnnnnnnnnnnnnnnnnnnnnnnnnnnnnnnnnnnnnnnnnnnnnnnnnnnnnnnnnnnnnnnnnnnnnnnnnnnnnnnnnnnnnnnnnnnnnnnnnnnnnnnnnnnnnnnnnnnnnnnnnnnnnnnnnnnnnnctgagccactgcgcccagccagggtttgaattattttaaactcatccatgggctgccctagaatgttcacaaatgagggttgtttaatgcctttcttatagctgctactggaacactattatgacctaatttatgagccatccttactcatctacaagtgctgaagcaatgttacatacttttttgctaaactcagattttttagcctaatttcttgtcctcctatccgcctgcatccacacatggcctgcatggggctgccttccctgcagtgttctacagccatgcttcagggtatagctgttggtggacagcctcaggtcttgggggcactatagccactaaacgaggtgtgaaaggctcaagaggatgaccagcaattaattatccccagaaagtgaaggaaaagagacctttagggatgttgctggtcaagtcttgatttgactccggtcaaatcaatcttcaagcaatcttgggattcctcaactgcagtaagcttttcaaaatgcaaacaaactgccttaacaactgacaagacaccagcccatacgctgctcttccaacagtgggtttctagctttgaacaaaagtgctaaacatttccttgaatatattcttcctctttttgtcctcatcactcaatactggtgctcttgtcacaggtagaacagcttgtttcttttccatctattcaagtgtgtttctaattctaaaatgctgatcttctctggagtctatggtaggcaattatggtcactgaaatagtttgtcttgttttcaaatattattggtgcatgtacaacagcatccaacatatctgtcttgttcctagatatatagctctgattttaggccttttgtgcataccattacaatatggtggggtaagacattctacagtagcctgtgctgaactgatctcttaaataaacttgcttctggttaactatgttgat

SEQ ID NO: 322579 - DNA, 1296 bp, Homo Sapiens
tttaaaatctttcatagagtttatttgaaaagatgctgaatttattcccaagtataattttaaaaagctgtttaggacccaaacatatttaaacatctcttacacatacagaatttcagtttacaaatattccagaaggcattttcttaagcagtgaaccatgcagaatactgttgctaaacatcgtttctgccttcctcgtgttctcttggtagtttttactgtttggcttgatcctgctgaggaatgtgcttaccactggaagccagatgcagattcggcaagtgtttcttgcctcttacaaggcaccgcgtgtaacgtcctgaccagctgttggtcatttgtggcagaggggtgtggctgcttttcgcctgcatctcgcgtgctttaggcagatcagtctggagtgcaggggaggatgaagacaggtggacttgggctcatctttcatcagttaagtagccaattatctaacttgtatttctggaaactgaaaaggaaagtttctagaaaccgtaagaacaatttaagttgggatttagaatagctgacacatttttagatgggactgaaatgagtaagaaaggttctccaagatgtatgattttaagtccttactccataaatcttcattaaacacatctcagttttggcctgactcactggggtgtcaagcagctactcaccctgcctcaactacgtaagctgcaccttggcaggaaagggctcacaggttacagatagagcttgatgagctcatcgctgactgctgagggtgtcagcacgcccaggtctgtaaacagcagagtgattaaggaaggggcagtgtagtcgacccacggatgctcctctttgaggtcttgtccagtctgcgcgaccttgagagtgtctgccttatacttaaacttatctgggacgtcttgctggtttagtggaaagagccggacaaacttgaaactttctgcaaccacatagaaaggtttgttctgtgctttggcacacacagccatctggttggttccaatcttgttaataattcctccgttttcaacaactccttcagcaccaactatgacaagatctgctttctccatgatgtagccgacagcagcatctagcaccacagtgacagggacgttgaggtggcagagggctttggccattttcttacctgacaaatcaggctgtgactctgtgacgtatacactaaatcgcttcttggccgccacggctgcttccaggactctcaggaccactctggagtaggcgtgagtcaatattgtcgctccatctttg

SEQ ID NO: 322580 - DNA, 718 bp, Homo Sapiens
tttcacgttatgtgcccagccataattttacagagcaaactgcggattacagtccaacaggatcagaaccagaatgtgcccccagcttgccagcagtcagcactgcctttcattgtaccttttcctgcctttggaagaaaaatcactgaatttgcagcaggccgcagtatatgatctagggggtttcacttaagtagttaactcccgtggaagagcagagattgtattgatgaagatttttatcaaggaataggtaacttatatctccctctctctagacgataatcaaagcaaaacttcctccttttttcctgaatttacatctcttacccagagtctaagagtatagttttccaaaaatacttctttctaaagaactcaaattcttgtttccttagtccaaagtattgggatctgccccttaaccccattagtattaatgtgagtttcaagcaaacatccactgtccacattaggtgacatacatcactgtggtactgtcttgtactttctctaacgttctcaaaatgtcatcttcagtaagaaaatggccaaagccctctgccacctcaacgtccctgtcactgtggtgctagatgctgctgtcgggtgagtgcccatcttccccagccataatcacctcccccaccccatgctggcttacagcaagttttcagattgaaagtttgagtcccgttcataaagccacaccaggtag

SEQ ID NO: 322581 - DNA, 542 bp, Homo Sapiens
  misc_feature (27)..(27): n is a, c, g, or t
  misc_feature (42)..(42): n is a, c, g, or t
  misc_feature (65)..(65): n is a, c, g, or t
  misc_feature (71)..(71): n is a, c, g, or t
  misc_feature (269)..(269): n is a, c, g, or t
aaacgccccgggtctgtaaacaaccanaatgaattaaggaanggggcaatgtaatcgaaccccanggaagnctcctctttgaggtcttggtcccaatctgccgcgaaccttgaagagtgtcctgcccttaatccttaaaacttaacctgggaacgtccttgcctggtttaagtggaaaagagccggacaaaacttgaaaactttcctgcaacccacatagaaaggtttgttccttgctttggcacacacagcccatctggttggttccnaatcttgttaataattcctccgttttcaacaactccttcagcaccaactatgacaagatctgctttctccatgatgtagccgacagcagcatctagcaccacagtgacagggacgttgaggtggcagagggctttggccattttcttacctgacaaatcaggctgtgactctgtgacgtatacactaaatcgcttctttgggcccacggctgcttccaggactctcaggaccactctggagtaggcgtgagtcaatattgtcgctccatcttt

SEQ ID NO: 322582 - DNA, 625 bp, Homo Sapiens
  misc_feature (255)..(290): n is a, c, g, or t
tacaaaaactatgccaacacaaatactgtagacctctataattcaaacagcaaatagcttaatatggacaacatccatgtgctacagctaattttagacacaaactgatggtttcaaacatgctattttaaaacaagaacatcccacatctccaaatcttaatttggttaattttgtcaataaattaaaatgtatgtaatgtgcatatgtatatacaactttagaagagtgtatttatgtatatacacttatctnnnnnnnnnnnnnnnnnnnnnnnnnnnnnnnnnnnnccctacacaaatccgtgaaaaggattcaaatgttctctctcagacttaaaaggccattccctacttcaaagttacattcaacaccactatgatccccttccgttattagcaactttgctacacttatgctgaatgttatgagaatcatgaattaataaattacacagtaattcctaacttaaagtaaatgaaataatccaatttaacatggcactgaaaattataatagtgcctgtgtggaagggaaaaaaagcaagttttgggagattttgcaaagaaatttttttcctccttcatataccccttgtgtctaggtcaaaacttatttcataagt

SEQ ID NO: 322583 - DNA, 617 bp, Homo Sapiens
gagaagattttatatcccagtcttatgatgttggttggcaaggctagataaaaagatgttagaatgaaagaacatatttttagtgatatgtaaatgaaggattctacaatagtcatatatttttatatgaatgaatgttgggttgggctggagaggtatgtgtgtgtaaatataaaggtctcacattcagagtatagctctgaaataatggaactcatgtctacaattcaacatgcatctgtatagttacatctcatgtaaatatacacagacatattttgcagccagtaattgacagttaatgtccaaaacaggtgattgataggtaacagaaattagataaccaccaattttgcccaagagaaagactagaaggactaaaagcagttgaatgtatggtactgacattgtcataagcagtctgataaccagtttattgaaacgtgtgcattaacagagaatttaattttaaacccataatttctcctatccattaaaatattataattgttagtagtatgaaaccaacaggaaatgttttttaatcatttagtgaggtgattcatttgtttcatgggcaaacactatccaggaaaagccttgcttgcctgtttccc

SEQ ID NO: 322584 - DNA, 344 bp, Homo Sapiens
  misc_feature (130)..(142): n is a, c, g, or t
gctttctgaaattcacagaagcctaggaggactggggtaagtggaataaactagagaagggagacattgtttgtatttcctttatactgtgaagttacatgcataaaagggtcaaacctgtagatgcagnnnnnnnnnnnnnctataaataccaatctgtataaatgtctattattatgaagaattgccaatcttgttttaagcaaatgcattctatcgttattataaatgttagttctagctctatttacttctaatcttaaatcagaataaattaatattgtattgctgctgtgcgtggaaaaagacgatgtttatgttcttatagaataaaagctgggaat

SEQ ID NO: 322585 - DNA, 235 bp, Homo Sapiens
caaacaaaaatttaactttttatgagatttcagtttttgaaatacacaactcttacagcacaaacacagtatttacatttcaagttctttgtacaaaagatgtatgccattttggaagaatattgttgagatcatgatctaaaatacctgtcagagttactcatggaatctgctcttcacaaatccattgtattatgacataaaatacggctagacgccaaggtttaaccataca

SEQ ID NO: 322586 - DNA, 1019 bp, Homo Sapiens
  misc_feature (644)..(753): n is a, c, g, or t
  misc_feature (828)..(828): n is a, c, g, or t
  misc_feature (994)..(994): n is a, c, g, or t
ttttttttggctatactaagacttggaaattattctctccagtgtcagcgaatccagaagggtatcagattaaacaccgaattcagccactggacttttaaaagtacttaagatggtttatctcgggttttttcttcagttaacaaaatcataaatatggtgccttataacatgaaaggaaaattagttgtgtatttcacgacgaaagcgacggaccaaaagaaatttcctgccccaagaagcatgggatccaggaaggggcgcgtagatgcttaacggtctcttcggaaatcctgcaaatagaaagataattctagatccggaatacctgtatctggtggaaaccatggatttctacaagctcgaattattcctcattgtatagcctgctttgtaaactagtttacaatttgcaggctgatcttaagatttttttatatctaattgctgctgccttcattttaggttcagcagttacttttaactaccttaatttattgccagaaggtatgagcctaacattctgatgagtccagaaaactacgttttgtcagtagcaatacactaggaagtaaaatatatttagaatttaaacattgtgtgccagtggtcctcgcgcttgactgcacatcagttacttgaannnnnnnnnnnnnnnnnnnnnnnnnnnnnnnnnnnnnnnnnnnnnnnnnnnnnnnnnnnnnnnnnnnnnnnnnnnnnnnnnnnnnnnnnnnnnnnnnnnnnnnnnnnnnntttctgtgcattggcttgcacaatttgaaaataatgcttttcctgagctggatcccagtgttgccttaacagggntgtctgtcgtgccgcagtagagcactgctgcttcctccaaccccaaaatttatgttcctaagtaagtcaggtccctaagccccgtcccaagaagtgacacaagtggccaacatccacactgtaggcttgcaggctacccgccctgagatttggtaaagaacactgncttggtccccatcagtaaacaagct

SEQ ID NO: 322587 - DNA, 493 bp, Homo Sapiens
  misc_feature (134)..(134): n is a, c, g, or t
  misc_feature (185)..(185): n is a, c, g, or t
  misc_feature (339)..(339): n is a, c, g, or t
  misc_feature (366)..(366): n is a, c, g, or t
  misc_feature (467)..(467): n is a, c, g, or t
  misc_feature (476)..(476): n is a, c, g, or t
ttaattaaaaaaataaatcattctgaagatactgcatttgctctctcacaagcagcctcctgaggtaggtaagcttgtttactgatggggaacaaggcagtgttctttaccaaatctcagggcgggtagcctgncaagcctacagtgtggatgttggccacttgtgtcacttcttgggacggggngcttaagggacctgacttacttaggaacataaattttggggttggaggaagcagcagtgctctactgcgggcacgacagacaccctgttaaggcaacactgggatccagctcaggaaaagcattattttcaaattgtgcaagccaatgcacagnaaaagtgggtcctcaaacttggggaancgtaagaattcacttgggggagcctttaaaaaggtcccgatgtctgggacctactttcccaggttccgactgcattgatctgaagtgtggctcttcaagtnactgatgtncagtcaagcgcgaggac

SEQ ID NO: 322588 - DNA, 1279 bp, Homo Sapiens
  misc_feature (130)..(168): n is a, c, g, or t
ctctggataagttccatttattaatcattgtacaaaaaaatcttggcattcatttgaaaagaaaagaagttgctatatccaaatatttaacattttaacattgggaaagttcaacgtttataacagggcnnnnnnnnnnnnnnnnnnnnnnnnnnnnnnnnnnnnnnngaaacttatgatttattagagtacaggatccaaaacacgtttttaaaaaaatataaagtgcccaaataccaacttacacaggtgatacaggcttcctggagccccatgaagcattcatgaagaaagacatttaaaaacagtctaaatacatatgtccagctgggtcagtaaaggtaaaacccatcttttttgactttgatgtgtcttagaaaaaaggaaatcaatcaaaccagaaaaccaccaattgcaactctcagcatgctcaggttcttattaatgcatctcattcatattaattaattccgtattatcaaactttcccctttaaatgaaagtagtgtacaatcctcccaaccttggcgggccaggtgctgtgagtggttacgtttccagatgcaggttcaaatcctttgactttggatttgactgatgaggaacatggacagtggattaaatagctcattcaggctggaggagccaggggccaaatccccatctctttctagtaactgcttaaagccttcccttgctatgaagtggtctcaggtggctttccaaaccttggtcaccccagggtttccaaagggtaaacaagcagcaggcattcaacatgggtgagaatactgcatgcagatggacagacaggtgcagagacaggcccctaacgccccattcactagagcaactgcattattttaaatgttgagagcaaagtaactaggtcctaacttcggaagttagcttctatcgattaatgacaagattagctcgcttgagaactggcaggccgagagttggtggagctccagagctgcacaaaggcgtgcagttactctgggctcagttactgagaacttcgtaaaggagccagtgccgtccgaacacacggtcaggctttcccagaagacgccacaacaggcttcgtcctgctgccgtcaggaccctggcggcttggaaaagcagattccaacacgcacatctcctttcacacaagtccaacactcttcaaatgaaagacattctctctctttctaacctgccacattcaaacaggccttgaagtgactctaaggaataacaagaggtgtcctcgtgccgaattcgccaccca

SEQ ID NO: 322589 - DNA, 1017 bp, Homo Sapiens
  misc_feature (51)..(51): n is a, c, g, or t
  misc_feature (980)..(980): n is a, c, g, or t
ggtcaagttagtgctgctgctgtccaaaaaaaggtcacgaggtcagagtgnaaagttttaagttcagattgatcccgaccctctccccagaaggtcaccaggtagtaaaggagcagggctgcccatcctatggggatctaccaccgttgggactccccataagctagaagaatagtttgggggcccccacaatgaagcgccagcaagatcggccccgctgctgccaccagcgctgctgctccactgcccgagcccagtggacccaccaaaaagattcagagcaggtcccacgggatctgactggttctggccggtctccagcgactgccaccccgcagctggcgcacttggggttgctgcaggtgtagggggctgagcttgtgccagaaagcggctgacttcatcatcagtggcaaactcagcaaggatggtagtgtttcccaacacacacatgtgcagtgcagtttgggccttggccgcctcctgtttggtgctgtatcggaatcagggcagtgccctgggttagattccagatggaatgtcagcagtgggccatgctgcatgcagatcgttctcaaggttgacccatcaatctgtggggtgagattgtgaagaaccagccagtaactaggacgaactgagccaccatcactccaggtagaggccgaggcgagccgtgagtcctgtgtcccccaccccctgactgatcggggtgctgtgctgctccagggagatgatggtttggggttgttcagaccccaggatgtgcggcggggcagcggtgtagtgttcctggaggaaatatggtttttccacatcttgttggagagatgagtggggttgtgtcctatgggatctggggaccatgttgatttgtaatcagggaactttgctgaagtgctatgaacgttggtaaaggagttgtcagaggcactgtagggccaggcaccaggtgaaggcagcgaggtgttgagggaagnattagaccctgtggtgttatcccgcagcagttggcgc

SEQ ID NO: 322590 - DNA, 775 bp, Homo Sapiens
ttttaggtctgctttttattggccacgcatccagccgccagcctcagggcacacacctggcagggggcaggctcgggtaggctgccctcgctgggtgggcagtgagggggcagcggctgctgggtgtcaccctgcagcccctcaggtggacctgtattgtccccagggcctgcccacgctgggcagctggcactgggaggggttttctgttgatgtgatggccaagtttcagctgcagggcagaggcctggcagtggcagcaaaggcagaccgccccccactccaacttcaggggctggacatgctggaacgggggccagaccccatgggaggggaccctggcctgccatggcactgcctgccagcttacccctgcctagggcccccaactcagccacctccaagcagtaaagacttgcaaagcattgcattttgattaaaccttgctgggctgaagggcaggcagagctgtggtggacactggcaggacgcagcaccccccgactggcccttggcaggctgcaccgggcgcatgcgggtgtgggccagggttgcctttaggaagcaggtgggaggctggcacgtgtcatggcgggtccaggtagggcaccaggcctggcatgggcactggtgcctgtcgggttcccagccacaatcaccccaagaaggctccaggagggccccggctgggtaaggcacggagttttcggtttccggggcccagtcccagcctggcccccagaagagcctctcttggcagaatggcagcatgtcc

SEQ ID NO: 322591 - DNA, 1311 bp, Homo Sapiens
  misc_feature (198)..(198): n is a, c, g, or t
accacttaagcccttttatcccctggaattaagagggggttgcccagcagccattcttcaaccttcatcagatttcagcccatggacctcttataaagcgtccagtatggccatctgcttcttcatggcagggaggtaaaggctgaggtccctctgcatcccaatactgaaagcttctttccggtggtcaccttcctntacggttaacgcggccacaaaatcttcataggatggagttgcccttaaagctaacgcaaaaacccctcgaactacccagccatggtgttgccgcaatgttttaccatatgcgttattcagggctgtctgggatatccttttccccatttttcacttctgtcaaaaatcccttcaaaaatttgagacctctcttcagccacaaagagggcttcagtcgctgagttcctaacttgggctacatccgcttccacttcgtgcagcactatcttctggagagtggtaaactcttctttgttggttatatacttctgatttactttcttaatattttcaacaagatccatcttaacaggagcaaacactgtagggccaagtttgtctaatactggaaccacagcacaacatgatgccaagaatgcttctgtgggaatgccactgtcttccagaagttcaatgtcactaaagcttgtgttcatggtactaaagaaagttgggataacttctttgccttcctcccagaggcattctggagagcaacttgagtctgatccagactgagacaagttattgtcatgatttttcaggttttccattctatcttccttcattatttcaccttggacggttatattatcatctgtattttcctcacttgatatgctgcagtctatctctgcagatttcaaatataaggaattcttatttttcattaggatttcttcctcaccatttatttccatatttaaagatccattttcacaagtgctcaactccgtttgcctttccaatgaattatgaattggtataataggatgtttcatcttgctggacttgagcatggccagctgtggtgatcctggtggagtgtggtagagcagctcagaggtgaaggctgcatttgcaatctgcatgcattcttccaaggtcttcagaaaagtattacaggttgatttcagcaaagttcccacatcaattccatcctcagaattggacacaccagttgtggtcacttcttttgttttatctacttgctgaacaaggaggtcacagcagagtcttagttctgacattttggttttcaagttttcagtgttttcagcaaactctttatcc

SEQ ID NO: 322592 - DNA, 308 bp, Homo Sapiens
gccagcaaatcctagaagagcaagactttaaagaagaggattttggcctatttcagttagctgggcaaagatgcatagaagaagggcacacagaccagctattagaaattattcaaaatgaaaagaataaggtgcgtacaatcttggtgtttacttttcagtcttgggaagagaataatcacatgatgctattcatccagtcatttatccatcaaacatttaagaatctacttaaattttcacgagtagggaactgaaaacaaaaaaagaattagaaatatttaggccaggcgcagtggctcacgttc

SEQ ID NO: 322593 - DNA, 240 bp, Homo Sapiens
aatttaacaatgtctttatttaatgactattcatgttttcaaacaagtctctatgtacagtaaatatacataaagttctaataaacaacagtgcaatgcttcccaaagtcttaagcactagtatcagattcttacaacacagaaaccttttattttgccaaatgattggattaaggatacagaatatgtcaaatactcacttgtggctttccaggtcaccctctcccgccaaacaaacac

SEQ ID NO: 322594 - DNA, 717 bp, Homo Sapiens
  misc_feature (576)..(576): n is a, c, g, or t
  misc_feature (656)..(656): n is a, c, g, or t
  misc_feature (684)..(684): n is a, c, g, or t
tttcaggataaaatgtttatcagtattcaaataaaatatcttaaatggaaagagacaggaaagaacatggttaaatcacagaaaatgaagaaagggagaagctgatcatgatcttgtacaacattatgacagcactaaggtattacgtatccaatacaaggatacttaatagaccaaagaatttaaaatcccagggaactggaataaccagccacaaaagaggcctctctttgttgtggttcacaacacaaaaggccatcaacaaattaggaaatattaaaattaagagagcagcaggtttcttcttggtagacagctcatgctaccatccacaaagtgagcagtggaaggggtatttaatgtcaaggctttattttgaatttctgttccagatgcctctccacagcattcatcacaccttccttcacacttgaagggaaaagtccttaagagttcaccacattttggtgttatttttagcataaacatttgtttttctataagaagtatctctctgggattcaaaccacagaaatgtcaatgaatgttatttccattgtataatcatttaaaagncacctacagaggctggggtgcagcagcttgtgcctggtaatctcaggttactcagggagggctaaggcagggagggattngtgtgagggtcagggagttcaaggaccngcccggggcaacatgggcaaggacccctcatct

SEQ ID NO: 322595 - DNA, 537 bp, Homo Sapiens
  misc_feature (514)..(514): n is a, c, g, or t
caaggcaattctttgctctcgcgggtttcggggtctgtgttgcaaagcctttaattagaatgtttgtattttttacatcatgcataacttcacatttgtgattaattagtaattatttcaatacttgtaagctcatctgcctcagatttaatcataatacatgaattaaattaatcaaattaaggaacagcaatttagaaagaaacacactttaagaaatcaaaattctcaattcaggcagtctgtttctatcatttggtattctactcctttaaaaatttcatattgcccaacaaaaagtggttatttttactgtttttggagatgactgaacagatgaaggcatcagatgccttcatcagctggtattttgcctaagatctatttaagataaccttttcttatattttttacttaatattgggcataatcgtatcattcaagattaagtctgggttatttctttgataagaactgaatgtggccgggcgcagtggtcacgctgtaatcccanactttgggagccgagtgggtgga

SEQ ID NO: 322596 - DNA, 540 bp, Homo Sapiens
ttttacttggctacttaaaactcttctgtattttctaaatcttcttcaaagatctttgtttgtttttaatcagaaaaacatgccttgcatgccagttgttagagagatgcaagagaacagtgtgagtacatgggcaggccagatctggcaggctgtagacaaatgggaaccaaggctcattatgaagacagagagggaaaactaagtgaagcactaggcctcccctgcatatggctggctgttaggtatgctttacatatactggttcttctcctttagtaccctgatggtttaggccaggtaacaagaatcccactttgctttttgttccatgtcaatcctcatgacgtagctgttgtggcattaatgcgtttcaccatgacttcttcatattgtttttgtgtcagtaacccttctgttatgcttttactttcttcaaatttgggtaacacaactgcaatgtagccttcagtagatggcttttcttgaagaatagatggcttatggaggatgttttcattcacttccatcaaacgtcct

SEQ ID NO: 322597 - DNA, 1005 bp, Homo Sapiens
aaggtagcgaggcctgggtggcgaattcggcacgagggccaggaagcccccctggtgctctacaggcctgtgggcgaccagtggcagtctgttcctgagagcaccgtgttaaagaaagtctctggtgttcttcgtgggaactgggccatgctggaaggctctgccggcgcagacgccagcttcagcagtctctacaaggccacgttcgacaacgtgacctcctacctgaagaagaaagaggagagactgcagcagcagctagagaagaagcagcggcgccggagtcccccgcctgggcccgacgggcatgccaagaagatgagaccgggggaggcgacgctaagttgctgatcgtggcggtcagtggtgtctctcacctcaaattaggaaaagctttttaacttgttcccctgcatcctggcatgtcccttcaagaaggaaaaggtgacatcagttgtgaccagctcagaggatggggctgtcccctgggctctagaaagaacattctgtgtcaccagcacaggctcttgctgggtgcctgtgccccctttctggttgaagggaagccagaccagtggagtggaagctcttgaagcactttcttttcatgtcggaggctgcgtgtgagccggtggtggcggcagctgtctgtgtttctcctgttctcataccgcccttcgtgtcggctgcatcttcctctaggagcatctgtgggctgacgtttctggccatggtggatggtttcatggttgttccgccgtctcagcatccaggtgacgtggctgtcccgcagtagctgctcgcccacccggcttggttgaactcagcacgaatggcttgagccttgcccaggccccagccatagaccctggggctcaggagctggctccttgaaaagtggctccccttgttggaaaggggcaaaccccgttttcggggctcccaggggaccccggccggggatcggggggcaacaaatgggggaaccttggttccggggagggg

SEQ ID NO: 322598 - DNA, 1232 bp, Homo Sapiens
  misc_feature (414)..(462): n is a, c, g, or t
gggggtgttcggccagggtttttgcgggttttgtgcgagcgtgggggagtggcgagtgtgcgtggtggtcgggggttctgccggagtgtgtcggtcagtggagtcgggggagtagggggccgtgtgttgtttggcggggcgcccgcggcgctggtggtggccagctggcgtggtttaggagtccttatttgggtgcgcggcagtattgcgattgtatagtggggtggtgatgcgcgaggatggcagcgcggcgcgtcgtctctgtggtgtggctctgatgatcgctggtgccgttgtcttagattgttgcggggggaccaccctgtgagtcgcgtctccctgattcctgcgatcctgaggtgagtgcgacggcacatttgcgtcggaggtctcaggctcgtgacctctattttnnnnnnnnnnnnnnnnnnnnnnnnnnnnnnnnnnnnnnnnnnnnnnnnnaacaagcacacaatctacaggaaagaaacattataaaaaaatcaaaatctctagaaaatttaaatcatgatgaattatttgattcctttagaatttcacaaagccacaaagctaataacaatgatccatgatcacttaacctacttttaaatgagtgtttggttttaagtttggtattaaagtgcaaacttaaattaagtattcacttcaagcagttcataaataaggaacaatgtttcaattgcctctatctttacaatctcaccataaaattcaaaatttaagaacaagagttcactttgagggaatttgctcaggaatcaaatgcaacacgatttaaaaaaaggaaatcaaagtttagtcaatttctactcagtaattaatggtcatgctgacccataaatcacatgaatgtagataccactttatttgaacatcacacacaatataaatttaaaattgccacaccctttcataaaccatcactgcatatattagagctttccttgacaaagttattgagctcttattatagatcaaaagtatagttttggttttgttttattttatttagaagcatgttcaaatgactaaagctgggctcctaaaatcgagaactttggtgcagtaggtgaaaaacagttactaacttctgcaaatgaaaagcacacaactaaaatcaaataaaaacccaacaataaaatactgtcaaacttacacaatttaaaaatcattgctagaaaaagccctcattgtcacgatgttaaaac

SEQ ID NO: 322599 - DNA, 629 bp, Homo Sapiens
  misc_feature (55)..(55): n is a, c, g, or t
cccggtgggcccccccttttgggaccccgggatgaaaaaggtgggaaaagttgcntttttcccccttttggtggccattaatccttcaaattccaaagttgtatatttaagagtagatttagtaagttgttgctagcaactgctgcaattttaaaattataaaataagaattagggggaaaatcaattgttataaatttatttgggacatttattgccaccacattggaagcctttgaaaattcaaacagaaaccaatacacttccatcttttttactttcgataaataatatctttgtgtatatgtatatatagatagatatacttaatcaataagtcatttagcagggtttttacattttatactgcattcatccaaaacagctctttccagatcgataggatgcaaatgaggtaagaattaaggcaaacccaaaaggcatgcaaatgtagtacatttatattcactgataatacaaggcttctgtgggtgtgtggaccagacacaggggccaagggtccctctgtgtctgtccaatagtattttacagaatggtagtgacatagcttataattaagttacattaccatgggggtctcagtgctactaacattatgtaatcaaggag

SEQ ID NO: 322600 - DNA, 1169 bp, Homo Sapiens
  misc_feature (53)..(115): n is a, c, g, or t
  misc_feature (129)..(179): n is a, c, g, or t
  misc_feature (185)..(359): n is a, c, g, or t
aaagaggggtttttttcctaaaattccccccggggggtgttttttcctccctnnnnnnnnnnnnnnnnnnnnnnnnnnnnnnnnnnnnnnnnnnnnnnnnnnnnnnnnnnnnnnntttttcaaaaaaannnnnnnnnnnnnnnnnnnnnnnnnnnnnnnnnnnnnnnnnnnnnnnnnnncccctnnnnnnnnnnnnnnnnnnnnnnnnnnnnnnnnnnnnnnnnnnnnnnnnnnnnnnnnnnnnnnnnnnnnnnnnnnnnnnnnnnnnnnnnnnnnnnnnnnnnnnnnnnnnnnnnnnnnnnnnnnnnnnnnnnnnnnnnnnnnnnnnnnnnnnnnnnnnnnnnnnnnnnnnnnnnnnnggcctgagggcacatgtttatttagcagacaaggtggggctccatcagcggggtggcctggggagcagctgcatgggtggcactgtggggagggtctcccagctccctcaatggtgttcgggctggtgcggcagctggcggcacctgtgcactcagccgtcgatacactggtcgattgggacagggaagacgatgtggttttcagggaggcccagagatttggagaagcggatgaagttctcctttagttccgaagtcagctccttggttctcccgtagagggtgatcttgaagtactccctgttttgagaaactttcttgaagaacaccatagcatgctggttgtagttggtgctcaccactcggacgaggtaactcgttaatccagggtaactcttaatgttgcccagcgtgaactcgccgggctggcaacctggaacaaaagtcctgatccagtagtcacacttctttttcctaaacaggacggaggtgacattgtagctcttgtcttctttcagctcatagatggtggcatacatcttttgcgggtctttgtcttctctgagaattgcattccctgccaggcctaccacataccacttcccctggaattggttgtcctggaagttctgctgcagagggaccttgctcagaggtggggctgggatcaggtctgaggtggagtcctgggcctgggcatgcagagcccccaacagggctaggcccagccacaggagacctaggggcatgatttcagggccgaggaagcaggcgctgtggtggctgctgggcctggcaggggtggagcgg

SEQ ID NO: 322601 - DNA, 972 bp, Homo Sapiens
  misc_feature (42)..(42): n is a, c, g, or t
  misc_feature (50)..(50): n is a, c, g, or t
  misc_feature (53)..(53): n is a, c, g, or t
  misc_feature (71)..(71): n is a, c, g, or t
  misc_feature (73)..(73): n is a, c, g, or t
  misc_feature (87)..(87): n is a, c, g, or t
  misc_feature (100)..(100): n is a, c, g, or t
  misc_feature (123)..(123): n is a, c, g, or t
  misc_feature (142)..(143): n is a, c, g, or t
  misc_feature (174)..(174): n is a, c, g, or t
  misc_feature (296)..(296): n is a, c, g, or t
ggacaataggagggccttttataggctaaacattacatttgngcctacancantttaataactccacaccncnttaagggttgtgcnttacaaaatttcnaaactacttcttcacaatgtacnggtgcacaataacaatgtnngcatacgttcacatacacacatttttacatnggaatgtttctcattaaatacacatttagtgaacttaacacagacactacttgtgcctaaaggccatccccaagccccagggtcagaagtgccctagaaagaaataggtatagatgtggaancattatctaacattcaaattagcactctaattatcagaaatgatgacataatgaggaatactcactttaatatttctaaaaaagatgtcattaatctatactaaatcatttgacagccttattcatcgaaaaaataaacttcaaattttcctcaatacataagttaatctcaacatagacatcactgccatacgtacacacccttaaccttaaaaagaaaaggaattttaatcttagagcaagtgcttaacattgaagatcatttgcaaattggtctgtggttttactttataatcactaggacatttaattccttatcaaatagacaaatgctgaatatctcttcattggtatatgtactcaagcctcccttataacacagatgtgtataaatcatggttcaagatgaaatgtttataatgctttaccacccacagggtgtcaactcactacattaaccagatgtggaaaagaatctcacttctgatcagttcctgaatttctgtatgattaatcacaataatacagaactttaaattacattagtcttatataaatacttacatatcaaacgttttgaatcctacttatcaactagaaaagtgataaatcagaaatttcctttttctctattaagaaaaatgaatctagccttatgtccttattcagaaattgc

SEQ ID NO: 322602 - DNA, 531 bp, Homo Sapiens
  misc_feature (34)..(34): n is a, c, g, or t
agacatgggtacacgttgacaggccgccctccgnactggcatgttgtgaccattcctggtgctggtcttggtactgttctttcctaccataacttattggaagagggtggcattcctgccttgcagccttttctccagtgaggagtgaacagtgggcacctgagatcctggcccacgctactatgctttcaggctacaaccactagcacggctgacgatggccctttctgcggagaccgagtcacacatctaccgagctctgcgtactgcttctggcgctgccgcccaccttgtggccctgggctttaccatctttgtggctgtgcttgccaggcctggctccattctccttcctgatgaccgaggcactactggtgttttctcctgagagttcgctgctgcactccctctcacggaaaggccgagcacgctgccactgggtgctgcagctgctggccctgctgtgtgcactgctgggcctcggccttgtcatcctccacaaagagcagcttggcaaagcccacctggtta

SEQ ID NO: 322603 - DNA, 1004 bp, Homo Sapiens
  misc_feature (574)..(574): n is a, c, g, or t
aggctggaccggtccggattcccgggatccggaagtaaagcggctccgtgacggagcggcggtgcgcgcggcagggcccggagtatcccgctttctttggaggaaaccaccgcatcagatctgcgctgcggcagaggcaggctacaaccactagcacggctgacgatggccctttctgcggagaccgagtcacacatctaccgagctctgcgtactgcttctggcgctgccgcccaccttgtggccctgggctttaccatctttgtggctgtgcttgccaggcctggctccagcctgttctcctggcacccggtgcttatgtctttggctttctccttcctgatgaccgaggcactactggtgttttctcctgagagttcgctgctgcactccctctcacggaaaggccgagcacgctgccactgggtgctgcagctgctggccctgctgtgtgcactgctgggcctcggccttgtcatcctccacaaagagcagcttggcaaagcccacctggttacgcggcatgggcaggcagggctgctggctgtgctgtgggcagggctgcagtgctcanggtggggtggggctgctctaccccaagctgctgccccgatggcccctggcgaagctcaagctataccatgctacttctgggctggtgggctacctgctgggtagtgccagcctcttgctgggcatgtgctcactctggttcactgcctctgtcactggtgcagcctggtacctggctgtattatgccctgtcctcaccagcttggtcattatgaaccaggtgagcaatgcctacctatacccgcaagaggatcccaaccatgagcctctttcccagcctaaggggaagcctgggatttgccccctccctgtaaggagctgggccctaggggacctttttgaacctcctcctcagcttgaagtcagggggaccaccttccaggcactggggaacaagttggggccattttgggagcgccccccggggggga

SEQ ID NO: 322604 - DNA, 569 bp, Homo Sapiens
  misc_feature (520)..(520): n is a, c, g, or t
acaaattttttacttttttctctcctaaaatttctgaacatacagtacaagtatgagctgccttgcaggagaggcagtcttgcagccccagcttcatccagacacatgatgcctatgttcctctgggatgacagagaaaggggaaggaaatgggaggcactccagcatgaggagcaggaattcacacacgggcctccaaatgcccaactgtcccagtgcctgaggtgtcccctgactcagctgagagagttcaacaggtccctaggcccagctcctacatggaggggcaaatccaggcttcccctaggctgggaagagctcatggttggatcctcttgcggtataggtaggcattgctcacctggttcataatgacaagctggtgaggacagggcataatacagccaggtaccaggctgcaccagtgacagaggcagtgaaccagagtgagcacatgcccagcaagaggctggcactacccagcagggtagccaccagccccagagtagcatggtatagnttgagcttcgcagggggcatcggggcagcagcttggggtagagcagccc

SEQ ID NO: 322605 - DNA, 541 bp, Homo Sapiens
ccattcacaaaggtttattgggtccctgcctggtgctggtttgggttagtcactgtagaggatccatctgggccagcctgggaggggcaggtctggagtccgaggcagacacgaaaccgggggtgacacccaggggctgtggaggctgccatgctgaggacagctctgggaggaccgctgaagaggatgactagcgggtggggagtggggttcagccatctcccgggagctgggagggcccaggtggaggtgagggcagcagaggaggaggaggaatgggggtctccaggtagaaaaagggagcagggaatagcatgagtggaagcccagaggaaggaaagtacccggagggtctctgtgcttcaagaggccagtggaggggacagagacaaacggccagtggtgaagcagggctgacaccctggcagcaaggacactgaggcacacacctgccattcaccagcactctcctccaggtgtgcaccagctcctgcccgaagcctcaggaggtcctcctgcaggggaacacggggccaccagt

SEQ ID NO: 322606 - DNA, 1105 bp, Homo Sapiens
cacgcacgcgaccggggcggtggttggcggctacggacgcgcaggactgggggacgggcgggtacggctatgggcgaggcggaggcgccttctttcgaaatgacctggagcagcacgacgagcagtggctactgcagccaagaggactcggactcggagctcgagcagtacttcaccgcgcgaacctcgctagctcgcaggccgcgccgggaccaggacgagcctgtggagtgggagacacctgacctttctcaagctgagattgagcagaagatcaaggagtacaatgcccagatcaacagcaacctcttcatgagcttgaacaaggacggttcttacacaggcttcatcaaggttcagctgaagctggtgcgccctgtctctgtgccctccagcaagaagccaccctccttgcaggatgcccggcggggcccaggacggggcacaagtgtcaggcgccgcacttccttttacctgcccaaggatgctgtcaagcacctgcatgtgctgtcacgcacaagggcacgtgaagtcattgaggccctgctgcgaaagttcttgggtggtggatgacccccgcaagtttgcactctttgagcgcgctgagcgtcacggccaagtgtacttgcggaagctgttggatgatgagcagcccctgcggctgcggctcctggcagggcccagtgacaaggccctgagctttgtcctgaaggaaaatgactctggggaggtgaactgggacgccttcagcatgcctgaactacataacttcctacgtatcctgcatcgggaggaggaggagcacctccgccagatcctgcagaaagtactcctattgccgccagaaaagatccaagaaggccctgcacgcctgcccccttgggtgacctcttgtacccccaggtggaaggcagacagcaggcagcgccaagtgcgtgccgtgtgagtgtgacagggccagtggggcctgtggaatgagtgtgcatggaggccctcctgtgctgggggaatgagcccagagaacagcgaagtagcttgctccctgtgtccacctgtgggcgtagccaggtatggctctgcacccctctgccctcattactgggcc

SEQ ID NO: 322607 - DNA, 1020 bp, Homo Sapiens
  misc_feature (721)..(755): n is a, c, g, or t
  misc_feature (873)..(873): n is a, c, g, or t
gattccatttgttttatccagaagaaaaacattcaaagtaaaatgtgaacatttaattacctttaaatcatatatgaaataatttacatgctatacacttccaaacacactgaacataaattcaactttataagacatatacacagtctgcttttgccaacatataccctgtaggtcacttaagatgtaactgatttctcagtccacctgtgagcatataaacacacaaatgtatgtctgaagttgaagattaagataataaaccagagttgaatacaagaagtcagccacagaagattctaagaaccactatcagtgtactggaacaccaaggcacgtaaaacttccctttgtagtcacagagattaagtttccattcccaagtggcttaaatatggaagcaggattggttaatcacatactatattttatagtgcatttctgttgctgtttaaaaaggaatattttttaaattacataatgtattacagaaaagcattggaaaaataaacaggataagataagctctcatacataaagttttttttggtctgaaaaagatgtttatattcaaaactaatataatagaggtgtaacagaaagtagcatgaggaacactatgcaaattgcctaatactcgaattgtacttcatgccaccatgttatttaaattttcaattttaaagccagttgggtgatattgctaattccaagtgatagnnnnnnnnnnnnnnnnnnnnnnnnnnnnnnnnnnngtaatttaaagatatgtactagtacacagaataaacagtaaatataacatggcaaaatgaaatctttcccagagtttatgttgcttttgttaaacagtaactttgtactagaatctcnttttttttctatatttaacaagaagaaaaataatgctccacatagaaatgacttcaaaattcatgcaaccatgcacaacctaaactatctgtacttcccttttttatttacccaaaagtttttgagtaaactgaaagttagataccc

SEQ ID NO: 322608 - DNA, 514 bp, Homo Sapiens
cgggaagccggtggcccacagttgtggccacagtgcccccacccagtggaccttgatgtcctgaggaccacacagcactgtttacaatttgagggacccacatctgtgcacctatcctctgtgtgattaaatatatttttcaggggccctcagagatgtgtccccatccacacatcatggagcagattcccggctggtcagggtgttaagattctctggagaacccggctttccttggagactttgctcaacagaggaaccagttgccattcaccaggttgaaggttcccctgaggttgcatggtgaccaccaggggcaagcacagcccggcgcagctgctcagggacagcagtctccccgggcctcctggcctctccctccacgggctgctaacccttgccgtagcttgggtttgagtgtcaagcacaggccagaatccacactcctgtccccacctgtcaatcacttcaaacacaggttccctccttccaattccaaagctggaacaagggc

SEQ ID NO: 322609 - DNA, 1324 bp, Homo Sapiens
  misc_feature (449)..(449): n is a, c, g, or t
ttttgctgctttgacctgacgaatttattgaagagagctctgtccttctcccttctaccgagaagaggcggcttgcagggctggcacctgtccacacctgtcactgggcctttccctgggctaggctgagtgggagcagatgccctcatcctatgtgcagggcctgtgcaggagccatcacaccaccttgttgatgatgacacctagttcttcaatctcacactggacttcatcccccttcttgagaaagacaggaggtttcctgaatacaccgacacctggggggggtcccagttagggatgacatcccctgggtaaaaggtaacaaactgggagacccaggctatcaggtcctctgtcttgaataccatctggttggtgttgccgctctggaccacttccccattcactcggcagcagatctttaagttgtgtgggatctggtacanctgtcccttggtcaccaaggcaggggcccagagggcagaaggtgtcgaaggtttttcccagcagccattgtttcccattacgtctcatttgccagtcacgagcactcacgtcatgagccacagtgaagccggccacgtgggccatagcatctgtggccttgatgtgcttgcctttctttccaatgaccacggccagctccacttcccaatctacctcctggctctgtggtgggaggaccacctcatcatagggccccacgatggagctggcaaacttgctgaagatgatgggctccttgggcacgggcacgttctgttctttgcagtggtccacataattcatgcccacacacaccaccttatctggtcgtgtgactggagccaggaaggttacctccgaccgtggtaggactggcaactgggcagccagggctcttcttgccactgagagggtggcctctccctgctctaggaaactgcgtcatcgtcttcgggagtgtggggtcaaaggcattgaggttgataacccctccaccattccctgtctccaggcccaagtgaggccccaccaggtggggtgcccggaactgcactagtctcatgtctctggagggttgaaagggccacttctgagcctgcagcagaactgtgagtaaccttcttctaccagacaccagcatcagagcctggccgcggcggccgatcttcctgcgctgtagggttagagctcgcggggccgaaggtcaagggcggcgggcgcctgagcactgccaccagtgaccgcagccagccggggaaatgcagcagctgctaacccagggccactcggccggatcacccgagagaaaagcggcctcgtgccgaattcgccaccc

SEQ ID NO: 322610 - DNA, 564 bp, Homo Sapiens
tttttttagtgctgtagacttttaattcatacctcctgctctctcacccgtggcagctgagttgggaacagtactgtaacaattgtaactgtaactccctgataagcctacaggcatggggtctggatgagtagacaggggatgtgatcagagctgactatgtttaaggtttcttctttcaccctccaaaaaacagcaaggggctcctgagatctcgacaaccccgtccaccttggccagacctcgtgctcctgcctggatctgaggctgggtccagggtctgcctacctttagatcgttttatctcagacctgcccaaagccagatgtagtggttctgggagttcagggacagacagtggttagcaatgagcacggtacctgccagtttgtcacaagcacagagggtgtgtttatacctgcacacttccagaaaacagatcccagaccctcagcagcccacctgcagacaaagaccaactttctttattttgagaggcaacctgaactcacacccaatatatggagctcttgcagttattagctttaaaaaaagtgccctgga

SEQ ID NO: 322611 - DNA, 542 bp, Homo Sapiens
  misc_feature (297)..(297): n is a, c, g, or t
  misc_feature (316)..(316): n is a, c, g, or t
  misc_feature (400)..(400): n is a, c, g, or t
  misc_feature (407)..(407): n is a, c, g, or t
  misc_feature (465)..(465): n is a, c, g, or t
  misc_feature (501)..(501): n is a, c, g, or t
  misc_feature (514)..(514): n is a, c, g, or t
gggcccctaatactttcaaataaacaaatggatgttgtcattgctttattactcatagtttccaagcaatattacatatataaaagtcattttaaaaacaaccaggtttgctagaaaagtgttttttcttggaatcatggatttctacaccatttatacctggagtcctttatattaaatatattatttacgcaggcactaggcaaaattgaagaagttttgagttatctcctccataacccccaccttcccacattcccacaaaaaaatcccaccctttccctattatatgggggntattaacattaaaaacaangggggaaatacacaggggcatttcaatttggaatcacttttcccctattttttacatgtctggggaggagttggggcttggggntatgggnatttccaaagggttcctccccagggggttccttggatggatgggattcaagggggggnaatcctttccaatggctatccctctttccccagggnaatttccctgganggtccttaggggtttccgtggacagggg

SEQ ID NO: 322612 - DNA, 781 bp, Homo Sapiens
ggggaaaatggagttttagtattttttagtaagcaggaaccagggggtacttcttaagaggcctgttggaggggtggtgttttttggtttctgactcattttgatggtaattagataatctactttggtggatttattttcttccactgtgccccttgaattaacatgactgatagtggaggcttagatacaaccctcctccactccaggcggtttcctatctatctatctgttggacaattttcaattctttcaacccagtttcgaccatgaatgtgacaggactttacaaataacacttgtaacaaagagaaaccccttttaactggacaaaacagagtttattcagtccagtaagcaatttaacaagtgtcagtctgatagttttgctcagtggaatgtgctaacatcagttctagtagaaccttttatttcataaagcatttcaatgcaaattataccagggacaaagtcaaaacttccatcagtgcagcctgattaatcatctgcataactgcgccacattcaacattgaaacaaagaactaattcaaaagttatgtgcttaatttcaaattttcccccagtccaagtgtagagaccttgataatactgtggcttttcttttttcttcttaaaaaagagatggtaactaagaagggggtgagaaaacagactgaacacgtaagtaacagatcatgactaacactctgccaagtcttcccaaagtaaaaatgttggtgccagtgtttgttttggaaatgaaaatcaatttcggttcc

SEQ ID NO: 322613 - DNA, 873 bp, Homo Sapiens
  misc_feature (744)..(744): n is a, c, g, or t
  misc_feature (771)..(819): n is a, c, g, or t
  misc_feature (829)..(829): n is a, c, g, or t
cgttctgctgctgctgactgaggactgcagaccgccaccactcaggggctctggaggggtcagctggagcccaccaagctgtcactgctgcactcactctgcaagggatcaggaccagcaacctttatattctagattctaagacattgtacagagaaattcagaagtgtaaaaatattgcacattgacaaataccaagaatttttgcgtatgtttatattgtattgttctaaataatgggtagcctgtgaaataagatcttgccacccatgtaataatagtagtaatactatagttaaaatggctgtaagaatagttttataaaagtgaatacacagatctattgtatttgaaacataactttgacaattattagtgtgaccaaagtattaggcggttttcatacatttttcaccttgtacaaaattatgaattcatttttcctccaggccgacaaggagttgtagaatgaaaatgccctctaagtgttattttggttgttctaacttacaaaagtgattttgaataagaaatatttggtgttctttttataaccagtttttgattggtaattgttttctgtattgtttaaaacggatcaaaaatgtaagtctattggtagagattaagtaaagtatttattgctacatcatagttgataaattgattttatcgtaaagccatatgttctgttcaagtcttgtttgcttgaaaatgatttattcctacaaggtgaaacactanactatttggagtgtatatggcttgtgnnnnnnnnnnnnnnnnnnnnnnnnnnnnnnnnnnnnnnnnnnnnnnnnncatttggtanttcatctgccttttaacccattcaccaaaatttaccttgttcac

SEQ ID NO: 322614 - DNA, 503 bp, Homo Sapiens
tctagagcttttgctccattcatttacatatcattttattaaaaacttactaagttcaaaacaatgttaaaataagttgtccctgcccttggggagctcagctaagtaggttttgtttttcatatttctgctgcaagtgcctccgatgcctgtctgttgctccttaggactggccaaccaagcgcaccaggtgacacttcagtgaatggccctgtatgacgggtgacgtctgctgctgctgactgaggactgccgcccgccaccactcaggggctctggaggggtcagctggagcccaccaagctgtcactgctgcactcactctctacatgcgagtccataggcatctcactggcaatcgtgtaaccagggcacaagctctccagccgggtggctcatcacagcccaactcagccactcatgatggtgtgaccttaggcaggtcttggtgtcagctttttcttcagaaaagttgagcatcttaatcagatgggtttcactgc

SEQ ID NO: 322615 - DNA, 780 bp, Homo Sapiens
caaaaccccaggggaaaaagctcaatttctcatggtagccttacctaacctccatgcctccagaaagtcatgcaaactcatgccacaacacagccaacagcaacataccatcggcatggcactgagagcaagcaaaaaagaccacgggggtgacttcactgtctccactgaaagaacttaaggtctgtctgggtgaggggtgtacagtcttaaatattacagcaatcatttattagaaatattcatctgcttctaagttatataaacacttttaatgcaaacattcaatagggcatatttcccactgctctcaagatttcatctctttctgctgccgtaggcataaatggcttcactccgttctttcttctctgcatcacgatagaattccagaatctccggcagtttttgtacctcaagaagtaagtggaacacctttccctgtcatagttattttcatccagacatttggtggaagcatcagattccttacagatataagagaggcatcatttaaaaggtaggacaggatcgacaaacaaggatttatgtcaggatctctcagcctctgtgttaccgagggcattctaacagtgttcttaccagttcgagtttggtgcatgagtttcttcacatttcatttccttttccttccggattctaaatacaaggcactctaagtttggatttccgaaagtcccctcctttgcatgagttcctcgtgtattaactccggcctccgcttcgccagcacccaggccgtctccagctccaaacccc

SEQ ID NO: 322616 - DNA, 637 bp, Homo Sapiens
  misc_feature (335)..(335): n is a, c, g, or t
ggtggcggcgagagggagttcccacccgtggctttcttagagaaatgaagtcttaagtcttaaatagacaacaaggaggggccgatcggtgtcttttggacgcgtctggagcccctccctccgccaaaggaaaagccccttggatgagaggcaggcgcttcagagaagctaagaaaagcacctctccgcgcgccccacctcctccgcctcgcgctcctcctgagcagcgggcccagactgcgctccggccgcggccctcgccccgcggagccctcctacccccggcccgacgttcggcccgcgacctgccccgagccctctccatggaggcagcnccgcccgtccggctcctggaacggagccctctgccggctgctcctgctgaccctcgcgatcttaatatttgccagtgatgcctgcaaaaatgtgacattacatgttccctccaaactagatgccgagaaacttgttggtagagttaacctgaaagagtgctttacagctgcaaatctaattcattcaagtgatcctgacttccaaattttggaggatggttcagtctatacaacaaatactattctattgtcctcggagaagagaagttttaccatattactttccaacactgagaaccgaa

SEQ ID NO: 322617 - DNA, 782 bp, Homo Sapiens
  misc_feature (704)..(704): n is a, c, g, or t
agagcaggtatgcttttgatggtagggaagggatggaaaaaaggaaaagcaatagaaactgtccaattcacatcagttatccgtctgctttttcttgagagcttgtggaaggtgttaacgtggctgggaacatcaacaccttggcatgcatgaatgttaagtcaggaaggccagcgatcaccttgatagcttcttcacttaggtgctcttctcttttcggtttcctactgacaaatgaaaaaaagacaagtgtgttaatgtgactttgctgtaggtaaaatggggagacaatccactctcaaggtaggacagttaggcaatctgtgggggacttgagtattttttcctctgctagtccctgaatcttgtaatacttttgtgcagtatgcttcctgtgccaaatgcccaaatctcatgaagagtgacatgcggcctatttatgttcattaaagctaggcatgcacacacagatactcacatgcacacatagacagctcgtgtactttctagcctttacattaggctagaagcatctacccaggcataattttaaaatgttactaaacagaaatataaatctgaagccttagtaacactccacctaactgggtttttccctgcccctccacccgctaaaactacctcagcctgaaacaaagtgtgcccagggaaagactaagtcattttaacctcaggctctcttntaatcccagtggggaattccaggagagaaagctctcagctcagaagacccagtctcagcctgttgggatacagacagc

SEQ ID NO: 322618 - DNA, 454 bp, Homo Sapiens
ttaattagagcaggtatgcttttgatggtagggaagggatggaaaaaaggaaaagcaatagaaactgtccaattcacatcagttatccgtctgctttttcttgagagcttgtggaaggtgttaacgtggctgggaacatcaacaccttggcatgcatgaatgttaagtcaggaaggccagcgatcaccttgatagcttcttcacttaggtgctcttctcttttcggtttcctactgggtagatgtgcttgtcttctctactgtagacatgagtcttgccaaatgcatcagtcactttgaggcttgaggtggagatttccagcttagaagttgttaactcatacaactccggatccacaccatctaaagggttagtaaggccactgctactccagtcaaactggacgggtggtagagactcctggaactgatcagatgtacatgtgttcatatct

SEQ ID NO: 322619 - DNA, 923 bp, Homo Sapiens
aaaaacgctaagagaactttattttaataaaaatgtcctatttttcaggtgaccccttcctttaccactagaaagcagctctattgctaaaaagcaatccatttatttagacattctcttcttaggcaactttaaacttttccaccgccgtaacaccactctgtatttttcactttcagtcttctcttcaaacacttttttcaagagaatccgcataactgtctctgttcctgcttctttatcctctccaatgagaagatccaatgtatctcccactttcaccgttctgcttttcttccataatttttcctcattcagcctgaggttcacctttgtaggaaaggcatcttccactttgtttctcccaatatctagccccgtcttcaggacaacatcataccgaaaagactgaactgctttttccaggtctttatagtttttgactacagtaggatcatcctcaagctcctcttcctgctcactcatctcatcatgatggctttcttcatcagagtcctcttcatctactttttgcagagactttttagtagattttgtagaccttatattacttttgaagtcttacggaaaaaggaaaaatacattctggagatagtaaaagccctgggagtctcagtgagaaaatattataaaaaagtgttttataatttggtgcacgtaacttggtactagaaaaatacaagtatcgattccaggaagtacagagtttgtatgatgaaggtgtccctcggagaacaccccagagtccaatccaggcatctggctttcttaaaacaccggcaagcaatttaacactagccatagccatggcgcttataatctgtacgtcaggccctctcgtccctccccgcggccgcgcggactgcaggcctccaggctacctcgtgccgaaaactggggtc

SEQ ID NO: 322620 - DNA, 618 bp, Homo Sapiens
gccgctgctccagagaataatcctattaatctagcaaatgtaatagcagccacaggcaccacaagtaagaagaattcaagccaagatgacctttttcccacaagtgatactccaagagcaaaagtattgaaaatattttatttcagtgatacttcatccctgcaacctcaagccagtttgaagcaggatgtatgtcagtcttacagcgagaaaatgcccatagagatagaacaaaaacctgctcagtttgccacaactgttcttcctccaattcctgcaaactcgttccagctcgaatctgatttcagacaattgaaaagttctccagatatgttgtatcagtatttaaagcaaattgaaccatctttgtatcctaagttgtttcagaaaaatctggatccagatgtattcaaccagatcgttaaaattctgcatgacttttacattgagaaagaaaagccattactcatctttgaaatcttacaaagactttctgaactaaaaaggtttgatatggcagtgatgtttatgtcagaaacagagaaaaagattgcacgtgcattatttaatcacatagacaagtcaggattgaaggatagttctgtcgaagaactcaag

SEQ ID NO: 322621 - DNA, 704 bp, Homo Sapiens
  misc_feature (330)..(354): n is a, c, g, or t
accccccaaaatccatggacccttttgcatttatcattttaccttattctctttagtagctttggtaaaaccctcactaggagtgaatgttctcttagatatgattgtggttgcaattccattttttaaaaattcacattaactccacagtagagagatgtgacatgcatgtgtgtacatatttttatcttaatatataaaacaccactgagtataaaagttctcaaataaactattcatcatttatggtattctcacagtagatatgtcatctcattctcacagtagactgtcaactcaataattggacctaaaataacaagtttgctnnnnnnnnnnnnnnnnnnnnnnnnngtttactgcacattctaaatatattaaaaacaaatgtacccaagcgcctcaaaactagtgatattaatacacttgtaccttctaacagtgcttacgtgaagtaccaaaacctaaaataaaccaagcagagtagctgacttgtaagaaaactgctctgcctggtgaacttcagcatagaagagtgggctccaccttagattttccaccagcaagaggacaacagtctatcactcttaaacaataaacagggtaagactgaaagttgtgtctatttgcaaatccggataatgtcgtaactatacccaacacgtacacagggattggggtaagggaaaataattacactcccc

SEQ ID NO: 322622 - DNA, 813 bp, Homo Sapiens
cgggttataaaagattttaatatcaaataaaatgtacatgatcaaaaggctttgattgccatgtaaagcatagtttccaggttacatcaagtgattttatcttctcccatttcaaatgaaatgttgaaagcacaaacaatctgccatgaatgataggaagcaaaggcagcacatatcatctgcaagtttcttcccaaggctataaaatatcatgttcatatttttcctgtttgtgatcccaaagcaggcaatattttcatttcatccactctattcttatgtatttgaagaagcaggtgttatccacctaccacaagagcactgttcaccataccagttgaaggaacccaacttggcactgcattttgggcaaagaagctgtccatccatcactcccagcaaagcagattccatccactgtacaggttcaatgaaataagatgtacattgagcttgcctccctgtggtaagcatggaagatggtgtcattctcttgtgggcaaaggctataggtccacttccttcacggtgatccagaatactagaacttcgaaataatgatcgcctgcactttctacacttgtagagaacctcatctttcaatccttgtgaaacggtagttgggtcaccagcaaagagttcttgaggtaaattctgcaattctggatacttctctgtaaccttttgtaaacgatattgcttataaattgcactagaggtatccacttcgtatcccattgcctggtataatttcagttgccactcaaacccctcattcatcttagcctctggtttgagaatctggagcttttc

SEQ ID NO: 322623 - DNA, 445 bp, Homo Sapiens
  misc_feature (53)..(65): n is a, c, g, or t
  misc_feature (334)..(334): n is a, c, g, or t
  misc_feature (338)..(338): n is a, c, g, or t
  misc_feature (377)..(377): n is a, c, g, or t
cacggttaggaaagcacattgagcctgaagaaaactattttatatttttcttnnnnnnnnnnnnncacaaagtttgtaaatttcaatcaccattatcaggctttttaaacaacatctataaagaacaaacatccgcttcaaaactacagggagggaaggaaagggggggagacagacagcacccgcagacggggaggttttgttatcatttatttgtgaagttaaaaacgagcgataaaaagtaaaaactgccatacaattttttttgttgttctcattttgttttcagtttcaatctcctcttgaacagatgaaaagacaacagaccagtccngggnggggggacgggcggggccgcgggagctgagccagggcgngagggagagaagagggggcttggctgctgggggaaggggtcctgcaatacaacacctgggtccaagga

SEQ ID NO: 322624 - DNA, 333 bp, Homo Sapiens
tggctggctcccatatcccctgggctgccccctgccccatcccctttgagtgtcagaagcactctgagccaaggggacagggggcacgtgcactggtcacgagaaaaccctgggctcccactggggctcagccagcctcctatctttccttcttctatggacttcagacagccagtgtctggggactctgccactctacccccagccctacccaccagcccccaggtgaggcttccagctggggacctgcccagacaggctgagcttgggcgttggttggtggggtgatggctctggggagcgttttgccattcctaacaaagccacaaccct

SEQ ID NO: 322625 - DNA, 1663 bp, Homo Sapiens
  misc_feature (969)..(994): n is a, c, g, or t
ggtaagtggcgattcgaagattcctttggagtggatccatataatgtgttaatggtaagatgggatgagggcaagggcaacgtcattaagtttcctttttaaaatactttccaaactccaccataattacgttaagaacctgtactaggtcacttataccgtattgatgaacaagccacaaaattgtagaaatgattttgtgcttttgagtccagttctttttagctgtcttaagtgtttttggtggctgatttctgcttctctctgttttaaggtacttctttgtctgctctgcatcgtggttttagtggctactgagctgtgggacatatgtacgttggtacactcagttgagacgtgttttaatcatcagctttctgttcagtttgggatggaattggatgtatttatataagctagcttttgcacagcatcaggctgaagtcgccaagatggagccattaaacaatgtgtgtgccaaaaagatggactggactggaagtatctgggaatggtttagaagttcatggacctataaggatgacccatgccaaaaatactatgagctcttactagtcaaccctatttggttggtcccaccaacaaaggcacttgcagttacattcaccacatttgtaacggagccattgaagcatattggaaaaggaactggggaatttattaaagcactcatgaaggaaattccagcgctgcttcatcttccagtgctgataattatggcattagccatcctgagtttctgctatggtgctggaaaatcagttcatgtgctgagacatataggcggtcctgagagcgaacctccccaggcacttcggccacgggatagaagacggcaggaggaaattgattatagacctgatggtggagcaggtgatgccgatttccattataggggccaaatgggccccactgagcaaggcccttatgccaaaacgtatgagggtnnnnnnnnnnnnnnnnnnnnnnnnnntgttgacttgagatttcagactggcaacaagagccctgaagtgctccgggcatttgatgtaccagacgcagaggcacgagagcatcccacggtggtacccagtcataaatcacctgttttggatacaaagcccaaggagacaggtggaatcctgggggaaggcacaccgaaagaaagcagtactgaaagcagccagtcggccaagcctgtctctggccaagacacatcagggaaatacagaaggttcaccctcttcggaaaaggcccagctcaagtctgaagccgcaggcagcccagaccaaggcagcacatacagcccccgcaggaggtgtggctgggccacgtgggacaggaatccggtcagcagccccctgtggctagaggaacaccagcacaaacgacagcctcaagtctccttcgagctttgtaaagtatactcttcactctctttctcttctctgcaagaattctgattactacaaaggtgccaacttcaacattcacatttcaacttcaacattcacatttttactgacaattagaattaacaaacacgttatatatgtaaaagcttttcatttcatcttctctttgatatttacatcccataaagtaagaagtgtttattttaagatgaacagatgacaggcatcactgattctggatagt

SEQ ID NO: 322626 - DNA, 426 bp, Homo Sapiens
ttagatttttagtaagactattttatatacttttttacattgatcaagtacattatttttaccaaacaacattgtttcccactacatccatggttatgtataaaaaaacgccattgtcaattaagatgttaaaaaattatttccataagagtattaaattctaatctatgattcacttaacttcctactttataaacactaggtaaagtaatctcgcaagctgccaaagaacacatcccaagcagtaatcacagatgatgaagcaccttacaggacccctccaccctcaaacgcgcatgtccagagaagtattaatgccttaatagactactgaaggttaactatttacatcattctaaaaatattttaagctgtattacagtgctataaattctccttttaaggaaaaaagtaatagattgtttc

SEQ ID NO: 322627 - DNA, 476 bp, Homo Sapiens
tcgtgtgaatcaattcaccaaatgtaaaacaatgtacatttattagttgttttaaaacagcaaattactattcattgtgtaatgaattgttgccttactatgccatccacccatcttgtaggctgaggcttttatgcctgtgttcacccttccgcacacccacctgtgcttgtgaaatgtacacccacctgtgcttgtgaatagcattaaagccatttctacagacttcgcatgtgtagtttcattatcttctgccttaaaacacattaaggaaaccattctctttgtctcccaaattgtgaaacgtagttccatttacctgcttcccatgttttaaaggtcatttgtgatataagtattgaaaaaaattttccccctaaggaaactgagctctgctcaaatgccgaggtgaataaatgcagcgcttttcccacaaaacacaatcattcacacaaacacacgatgcgagtgcctgt

SEQ ID NO: 322628 - DNA, 438 bp, Homo Sapiens
  misc_feature (345)..(385): n is a, c, g, or t
cttgttgtggttagcaaaacgaaaggcttttattgaaaaatatcaagtgccccttccagggctgccggtccctgcccagcgcgagcatgggggcagcggcccgatggggctcgacggggtggtcaagtattggcggtcacccaggccccgtgctccagaagggtgaggtttcacagtccatgcaggttggtccctgggccccgaagtcgactgcccggcccgcaaagccgtggctgctggggaagctgccccagtccagcgcgggggcttcctggcttctgggggtgggctggcctccgaggcaaggctgcacgctggatggcctggtgcgcgctccagctcgcnnnnnnnnnnnnnnnnnnnnnnnnnnnnnnnnnnnnnnnnnctccctgcgtctgtcccttagacgtagtccttgcggtcgtagcctgtgccccc

SEQ ID NO: 322629 - DNA, 1350 bp, Homo Sapiens
aaagggttaaattcaacccattcccaaaatagaaatttctgaggcccgaactatgtgatttcatttcaatcgtatcactttcctctggattgaaataatttagaaacaataagggctgatcttaatctcactattttctgcatgagactatcgttccgattcatcccctcaatacacaccactgtccaacagtcttacagtgagcatcctctcaggtccctttctgctcgctgaaccttaagctggttttacccctcctgtctctcttctccaaaatcctctatatatcttaagaagaaaatattcctttaaaaaatgacaatttaaatacagtgtgataatgctacatttgatttaaagtagtaataaattataaattgccaaataacttaatgtaattcacgatgcaaatccttggtataaaaataatccatattgccctgaatataataaagcaatccagtgatttttaaattacttatgaaataaaggcaaaaataagatgtaaaatactatttataaaagtcaagtaagaaaccagtttcccataaatctttttacaaagataaatgtaatgtggtttactacttttaaaaattgtcagggaggtttgcaatcagtgttttcaaaaatgactctagggaaactagagactgaattatatattattgtgatgtacaacatattaactatatatataacaataatactgcaatggggggtaattaagctacttcctaacaagtacatttctttttcaaagtctttactgtaactgattaatttttaaatgttagttttcaaaaacttttctacttgagatatttatgttagtaagaagataccagaagtctagaatagtaatcaaatgcctataaaataaaataatgattgttcttgcatgttctgttattgtgacaaatacacattaaaatagataacattgctatgcctggaaattaaaaatatccaaatctgttagaaagaagtggaaaaggaaagaaaaatcgaaaattcttatttaaaaatggatctgaagtccttgtatttcttaagagcttgacttgtcaaatcacagtttatcttctttctgaaaccaagttgtgtcttccaccattcattcacgtgatatgtcaattctccattttgtaggtctcagtttgaattttcctgaatatttgcaaaactggtactggacttgagacgtttgggcagaatgagtttgcgtttcttttgctctgagtgaagaaagctactaaggtagaagacaacaggtagaaagagaatgaacacagaaacagcaattacaggcactgtgtcactgcaagggactgaacagttgaaagatcc

SEQ ID NO: 322630 - DNA, 816 bp, Homo Sapiens
aagatagcaatagtaaactgcagttgggtgagaccagcccctggggccatgagacttaagcagccctaaacgctgcctgagctttcaagagtagaagaaatgctcgacaaacagaaggaggctgtgggagggcagcaggacagccccaccagaaaaccagagcccgaatgggctgggcagggccagggctgaggtatcgggatgcaggaacaaccaggaaccccatgtgggttgaggagacacgccaattattctggcctggagaggaattaccaggacacaagaactcagaccatctgcaagcaagctcccttgtgtgtgttcactttaaatcaattcgtgtttaactcactgaatgaatacgtgggtttgggtgggaatcatccctgtgtctacgatcatctcaaggagaccagagaagggaaggcacaaccaatcaaagcagtttccccaattaagcttaagtgcccactaggatgggcgccggctactagggcttcagggaaagcaaaagccatgaggcccaggccctgccccaaggagctggcgctctaatacagtgagagcactcgctcagaagactgtgccttgtggcccatgattggacgtgggacagagtaacaggattgtttccacgtatgtggacaattaggatagggttagagaaatccttgtgatttgagatgggcctggagggacaggtaggatattgacaggcagagatggaaagtgtgtgggcaaaagctccccagggcctgtgcagcaggagtgggaggtggccttcccaggagggtttggaacatactggcagcttcg

SEQ ID NO: 322631 - DNA, 833 bp, Homo Sapiens
ccccggaaaggttcccgcgcaaaggccgagttaccggtttgggggtttagaggaggtgggttactggggtggtttttgcagcgggggagggatttttacccttccactttctttccttttgaaaatttgcttgagacgttgcgtttttttcaatagaaaaagttgtgggtcgattatccgcactgtgcccaaggattcagaatcatcctcgagaattttcccgcaggtgcaaagtatggttgcagtgtcattagcgttatcgccatcactgccttccagaagaatcttcctgtgctgtgctgcagctttagatgctgcttttcttttcccttgaacaccaccaacatcatcttccacagtgatcttatccaaatgtaaataatcactggctgcgctgcaattagagatatgaggagacttattcattgtttctattttactgctgccatgtttttcaatgcttttatcttgagagttctgcacattagtggtgactgttggaagttccttcactgataaagctagtgcaacttctaagtctctctggtagagcttgtcatctaaagccatcctttttttaggggttttctcttgtactgggatttcttctttccggagattgttcaagttaggttttggtttatcttgttttaactcctttggtgctgttctggatttcttgtttaaaggtacagttgcagaaacaaaatcatcatcactgtcagagtggtcaaactgtgagtaattgactggtttcttatgtctcacaggccgcaccatggtccctttcaaggcttggtatttacagttctcaaattcttgttggcttcccc

SEQ ID NO: 322632 - DNA, 718 bp, Homo Sapiens
ttttccaaacaaaaaacctaatttatttttcaagggccatgggaggggctttgggatacgatttcggggcccgaggatcaaaaagggggccgaggggtcactgtcagggggtctgcgtgacccacggggtacagcagagccagatgctcggcaccctgcaccggcagtgggcgtgaactgtagtggaggacgagctcgggcacgctggggaagggcccgctgtgttggcccagcaccacctggttctcacgggtccgcgcgaacttcagatgcaggaagccctggctgctcctgagagacaaggagcagtcctgggggttggtctcactgagccgcactaggtagctgccttccttgcagagggacaggaggctctctgcatccgccctgttcagggggccatgaaaccacggctgtttctccaggggcagggctgggtccacacgctccgcaggctgggggcttctgggcggaggtctccggagctccttggctgagcctggagtcctctcccactctggactgtcaaactgcacttttggccttccgaagaaataggtgcggtcatttataaatctgggaaaaaggagcacaaggggcgtggctagacggggtcggttcgaagtttccaaagaggagccctagtccctaaaccccttctggggttcagcccagactgtggccaagtcctaaaactagaaaatcacccccaatctac

SEQ ID NO: 322633 - DNA, 335 bp, Homo Sapiens
ccacaaaccacttttattacccagtgggcgggctgggctgtgatgttggagaaccttgggggtgggggctgcggaatgcagctgagcctctcctggctctgtctgctggtctaggccagggtggggctgatcaagagcagagagctcaatcttgggggaagaggaagagaggatagagaggccaaacaggcctcttcccctcctcttcacccatgccacagcattaaataaacaaaaagcaactctttacagcacaaactacacagggaagtccttcctcccagccctgggcgcacagcatggaagaggagctcggtaggacagggttggggcct

SEQ ID NO: 322634 - DNA, 842 bp, Homo Sapiens
ctcctctttatgtgtgggcggaatcccaaaccccttaagtccggcgccccgcgattttccttaggagacgccgggttttcccccatgtttccccttcgccctaccgcggcccgggggccccaaaccaaatgttctttggaaagctttccccaggcgccggaggcgcgccccacaacgccccgcatggcgctcccggccgcctcacgctggctcatccctctcccgaaacttacttcttcttcccttctgttccagggtctcgaggtttcagtagtgtttcctcccttatcttctgtggtctttagggggcctccttggggagcagaattgtaatccgttccttgtgtagcttccgcactcggatctttagctcccggggtagacgccgccaatcaggggttccaatcgatggcatttgtcaatcggacctgacatctgatatttgtctgaataacgctccacatctctcttggggacagctggccggatgaagtaggggagctgcctcatggctcctcgtagctcttgcttcagtgccaggacatattccccttcctcgcctgagggcaaaggtactgggcggaactccaagggagggaagagtggagaaggctgcagggtgggtgggggcaaagcatcccctttcccaatgcccacggcctccacgttgaaggtcaactggccccggccacgaccccggcccccaccccggctggccatggtggagggggcctgggtattcagagatccagtgaataaacctgctgcccctccccaaagcggagcccaagccgcgaccaacttgaaatgtactgggcttcctcaagtcggtggcgttcccc

SEQ ID NO: 322635 - DNA, 712 bp, Homo Sapiens
  misc_feature (583)..(583): n is a, c, g, or t
  misc_feature (611)..(611): n is a, c, g, or t
  misc_feature (625)..(625): n is a, c, g, or t
  misc_feature (636)..(636): n is a, c, g, or t
  misc_feature (642)..(642): n is a, c, g, or t
tttttttaaagaaggaagggctttattcagccaggagcatcggcaagactcacatcttaaaaaccgaactccccgagtgagcaattcctgtccctcttaagggctcacaactctaagggggtccgcatgagagggtcgtgattgattgagcaaacagggagtacgtgactaggtgctgcatgcactggcaattagaacagaacagaacaggacagggattttcacagtgcttttctcttcaatgtctgtaatctacagataacataaccgattaggtcaggggtagatctttaactaccaggcctagggtgaggcgccgggctgtctgcctgcggatttcatttctgccttttagtttttacttcttctttctttggaggcagaaatcgggcataagacaatatgaggggtggtctcctcccttattgcaatgctatgaaagcaatacacattcagtagaaaccgttcgaatgcccatacagccattctgttttttactcttactgcattattcaatagatggcatgaaatatttaagactttattatgaaaataggaccttgtattaggatggttttgcatnaacagtagggcttaatgttaaggagtgnctcagggacatttnaagggtagggntaagcnatggatgttaggtagggttagggtgtattaaaatgcactgggaattttaaccgtatttttcaacttactt

SEQ ID NO: 322636 - DNA, 402 bp, Homo Sapiens
  misc_feature (16)..(16): n is a, c, g, or t
  misc_feature (40)..(40): n is a, c, g, or t
  misc_feature (54)..(54): n is a, c, g, or t
gccttttcccccttcnaaatgtcctgtaaaccctaacagnataaacaataaccnaattaaggtcaaggggtaaagatctttaaactacccaagccctagggtgaaggcgcccgggcctgtcctgcctgcgggatttcatttcctgcccttttagtttttacttccttctttctttggaggcaagaaatcgggccataagacaatatgaaggggtgtctcctcccttctgctcacacactgaggctggagtgctcgcaccctgctacccatgtgctcaccctgggattcggggaagcatgcacacaggcaagcaggaaaaacacgaggatcctggaaggggatgggcagaacgtgatggaggagagaggtttctgcttcctccaagggccaaaagtcactgtc

SEQ ID NO: 322637 - DNA, 323 bp, Homo Sapiens
aaataaagacctgtcatgaagttttaagattttttttgttatgcagcattattacagccatagctgactgatacagatttgttgtaacttcagtttactttaagcctaacaattttcagattcatccagtctaggaagggattagtaaaagtcctacctgccactttgacctggttgggggcgcaggatctgcagggaagcacctggaactcttctgcctggtacatggagtaatcagtactggcaatgaccagggtatctccaggtttccatgactgtacattatcctccaagttcagaatggtgctgttcacattggtgtc

SEQ ID NO: 322638 - DNA, 987 bp, Homo Sapiens
  misc_feature (955)..(955): n is a, c, g, or t
tttattggaaaatcaaaatttttttattaatttactggatttcctatacctaacaatccttaaaacaactatcaacagctgcaacacaaaccacaggcaaaatgaaaaacagatgccccagacagcaccccaccacatggcacacacttaataaggaacaaaatcctacagggtgctgacataactcgctttaagcatgcaatgattcctgcagtgctccctggcaatcaacctctctgcaccctggggctggatacttcaaagtctttgttctcttaacaggtttgaagtcaacatggcaagttaaggacaagttagatgagatccccctagttcataacgtgagttcctcttgctctccaatgttcatccacaagtacagggtccaatcccctataagagatggcttaagcatcccaatggggaaacagcctgccagccacatgggcagattctatatatttccaagtcccgcagccacaagactgaaaagccatagagaattgacagctcaagcctcacctgaacaatgtgttgaaaggggatctctcaggacagacactttgatttcataagttggcccattttggcccaaatataccaaatagagatgtcatgtaatgtcactgcaaatccagtacaagatactaagagtacgccgagaacctggggttctctttcggccatccagaaggtgaggtcagccaggagggtgcccattgctctctgaccaactgatctgccagaggaaaagctgttcagtatccaagatgcatcaggtccaatcccaggggttcctagttctccttctgtgcctgctgtaacctcttggccacagcagtgatcagtgctgccccttttccactgccatcttctgacagcatgaatgtcacatcacatcgaggggctagttccttcacagtttcctgcaatattctagaaaagctatgaaaangagaaagaaacatcatcagcccttccatgtag

SEQ ID NO: 322639 - DNA, 587 bp, Homo Sapiens
  misc_feature (13)..(13): n is a, c, g, or t
agaggacaaaggnggggaggttaggagagagaggaggagagatagaaagtaggtaaagagaaaacaatggtccccatattccctttaaagcccccagggtaaatttaaaacctataattgataattgaaggtcttctctgtgacactctaacactccaataccaccttgttgtaagtgtaaaccaaggcatagcccgaaagcactgaggccactgacaacccgtagccttcctatcaaaaatccttaacccagtaacccatggatggcccaagtgcattcaatctgtagcggcaactgctttggtagcagaagaaagtagaaaaataacttttagaggaaacctcattgtgagcacacctcaccagttcagaactatcctaagtcaaaaagcaaaaaggtagcttactaactcaaaaatcttaaagtatggtgctattctgttagaaaaaggtgatttaacattaaccactgacaaattcccttaaccttgcagatttcctaacaggggatttaaatctcaattaccacacaaagttccgaccagacctagacaggacgatagatggttcctcccaggtgattgagg

SEQ ID NO: 322640 - DNA, 526 bp, Homo Sapiens
  misc_feature (24)..(24): n is a, c, g, or t
gttgtaagtaaggcaatgcctggntgatgggttcttggggctcctggagtttgatttaattaccaatatttattgaccacatattgtcttgtactgtgagaggccttatgggaggtcaaaaggaattttgcccctaatgatctttaattaatctccataggaccaaaaagtgcacatgtattaaagtggaaaacaaggaaagtctggcagatgatggttaaatttatttgctgatcaatgtgaatgaggcagactaagaggtttctaccagaaggaacttgagcttcttgattcgagttagccatcaaggtaacttgaggtgaccttgggcaaggctttcttactggtctcctatattggacgagggcccctcaagcccaagtgagaaggctgtttctattatctccttttcctcctatctccagtgggacacccagtcctgcgaattctattttgggaatgtttctagagtctgcccagtctcttcccagtccagtgctttctccatcccgtggccagggtagtt

SEQ ID NO: 322641 - DNA, 301 bp, Homo Sapiens
gagccacagtgcccggcccgaaaagtctttattacatacccttgaactaggcactggagaaaagttctattagtcttcatctactttatgttctgaagctaaaatcagggtttatgctcttgccaacaagtaaaatatttagaattcagacttgtctagaacattagagatgtctgggcatagttgatcctaagatccactgaatgtataagctagtagctgagactagatttcttcataaaaagatgagtagggcatccccggcttagaatcaaatgtgtggtccagatggcagtatagg

SEQ ID NO: 322642 - DNA, 193 bp, Homo Sapiens
  misc_feature (144)..(144): n is a, c, g, or t
gtttgcagaaacctgtatgagtcgtaccacctctgtgtaatctgccaccttcagagcgcctgcaggaaggcggccacgtcaccccttttataaatgaaactggaagctcaggctgggaaacccaaggtcacagaacccagcctnaaaggcagccagcatttccaccgcaggagtctgttctctgcacagagct

SEQ ID NO: 322643 - DNA, 982 bp, Homo Sapiens
  misc_feature (404)..(425): n is a, c, g, or t
tggagtgttaattttttccacaatagttttacccaagggaaattgtggtttcattggacctttgaatcttgaccaagggttccccatccccaggggtggttttggctggaggttccaggatttgggacaaattcaggtttcatagcccaccaatatcccggccagcgtccccacccattcttcaacagggtgatggatgccatgtggccaggtgaagagctgcacctcgttaaggcaccttggagcaggtggagaggaaactcatcccagggagggagggcagctcgggaggaagtcctgaccacagccctctgatctgctctcatggaatgggtgcaccacggaagagcccccagtgactgcaggaggcactcctggggatacagatttgtgtgtgtacatgnnnnnnnnnnnnnnnnnnnnnnagaaagggaaggccaaacacgagaggtgtcctatggtcagacaccctattagacccccgtcccctggtcagccagccagctactagccacagctcagagactaaagccctttctgaaaatcaggatacagggaaaaaccaccactcttcagctacctctttgttccccaaaccctctgctcactgggaagtgggcaaagccttcagatgagaccatctgaggtctatataacccagggtttgtttcacagctttcatagattatggctgtcctatcccctgccctgtctggaaacattaggagctcaagactgaacatgaagctccaattgtgagctccaggaaggtggaagaaacagctgcaggcacaggttgttcaaaccaaaatgaaacaggaggggaggaattagaactgagtcagtgatgccatgagggaatgaccgtcctgtcaggaacatgagtcttggtcttcctaaattcgactgagaatggcctggttctagccactcttccccactagagagcctcgtgccgaattcgccacccaggcctcgctac

SEQ ID NO: 322644 - DNA, 529 bp, Homo Sapiens
  misc_feature (211)..(211): n is a, c, g, or t
aatgtgcaatgggcaatgcttatcacatgtttctgaatgcaggagcccagtgctaatttctcaggacaaggctccttactcatctgctgagccctttactcatttacctttgtgatcatttaggccacaccattgggcccacattgctgtttttgctactccaagaagatcaagagagagccaccatagcagaatgagattccaagccttnctcatgcatccctcagggatcaggcctggccttggtctctagaaagctcttgctgattactctgggagtttgaatctcagtgatcacagtctgccctggcctgatcccaagggcacaagcacacaggaacctggaggcagatgtgtaacctcaaagagagtaattatgtcctagccaataaataaacaatcactggaacaattagtgctcacccctttgaaatttgcatctcacctcagaacaatcttgctcttcaaccttgtcaatacgttgatatgttataaataagtggttttactgggatgagatgcaagctat

SEQ ID NO: 322645 - DNA, 500 bp, Homo Sapiens
ggttttttagtaaactttattgtaccggacaaaaaaaatgattttgcaatgattttctctcccacaaaagcgtgggtgaaaaccagtaacttataaaaatactttaggactctaataatacatacattcacaccttatcttctgagtatttaaatgggggaggttcacctgaaaaaacccatagttttttgcctcaactgacctgtaaaaaagtccacctatatcaactttctgccaatctggagaagatctgttttctttgatctgacgtcatgtgttcacaagcttctaaaatgtttgccaaaattaaagtctgctggatggtttttgccttaacccatattcttccattcattccaaatactatctccagtggatagagttttcccacttcctgtatgatttcacaatctggagctaatagctttctaattaagcccagagtcactttaaaaagcagaccatcctgtccaatgacacccattccattggctcgtccc

SEQ ID NO: 322646 - DNA, 880 bp, Homo Sapiens
  misc_feature (479)..(491): n is a, c, g, or t
  misc_feature (718)..(727): n is a, c, g, or t
agacaattaaggtaagctcagagtgacttttaatatgccaatcaatgttaataaaacacaagtcaaagacaagtgcaaacatgttttagaccaaaattaatgagaaaacaaacagacaatttttttcaacatctgttagccagtattattagtcaaatggctaatcacagataaaatatattttgtgaaaaacttggaatgtcagaagtcattctggcatttcaaacagctatgtacagtatcacgaagatcggtttatattcccaaatattgaagagaaaaacccgggcaaaacatttaaaaacgggctaattattcattcaagtttaaaacttggggggggacatttaaaaagagtccgggaaggccattaccagaacaagttacaaaaccagtaattattatactacattaatacagcattccaaaggagggaaagggtgcatttttccaatgcactagcttcaaagttcaaaggnnnnnnnnnnnnnggcaaatagctgcttttcatcaaaagcagctatacatttcacataattgtttcaaaaagaagacctattaacaacaatgattgtttaatgctacaagtttacagcaaagacaaaactaaaatagcagcaaattcacaaggcaatacctccacagaatcatcatcccatggttcatgcaatgcctacaaagtgctcccagtgggatatacaagtctaattcacaattnnnnnnnnnngaaatataagatggacacacaggtacattgaaggctgagtagtaatgagtcttttagcatgtcccttttcaaagggagggtatgtctgtaataaagcccttgagtactttttacaggtcactacagggaaagacaccttttattacaatgccc

SEQ ID NO: 322647 - DNA, 211 bp, Homo Sapiens
gcattgatttgaaactttattatataaattttcatttcttttaaagattacaaaacctgttctatgacaggaatacaagcaatattgttccaggattattcatggatacatctgaagagcttagattacacatatactagtatgatttgaaaacttcccagattagactcttaagtgaaaacaatttaaagtatttagtgatatttgaatc

SEQ ID NO: 322648 - DNA, 829 bp, Homo Sapiens
aatcattgcagttaagagaaatggaaattagttgtgttaatcttgcagaatgtttgcaggactgactatcaaactggatgatttccatttataccctactgtgtcagttcaagcatcaaaataccttgcatctgagacagacttcctacatcagggacaggtatctgtgtgtcattatacaaaacaggtctagggggctgaactacatagtaaaaaaataaaatacatagtacttagtgtaaaataattttatacatgatcttttgtactttaggacattaaattgtacaacttttgtatatataaaagcttaggaactttctgtttagcaggaaggcaacacattcctacacttttaatgtatatgtttgttataatgtccatgtaaacatgccctatgtttgtgccttttaattagtttgtctcaataaacaaaatgtagagaaaaatatgtagctatgactttgttacaactgttcttatccacagtacaaaaatggtttgtttttaatatgtagagcattatgtgtggactactggaaggactcgtgtagggaaagcccaagaatgaccttgctgaggcctggattgggaggcacagtggccacatttggaggaagttcacatttcctggcatgcagacccaaaactgggttcttgctctgcctgctgggatctgttatctctggtgggctggcagtcataattcacaattcagacagcccaggcttcctccacagtggtccaaggagcagtcctcagtgggggcaggtgtgggccctacccctaagctagaatgtggttgtcagaaccctgaaagtattagttc

SEQ ID NO: 322649 - DNA, 373 bp, Homo Sapiens
  misc_feature (190)..(190): n is a, c, g, or t
  misc_feature (220)..(220): n is a, c, g, or t
agtaataacatgtttattcaaaatactaacactgttacattcttttcattctcagggcatattctactagagatgtactgtcctatgttttgaagtcacctggaagagttcttagtgtggttatatgactacatcaagagttttttacttttgatgattagggactgctttttaaaacttactttactcncataatcttaaaatactcatacagttccancagtcacatttacactaacaaggcatatttgaagtccagctttcatccttgatcctggctactctagggctctcctttctcctaaaggtaaggcattttcattatggtatcatgtttatcgtatagggcatgaacacacgggcggccccttcc

SEQ ID NO: 322650 - DNA, 279 bp, Homo Sapiens
gtctcaaaaatcaatgtatttaatagttgacagttacaaatctcatcattattgttccttcagtaaaatttaaatattcccacagttctcaatcaaatatgctttttcagtttctccaacagctgtgatttttcttcttttggtctattcagtagaaagtgaactatctgaagtagaacatcatcattaaaacctttcacatcattatcctcaattgtttcataaagaggcttactttgtgtaccccaacatatatttttacgagggttcattttgatc

SEQ ID NO: 322651 - DNA, 313 bp, Homo Sapiens
  misc_feature (34)..(35): n is a, c, g, or t
  misc_feature (128)..(128): n is a, c, g, or t
  misc_feature (163)..(163): n is a, c, g, or t
  misc_feature (245)..(245): n is a, c, g, or t
  misc_feature (260)..(260): n is a, c, g, or t
  misc_feature (269)..(269): n is a, c, g, or t
tttgggtgttcagcaagtttatttacaaagtggnnacaggggcgtcaggggctggtggacccaggccgcttcttctttctccgtctcgtttggagagctccttggggctgctccaaacccgagagctntccgcttggcagctgcctccaaggatgcccaaagntcatctgtctctgtgtcttctaggggcaccttgttgggttcttgaggctcttggggctcatcctcccagttgtccctgcctnacaagaggaggcagntcaattganacttgagataaaccttatgctccagaccccgtggattctggatc

SEQ ID NO: 322652 - DNA, 468 bp, Homo Sapiens
ggagtgtttttagagcacttttatgttcatttatgataatagggacctgcccaggcactgggtgggtgtttccacatctactgtgtcattatgtaaattgtttttcacaagaacttgagaagctagcagtgtagctattattatccttggggtggtttgtttttggttctttgggttttttcccaggggaagaagctggagtttggacagcccctggccactacatgggctcccttttgcagaggctgctccagcgggtgatctccttgagctcaggtaaataagccagtgccaggccaggtcctctgcactcctttgtctattttcccctttgttccttggacctgaaaacccttcaaggcttcagaggaagctcagtgagttgattctcatgtaccgggagaagataatgtagaggcggcggaaccagaggagctggctgcgctggcaggacatggctttcttggc

SEQ ID NO: 322653 - DNA, 471 bp, Homo Sapiens
  misc_feature (101)..(124): n is a, c, g, or t
aaaatggacttgaattttaatttttttaaagattatctatatatatattaataaaaaggcaaagaatagaccttcatgtttaaattatattctaaataaannnnnnnnnnnnnnnnnnnnnnnnttccattaactgcgggagacaactggcaagtaaagagcctgagagagtccagtccctctccaccactacaatggacatatatttcaaggaagcacctatgaaaaatagtagagtgttcacaacacatctggtaacacagatagcttctgggtgttcttgagagcagtttgtttgcattttcaatatgacatgaaatgaagggaaaaatcaaattcacaaaccgaaatgacattacttagaacaatctagtattctgtattcatgttttacatgccctagagcctagcattttcatgtagcaagctacactcacatgtgcgttaagccgcgtatctcaaatggtgatc

SEQ ID NO: 322654 - DNA, 468 bp, Homo Sapiens
  misc_feature (334)..(334): n is a, c, g, or t
  misc_feature (400)..(400): n is a, c, g, or t
  misc_feature (413)..(413): n is a, c, g, or t
  misc_feature (430)..(430): n is a, c, g, or t
  misc_feature (436)..(436): n is a, c, g, or t
ttttttttgatgcactggctgtacctttattatttttacctcgttcactaacagctccgtgacgcaaggttaccacacacagttagatagtgtctgcattgcacatctaaggctatacaggaaaagaatcagaattagtacaaatacaagaactatatttacagtctgtatactcaagctccaaacatcagataatatttacaaaataaaacatgaaaatgaaaatccaaaattaatgtacattgttgctaatgtgctcaactccttcacgggggagagatcagtttgcaaagtcttgggttcaaaaaggccacttattgcattatgggttttngttggtccatggtgtgaagggatggttgacaaggagaccttgaaattctccaaccagaccaggtancttttagggagcnaccaaagtcctaaggancgatgncctttaaaattaccaagaagggcttgagggga

SEQ ID NO: 322655 - DNA, 255 bp, Homo Sapiens
  misc_feature (124)..(124): n is a, c, g, or t
  misc_feature (227)..(227): n is a, c, g, or t
aaacaattagaattttactttatttcagaataagtttacagttgaaaaatgattatttactaaagccacattattcatacagacaaaacttttatagcaaaaccttggtacatgagcattaatnatttgaatactatatggatatagaagatatttaaaaaatggaaacaatgtgttccaaaggctgtaagaggcacaatatatatgcttgtactgggcctgcaagnattatactataattcattaaatatgatc

SEQ ID NO: 322656 - DNA, 577 bp, Homo Sapiens
  misc_feature (43)..(129): n is a, c, g, or t
  misc_feature (171)..(180): n is a, c, g, or t
  misc_feature (406)..(406): n is a, c, g, or t
  misc_feature (411)..(411): n is a, c, g, or t
ggctatttatttatttattttttaaataaagattgggtcttannnnnnnnnnnnnnnnnnnnnnnnnnnnnnnnnnnnnnnnnnnnnnnnnnnnnnnnnnnnnnnnnnnnnnnnnnnnnnnnnnnnnnnatgtgccgtcacacccagccctgcttgttttaaaaggggacnnnnnnnnnncttaatggaaaaaaatgaaacagagagccaaaagcttttaactgttgtttttttcttttcttcaatgaaagcctctcattttgaaaagacatgtttttcttcaagcaacaaaggtggtagaggaaattcctcaactttctcaacgagtcatgtaccgttacactggcctccataaagcaccgattaagaaagctaaagaataagatgttgtatttcttttaaaatnatttnaaatatattaaattttcctaaggcaggttttgtttgaatgaggtgtcttgattagataactacatgccactgaaggagaacagtacttttaaggagctatttttgtttcgcagtagagttgaaaccagctgattaatccaatgaagttaaacagcagagacagatc

SEQ ID NO: 322657 - DNA, 350 bp, Homo Sapiens
  misc_feature (279)..(279): n is a, c, g, or t
tttcacaacaaagaccacgccatttatttacaaaggccagtgtgggagctgggggaggcagggagggaaagccacacagacatcttctctggactgcttgggaccctttcccacttggagcaaactctgttcctcttgccgtcatattctcagccatggggtcggtcctccaagcagctgggccaagtaggagagggaagaggtgatatgagcctcctctgtgctctgacagagaaatgtccaattccagatcaaaggcatcattgccaccctctcctntccttcctcaaagaaaactttctggccgggagggaaatagttaagaactgaaaggccagggggtttggagg

SEQ ID NO: 322658 - DNA, 519 bp, Homo Sapiens
taagggataaattatttctttggatttatatttttccataaaatgcaaatgctgattcatcagtgagtcagtatatgaaaaagggcctcttaaatgtcttataaacactaattattcttccccagtcttcatttccttaaagtcacatcgctcacaagtaggctcatcttccacttctgccatctgaaggctggtccatgcccagcctgaaccaggggaaatgtgcagaactcaccaaaatttttccaacaccctgacaacatttcatttcaaactctgatccctgccctgtgattacaaagaggatgctgctggttgtctctcacagtccctgctgtgggaaaaactgatatccaatgttctctgaaacatactgtctttcatctagactcagaagctagacataaaatttaaaaaagaagagtgtccatggccatgttatacctgccacctgctagggcccagtcatcagtcatggttgctgatgatgagactgctgaaaagacctgagcaggatga

SEQ ID NO: 322659 - DNA, 382 bp, Homo Sapiens
  misc_feature (300)..(316): n is a, c, g, or t
gacatttggatagtgccgtttattgttccagcaccccttcctccaccacgcccaggcctgggacaaacgggcacccgcctcctgcggcgctgcctctgctacccggaatccaggaggggaaggaacgactcgagctctaaggatgggacccggaaggcagaaaaaaataatggattggggcgggcggggagtcaaaaggtgggctgattaaaagaaaattctaaaagagaaaagggcccctggttctcttccctctctgggatcctctaaagggcctggtttctccattcctcgcagcannnnnnnnnnnnnnnnnggacaactgaggaagagcagggaaaatggccttccgcttggggcctggtcgccactcggcctctcc

SEQ ID NO: 322660 - DNA, 492 bp, Homo Sapiens
cgaggatgatggaactcctgtatgactgtggaagccattagcagagtaattgctgtctgttaccatgacacccagccgctgcagtcacctgcccgaagtcctgccagactgcaccagctcagctgcacccgtggtgaagacggtggaggattgtggcagcctagtgaatgggcagccgcagtttgtcatgcaagtttcagccaaggacgggcagctgctgtcaacagtagtgcggactcttgccacccagagccccttcaatgaccggccgatgtgcaggatctgccacgagggcagcagccaagaggacttgctctctccatgtgaatgtacagggaccttggggacaattcatcggagctgcctggagcactggctgtcatcctcaaacaccagctactgtgaactctgccacttcaggtttgcagtcgagcgcaaacccaggccgttagtggagtggctgggaaaccttggcccccagattgggagggg

SEQ ID NO: 322661 - DNA, 1632 bp, Homo Sapiens
  misc_feature (113)..(131): n is a, c, g, or t
  misc_feature (143)..(312): n is a, c, g, or t
  misc_feature (350)..(363): n is a, c, g, or t
  misc_feature (372)..(505): n is a, c, g, or t
  misc_feature (858)..(858): n is a, c, g, or t
  misc_feature (861)..(861): n is a, c, g, or t
ccaaagggggccaaagggggggaaacccccgggggaattcgggttttacaacccctttggggggggttccccctcgggccaaaagtttaaaaaatttcccccatttttcggannnnnnnnnnnnnnnnnnnaaattaaatttnnnnnnnnnnnnnnnnnnnnnnnnnnnnnnnnnnnnnnnnnnnnnnnnnnnnnnnnnnnnnnnnnnnnnnnnnnnnnnnnnnnnnnnnnnnnnnnnnnnnnnnnnnnnnnnnnnnnnnnnnnnnnnnnnnnnnnnnnnnnnnnnnnnnnnnnnnnnnnnnnnnnnnnnnngggccccgcccccaaaaaaaggttttaaaaattttttnnnnnnnnnnnnnncccccaaannnnnnnnnnnnnnnnnnnnnnnnnnnnnnnnnnnnnnnnnnnnnnnnnnnnnnnnnnnnnnnnnnnnnnnnnnnnnnnnnnnnnnnnnnnnnnnnnnnnnnnnnnnnnnnnnnnnnnnnnnnnnnnnnnnnnncatctatatataaaatctttattacaggcagtattggtccatacactaacacaataccaacagtacaggtttaatctttcaaaatcatcatttaaacagcaaaagaccaagaaataaaatttgagtcaattatttttcaaaatattctcaatgcacattatccttaattcccttattatagtgaaacatacaaatacaggaaaataccccatttaacaaatactagtgttaaatgggttatttgggcttaaaatctgagttaaggaaaatcctttttaggcaacctacatacaggataagtaggcaaactttattatattaaacaaattcattctggctaaaacatgtaaagnatntcatccatcatgtattctgatcccagtacaagtgtttattctcttaccgtcacgattcttatatgaaggaccaactcaaagagttgtcctagatataaccttatcctcttccccaacacacttcatccaaaagtctgttcaacagatggcaaccgggtagcagtcacttcaccatctgatgccagtggttccgtgagagcgtggccaggcctgtgaaacagcccattttcctacctactgtgggttgctgctcaggaggaacgatatacgccaatacaagcaggaaatctgcagctcctctgctatgtgcctcagaacactttcaatttttctggtcaatgctctgattaggtatcatacataaaagccagcatattagtttaaatctttaaacaaaaaactatattttccaaagtcattatcatttgggccaattaagtgatcttttcgtgctttgttgagcttcatctttagggcatctcttctttcttcccattcatgaagttcggcatttccatgtgcaaatttacagctgtttccttctgggcaggtgccattcatatacctatcacaaatactgaaatagcctgttgggaagcggtgctgccagcagtactggtcgtcctcggtgtggaaaaccttctctttgtgcttctcggaggagatgtggccctgccactgcttctcactgttgcagtttttcccacacatccagcagtgaaagtccactgtaacttcagcataatctgttggcatgtgaatttgttttct

SEQ ID NO: 322662 - DNA, 346 bp, Homo Sapiens
tttaacagttcagacagctttatttttatcaccagagttttaaataaatacacagttccatcagaccagcccccgagtccccaagaaggtcaccccaataaattaataataaataacagacttatataaatacagctgtttgggcaggaatcgggtgtctcaggaaccttgagcccattccacagggcaggacaactgaggtcgcctcccccgcgcaggtgcacagtggaaggaccaggactgctcatatgcagtggcagtctttggctaacaagtcatcataggtctggagcgacaccccggtgtcggtcttttgaatgagcaccatgggattgtagctggcggc

SEQ ID NO: 322663 - DNA, 158 bp, Homo Sapiens
tttatagtcaaagtggcagcagctcatttatttagccaaaaatagatactttctcgtacaatttggttcacacatatgtacatttctctgtatatatacacacacacaaaggcagacacgtttattctcactgaaactccaccccccaaaatcaaccg

SEQ ID NO: 322664 - DNA, 339 bp, Homo Sapiens
attttattcatacatttctccaactttgaaatgacaaaagcccaattctatggtttcccattacacagcatcctacaggtatgtatattctacaaggaatactatggagtttctcttcttcccctgtcacacaagataactgattagggtttcatcaacttgtactgtgccggcagcgaccagcattctggttgttccggcgacagggcaaagggatcaggatgggagggcgtgtgctaaggcatgtaaatagatacacacagagagaaagaaaagcaggacatttacaaaggaatccaaacctttccaatcccttcagctcctggggtgttgagggac

SEQ ID NO: 322665 - DNA, 596 bp, Homo Sapiens
  misc_feature (36)..(36): n is a, c, g, or t
  misc_feature (484)..(484): n is a, c, g, or t
  misc_feature (518)..(518): n is a, c, g, or t
aaagcctttggacctggaaaataataatccccacanttagtccatcaaaattaacttggatcccttataatgaaagtatgaaaacaaacccaaatgaaataattcctacatcaaaaggggtatatctcatctcccacatctccttaacactatttaacaagtgtgcatcccactagagaagtactggcattcaataacgtacatttagtggggtgaaaggcagaaagaaagggaggcagaaatactgcaagggctttcctttcacacacagtttcctatctcactcttgcccttgtcatttcagaccttgtacgtggcggttgctgggagcactctggggctcagtctttagtccttcccactctagcttcattctgccacctctgtactcttcccatgcaatgtcctattcagcagtaatggaaggggtgtgcaagaagaatatgtgggcaaatggaaaggtgctgctttaacgtgtaagcantctggcacttggagcagttacacagttacaaatnatgggccaaatggaagttcgctctacaaattagcattcactctctaggttgttctggagattctgtgcctggctgatc

SEQ ID NO: 322666 - DNA, 1188 bp, Homo Sapiens
  misc_feature (331)..(331): n is a, c, g, or t
  misc_feature (590)..(590): n is a, c, g, or t
tatatggcacatggaaattttaattattcctctttgtctcagaatttcaactgattgccaaagaagacctatgataatctggaaacatataatttattcagcatcttactctgaacacagttaatgagtgtctcagattcaccctcattagaagggttttctccagaagaccgcttcaaatttagaatgaattttggcatcttaatggcaatgtctatattcataagagatataatctaaaaagaacataggaaaacaaacaaaaaaccaacaagactgtcatttattaatacaaatttatataggtggcatatactacttggggaaatcnggaaattcataacacacaaattcatattggaaatacaaaaatcatttggagagtcaagaaatcaggttgacagcaccacaaatgtttactcagtctgagcaggtgtgtagtatccaagaataaccaatacctatagcagactgagactgaaatcataagactgtgcaaacacattccaacactatttcccacccaacaatagaatctgcaggagtcctctaggaggcctgggggtacaataaaagggcagcaaagcagnaaaaaatgggtacagaccattctttcttttaaccttcacagccagcatataaaagcaagtaggtaaccactgaggagttgtttgttccttctcacttgaaggcaagatataaaaggttagtaaaacacacataaggcattagtgagcaaatcagagaaattgaaagcagagctttgactgaaatataatccacattagtcatcaaattacttgattcctataatgaagtatgaaacaaaccaaatgaataattctacatcaaaggggtatatctcatctccacatctcttaacactatttaacaagtgtgcatccactagagaagtactggcattcaataacgtacatttagtggggtgaaaggcagaaagaaagggaggcagaaatactgcaagggctttcctttcacacacagtttcctatctcactcttgcccttgtcatttcagaccttgtacgtggcggttgctgggagcactctggggctcagtctttagtccttcccactctagcttcattctgccacctctgtactcttcccatgcaatgtcatattcagcagtaatggaaggggtgtgcaagaagaatatgtgggcaaa

SEQ ID NO: 322667 - DNA, 465 bp, Homo Sapiens
  misc_feature (334)..(371): n is a, c, g, or t
ttggtgtgttttatattttttaataaagtttgtaatccaatggacacacaaaacaaaactgcgctgagaaaaacagtttcataaattaataagtgttaggaagttgggggaagagatcaaggtaataggaagaggggttagccagtctttttgtacaggtgccgtgtgacacttccacatcgcgggagcaggacccgtgctgtaccgaagcgcacttatacaaatgagtgggcaatacaaagtctgaatatgaaaataagatttcctctgaaaacacatttttggcacagattaaaaaaaacgtatgtcgggggatttgattttttaagtcagnnnnnnnnnnnnnnnnnnnnnnnnnnnnnnnnnnnnnncacacatcccaagttctgcatatcccaccaagagaaaacctttctgtttgctcttcaactgtaaactgtacatcccggtgaatcaaagacggtg

SEQ ID NO: 322668 - DNA, 274 bp, Homo Sapiens
acatttacatagcatttattttgtattagacattataagtaatctagagatgatttaaagtatatgggagaatgtatgtagattatatggaaatatgagggtattttatttaaagggacttgggcctgtggataccaaggaataactaaggtaaaactgagcataagtggcctgtccatattttgttaaatatcagattattgattagtgatcatcaacattttcccgcattcatgcagtgcggcctctgaaaacatggttgaacatcctatgg

SEQ ID NO: 322669 - DNA, 1051 bp, Homo Sapiens
  misc_feature (159)..(164): n is a, c, g, or t
  misc_feature (166)..(167): n is a, c, g, or t
  misc_feature (170)..(171): n is a, c, g, or t
  misc_feature (173)..(174): n is a, c, g, or t
  misc_feature (177)..(179): n is a, c, g, or t
  misc_feature (182)..(182): n is a, c, g, or t
  misc_feature (185)..(185): n is a, c, g, or t
tttggggtggggggattgccacgcccttatgtcccaagcccaggggtttcctttggggacccagttatggcccggttccactttcctctcctgggcccggcgcgcccaaggaaatggtttatgaaagcttttcgaggggccgggggcggccgaccaggnnnnnntnnggnngnnggnnnttnttnttagaagtctatgacaaagctttagttgtgaaataagcaaggatgcaggattgtacatcttttcgtcgtgctttccccgtcattagacagcaattaaaatcaaacagaaacaacatgacacaactgttaaattttcttatgtgaaaattgcaacaacaaatattctaaataatatagaaacataaaagattgcttaactgattttaataacatgacatgaagcccctagacttgatataatcgttatgcaaaatacataggtgaatactgtcttcttttaaaaatataaaataaataagcagacatgtgaaaatgggcaagtttccattaaataaatgaaaatttttaaaaaagaaagttttgctttccatgtcatttgaagaaggaaaattatcattttaaacaatattcaagtttattaaacaaataaaaaaagtattataaaatgtttaactttcatcagcttcaaggtttatgttgctcccgaattttgcatacaactgaactttcaaatctgctaacactcgctgaattgattccactctggattctaaggcgtcaatttcttcttgcaaatttttctttgcttcttctaacatttcttgcgtttcttcttgagaatggctaatgaagacatcaccaatttgataaggtatcattaagcaatcatcatctgcaagcatgatgtcatcacaagcatcttctaggttttggagttgtttcttttttacttctatttcttccttcagctctgtgattctacttgtattccgtgcaaatttgtttatcttttgttgatcttcgaaagtaacattgacatcttctgcagccgccttcttcatggtggccgccatcttgggactccc

SEQ ID NO: 322670 - DNA, 267 bp, Homo Sapiens
  misc_feature (223)..(223): n is a, c, g, or t
aaaaattaaatcataacatttttatttcagttaataaatcttacacacatatttactaggtcacaatgtaaattgtatttcttactggaagtcacagccaaaaaattcttaaagccactggattagaggcagagagactgaaagaagagaccagggaagaggctgctacagaaatgcagtctgggctgctaaggatgatgtgtggagatgccaaagagagccntcaagcaagtagaagctggggctaggcatggtagcagctcacac

SEQ ID NO: 322671 - DNA, 815 bp, Homo Sapiens
  misc_feature (184)..(184): n is a, c, g, or t
  misc_feature (217)..(217): n is a, c, g, or t
  misc_feature (237)..(237): n is a, c, g, or t
  misc_feature (476)..(476): n is a, c, g, or t
  misc_feature (692)..(692): n is a, c, g, or t
  misc_feature (774)..(774): n is a, c, g, or t
aatgtcggaaagggcactgcagcgccaacgctggaggattcgggtttgggagcagccagcaacacccacatccttcggcacgctcgcgagtcagaatgccccccactttcggatcactgtcccaacagacttctggttttgggacccagagtagcggattctctggttttggatcaggcacagnagggttcagctttgggtcaaataactcgtctgncccagggttttggtggctgncgaagctgagggcgtgtcagcaggcctttcgatccctgggaccaaccgcatcctcagcttcttccccgagaaatgctggagcaggctgttcagaccgacgttgccatcaaaacacatacacccagaaagaaacaacagaaaccaaaactcacaaggcgcatgattacttgttttatatttcatgttgggttttccctcccactattaaacagtctgtttccgtacagaacgtatgtggngttttttcagatcacagccaagaagattgccccgtttcttgtggctctgagaagccagcagagcctccatcagccagaacactgtgtcttcaaggatggcatcagaagtcaccagcgtcgggtgttgataaacagcatcgaatgtgccgtggtctcacttggacctagcgccctccacatagggaagaggttgaatgctggtgggtcatctttttngaggctgaaacttggttatctcctctccttagttcttttagccattgttgtatcaggaccatccaaggacgcactctgcgantgagtggaggcagaggaagccacttcatgccagcagcagtt

SEQ ID NO: 322672 - DNA, 1323 bp, Homo Sapiens
ctggtccgggttagctttattggagcctcctagcaggccaggtgtttcaggcaccagtagtgctgcaggcacgggggcctgtggtgtggccagctgcaggtgatctcggtggtggactccgaagtgtactccagagaggtcccggaatggcaggggaccagctcgggcactgaggcgctgctggcaggctgtttcgacgattccttctggcgctgtccgctggtcttgggggctgcgtcctccggcttgccagaggacttgctggggggctgcgtggggatgttgctgctgctgggagactggaccatgggtgagaccgggctggaggtgacgttgggtggctgcaggggccccgaggacgggagggctgactgggaggggccggaggaagtaccaggcggctgggtgtgttgccgagaccagtgggagctgccctgtgcccgacgctggccctgggccctgccggacaggcgggagccacagccagagccagagggcagctggccctgggatccagagctgggggtggccgaggactgggactgggacttgcccgaggtggcatttaaggagacccccagggccttgcctggacccgagggactggcaggggctgctgttgggggatgcgctgaagactctgtggaggcctgggagcctggcgcggccccctcctcaccagccaggaggtccttgtgaggctcagggggctgcttcacttgtccttcggctgcggggtctggcttggcttgacgttcctggttattccggccgccgcgtccagggctcgcccgctgaggtcgttcatgattctgtctacggccccgtggtgccttaggaacagcggacgcacgacgcgctgatacagcatgagagccccgttccagggcctgggagccatgcagaacaacaggaaggcgcacttgcccacgtagtagaaagggaaccaggacaggagtagatcgctgaagaactcggccagcccaaacagggcgtacaccacccagtaggtgagccacacagtgtcgtcgtccttgcttgggctctcgatagctttgattgaggcatatgcggggtacacaaatccgatgagattgcacagcagagacgctccgtagccgaacagcagatacaggcttagcagagtgacggctcctgcagccagataccgcttctccaccccggcctcgtgccgaattcgccacccaggccttcggtgaccaggttcctttgctccaggaagtgctccacgcgctgcctcaggccgtccatggccccgacgcgcccggggttggctgctcgagctcgcccgcggaccagggc

SEQ ID NO: 322673 - DNA, 857 bp, Homo Sapiens
  misc_feature (450)..(458): n is a, c, g, or t
  misc_feature (818)..(818): n is a, c, g, or t
  misc_feature (823)..(823): n is a, c, g, or t
agtgagtctagtactgaatgggacttagatggattccagtgagctggactctgagtcaggaagttcaagttctttttccagatgatgaagtctgggtgcaagtagcacctcagcgaaatgcacaggatcagcagggttctttgtaaatagtattttgagacactaagatgtttctactgctacggaatgtattttaaacacatatcgtttctttttcttggaaaaaaagttgattaggaccacagatttggtttagaaagggtaatattttgaaatactacaaggtttagacagtccatgaaatcgacctgtttaataatttaccatcctgaaagtccagaattaaaatatggaagcaagaactatataattgattaggatgcttggtaggtttttttcattgttcaaatattcattgcacagtggattgttttgattagttagtatgcnnnnnnnnnaattaattcagtcttctgttaatttttaagttttggttagtgccacaaggaatttaactttttgatttgtataatagaaaactgaactaggaattgttagcggggttttgaaggatgtgtactttccttcaaaataaagtggtagattttcaaaattttacactagtcagttcttttatatttctaaggttaaatggtagtttgtaaaaattattttggggtttttcttctaccaagggaaaagaaattggatttttatataatataaaggttaactggccataatggattttccatttctggactaaataggtggcaggaaattgggcccctccccttaagagcctccaaaaaaaccancagcnagtcgtagacctgacgcaccgagtaggcggccgc

SEQ ID NO: 322674 - DNA, 657 bp, Homo Sapiens
  misc_feature (508)..(561): n is a, c, g, or t
cccaaactacaaattttaatagaattttaaacccaaccactggccaaaaatcactcggtcacgaattcctaatccacaatcacatcagtaggaagggaaagcactcattctaacacagatccaagaaccaatggctaccccgggtaccttaacagcatcaactcagaacttaaaaaatcaactagagatcatccaaggaacgtaagtataattctacaaaaaaccatctcatccccattgcagcaggccccaaactccagtgaggcttccataggccatggagaatgggtttggctcttgtcacagggtagagccccatgataggggtctgaggtagatgaaaacaacagggtagccaggggcatctatagaagatgttacagagctgcctgggcctcatgacagttgcacctcagttacaaatcccagacggctctatttgcttaaaccagtttttccagtgacgcttacatgctgactttcttggtttctatagatgcttggtttnnnnnnnnnnnnnnnnnnnnnnnnnnnnnnnnnnnnnnnnnnnnnnnnnnnnnnataatagtaacaatatttacataagtatgtcacattgagagattccagcatgaccaaggaatggaaaatccaagaatgtgccctggcctgtgtgcc

SEQ ID NO: 322675 - DNA, 232 bp, Homo Sapiens
ctgattgagaggcattgaattacgttttcagtagtacaggcttcttgccgatatgaagggaacttttcagaaagagacctactctgggtcatttaattttgaatacagttttcaatcgttcaagttttggatggtttatatctaatgtgtgtttcatttttttggaaagctatattttgtatttaggaaatggtatactattttgctatttgtactgagtgagtacattggc

SEQ ID NO: 322676 - DNA, 665 bp, Homo Sapiens
  misc_feature (528)..(528): n is a, c, g, or t
  misc_feature (642)..(642): n is a, c, g, or t
caggaaaacattctcttactttatttgcatctcagcaaaggttctcatgtggcacctgactggcatcaaaccaaagttcgtaggccaacaaagatgggccactcacaagcttcccatttgtagatctcagtgcctatgagtatctgacacctgttcctctcttcagtctcttagggaggcttaaatctgtctcaggtgtgctaagagtgccagcccaaggtggtcaaaagtccacaaaactgcagtctttgctgggatagtaagccaagcagtgcctggacagcagagttcttttcttgggcaacagataaccagacaggactctaatcgtgctcttattcaacattcttctgtctctgcctagacttggaataaaaagccaatctctctcgtggcacagggaaggagatacaagctcgtttacatgtgatagatctaacaaaggcatctaccgaagtctggtctggatagacggcacagggagctcttaggtcagcgctgctggttggaggacattcctgagtccantttgcagcctttgtgcaacagtactttcccaggatccacaggaaatactcagagtccacctggacattttacttatattcagtttccaagtgtcagaggggttcaggactgtcntgcctggggggcctcctcatgac

SEQ ID NO: 322677 - DNA, 847 bp, Homo Sapiens
  misc_feature (258)..(287): n is a, c, g, or t
gggttaggtccttggctttatgggagttcccacccaaatgagccaaccaggttagaaaaaattggttttatttcaaactttcctagcgttttgacttgtgcggcggtactcaaatggggggccagtgtgggagggggagggaatttcaacccagagttcatactgcaacacgtacaccagatatgtctcttggtttttccttcttttaaaagttagggctaactgaaaaagtgcactcaggtatctaaaattgtcccnnnnnnnnnnnnnnnnnnnnnnnnnnnnnntcaattcatggtgaggctttgagctaaaatcttgtcaaataccacaccgagaaaaggcagtgaagaagagaaatgaaaaccaaagccattcacctctgtaccctccagataggaagatcttattgttgttgttttaatgtcacaatagtactgatcatgctaacagaggcgggagcctctttctgctggtatttagaaaggtgctttaaagaagtcagccacctgctacccagttctcccagggcttggcttggcacagccttgcccaagaggccgagcagttgagaagccagatcccctcttggcagttcagaaagccttgtgtggggctaaggcagggacccccaaaaaggcagccaggggaagaactggaaaggaatttgatttggaagatctgccgtctgtcacctctctccaagttgagacaggggcctggatttcagcccttcctgccgagaaatctcccaaatttcaacctacctttaaaaataaagtctccctacttaaaatccagtagatatcatggcactaatgctaacacccctttccccaaattaata

SEQ ID NO: 322678 - DNA, 442 bp, Homo Sapiens
  misc_feature (330)..(330): n is a, c, g, or t
tttgaaagtaatttctttattgagaaaataaagacatggttcctaaggaaaagggctaaaaatgaccatgtttcaagtacactagtgaatagcaagtgaaacaaaatgtcttaagcatctatatgtcttatcttagatacatacaactattgtaggaacattatttctcttatctctcaggaaacatatttagttataatatgaaaaaaaactaaaattgagcttctaatagaaaatcaaaccctatcagaagaagagttacgtggagtaagcgattttataccgatgctgacttactctccctaccataaaatttgataaacaacaaanatttattaagcacctaccacatgtcaagaactctgctaaagacatacaaagatgactaaaagagtacctgagctcccagtctagggattaccacaaggaagagtgacggatc

SEQ ID NO: 322679 - DNA, 1368 bp, Homo Sapiens
taaagggagaagtgggggcctttattaaggtctggcagatgtggtggaggtggaagtacaaacccaggcctgggcctaggaaagggcagaagaaaggcaaagggtcccttggagcaggaacccatccctctctgcttatacccagcacccctcatcccaggttcctttcttcaacctccgcctgcctctgggaacacagagcaccaagaactgacaaaccgggaccctccagggccacagcgtggggcagagtccaggcttctgtctccccgcagtgggagatctggggagctcagtgaacctcctcaccctcctgccagtatgaagttgggaagcgccttctctgtcccccagaacagaacaaactcttgttctctgtggttggggaaaaggtgtggggggcttggacctaggaagaagctgagctgaattcctccagggcccaggtgaaacccccaggggagtttctgagactctagacttgccatttctccacttttccttcccaatgactccggtgagcagctcagagtctgggctagggcaactggtaggacagtggggatctgccccagagacatctgtgggtttcagatgaaggtttccccaacaccagattcatttatatgtacacagggcagcacccacctgcggcagggggaacagccgctgggggctagtaagagtagccacccttggggccaaatggctgggcggggccagccagctctgggaggtaggcggggctctcatccaagtgggacaaagggactgtgtcctcctcactgacaggccggtcaaactcagccttgagagctggacgctgattgtccgggaaggccaaagagaagagggcctcgggctcacacacaaacttgtacacgtaacgctcaccagccaccttctgcatgatgcctttctcataatagtatcggagcgagcggctcagcttgtcgtaattcatggctggccggttcttctggatgccccagagcctggcgacctcctcaggctcaatgagcttgaactccattccccggcccgtccaggcaatgaaatgggcatttgttgggtcatccagcaaggccaccagaaattgccacagctgcagggcaccccggcgctggtagggcggcccctctcgaaatgcaccgaccccttcctgcttgatgtctccttcaaatttctcagggacaacacagacatcatctgggaatggtcgcagaggtttctcatagccatagcccatggccccgtcacctggagagggcccagagaagccctctgtgtggaggtacattgatgcgcacccggtgacatctgagtcgtaggcgaagtccgcctcgtgccgaattcgccacccaggcc

SEQ ID NO: 322680 - DNA, 393 bp, Homo Sapiens
tgaatattaaaaatttattaacatttcccagaaaggtagtgtcagaattaagccattcgcaaaagacgaatttgccataaacaaacattcacttttgcctgatgacagcaacactgtgatggggtggcactgtgccccacggacaggtccacaactgaacacatggctctatctctccttttgggcttaaagtttagtgttattttattttacaaatatttacagtcattttgtaaaaaggcagtttttagtagcaggaaaattcttctgttttataggtatggggatcacaggttactaggcgtatctcccaatggtcaaacccagggttaaacaggcatcaccaagggtgtcccaggccctaataccaacttccctttgggcccggggggg

SEQ ID NO: 322681 - DNA, 403 bp, Homo Sapiens
ttttaatgaatattaaaaatttattaacatttcccagaaaggtagtgtcagaattaagccattcgcaaaagacgaatttgccataaacaaacattcacttttgcctgatgacagcaacactgtgatggggtggcactgtgccccacggacaggtccacaactgaacacatggctctatctctccttttgggcttaaagtttagtgttattttattttacaaatatttacagtcattttgtaaaaaggcagtttttagtagcagaaaattcttctgttttatagtatggtatcacagttactagcgtatctccaatgtcaaaccaagataaacagcatctacaagatgtcacagactaatacaacttccctttggccaggggaaaagatctgtatctttttttt

SEQ ID NO: 322682 - DNA, 970 bp, Homo Sapiens
ttctattttcgcaattccatgcgctcgaaatcaccctctttggccaaattaacccaccagagagcaattttaccccagggccggcacgggacacaccattgaattggccaccaatgaggaaagaatttagcagccattggttatcgcctcggtccttaattgggttgtaaagtggtttactccagtaacattcaagtggggatggctcatttcaggatttacttacagtctcttctaaggtcctttaagcccccagtccatgcaaatgtcccacttggtggacagatgagtaatctaaccccaccgggtttatttcaatatttcgatatttcaataataagctgcttctgaagattttttgagaagtctgttctctattaaaataagatagaaccttaaaatatgaatgtggacattagaaatagacagcatatattacaaatccattcttgataggaacattagtaagaatacacattagcttaaaaaacaggctcagcaaatgttgctgatctgccaaagttttagttcactatttacaaataagacaagtgaaatacagaaaattttacacatttggtagttgacagatactgtttgccatagtggtctatcagaaaactgacatgaaggaagactggaaaagagccagttgtcaccttctcaaatttaaatgtacagaaaactagattaattttgaaacaacattctgcctttcatgggaataactgtatgatcacatgatttgattgggaagtacaattgtgaggaagtgttttctggaaacaactactataactctaaataatccactaatgaaaagttaccatttttgtttcagtagaccattgaagttgattaaatgataactagtggtagtgtttcctaaaccctaagtatgagtagaacgacgcgtgggtcgacgatatcccgagattccgaccgtaccacctgctttttaacagttcat

SEQ ID NO: 322683 - DNA, 549 bp, Homo Sapiens
  misc_feature (416)..(416): n is a, c, g, or t
  misc_feature (465)..(465): n is a, c, g, or t
  misc_feature (491)..(491): n is a, c, g, or t
  misc_feature (494)..(494): n is a, c, g, or t
  misc_feature (531)..(531): n is a, c, g, or t
tttaattgcaactggacttttattgtgcagttacaacaacaaatgttttcagaaaaatatttggaaaaaatataccacttcatagctaagtcttacagagaagaggatttgctaataaaacttaagttttgaaaattaagatgcaggtagagcttctgaactaatgcccacagctccaaggaagacatgtcctatttagttattcaaatacaagttgagggcattgtgattaagcaaacaatatatttgttagaactttgtttttaaattactgttccttgacattacttataaagagtctctaactttcgatttctaaaactatgtaatacaaaagtatagtttccccatttgataaaaggccaatgatactgagtaggatatatgcgtatcatgctacttcattcagtgtgtcntgttttaatactaataaggcagtttgacagaattatttctttgggactnaggtgattatcatttttttccccttnaanattgtgctttaagtgctgataaccacaggcagattgnaaagaactgataaggcaa

SEQ ID NO: 322684 - DNA, 1042 bp, Homo Sapiens
  misc_feature (51)..(51): n is a, c, g, or t
  misc_feature (621)..(621): n is a, c, g, or t
acagatgaagggatcaagaaactgtaatgtatatgcacaaagaatactctnttggccatcaaaataactaaaccatgtcatttggagcaacaaagccactgcggcctccatttgggccaagctctgactgcaatgatgcctctgccccgacccgggcctcgctgtgactgacaatgccgctgcatcttttcagcagtcattgatgaggaagtatctacatcctccttcccactaccagattttgcttggagaaaagcagtttcctgaaataattctgtgacgagcttcttccacattaggacaaaaatgctggaagcgggctcagccccagggcagcacatcagagacaccatggaacacagccattcctctgccgtcgtgctgggaccagtctttcctgaccaatatcaccttcttgaaggttcttctctggttggtcctgctgggactgtttgtggaactggaatttggcctggcatattttgtcctgtccttgttctattggatgtacgtcgggacacgaggccctgaagagaagaaagagggagagaagagcgcctactctgtgttcaatccagggctgtgaagcaatccaggggcaccctgactgcagacattttnggagcgcgagttacagttgagacccctggcagggagattaggacccagctgtgctgtcatgcagtaacctctgatgtggtcttcctcaccattggtatggatttgatttcaggtgtataggactaagggcagttgcgggttactctgtgactgctttgttttctaacttcttcccggatctttgctgcattgatcttgatagttgggaactctctaaataattccggggtcgagccattctaaattgttctcggaaagcgacggtggtcactctatgtgggagattagaaaaggggggggatcataaacacaggatattggaacagggaggagaatgtaaagattgccgcaaaaggagggggggagcaaaatgtggtaaaaaaggaggggcgggttgtctgtgcgtagtattatttttcct

SEQ ID NO: 322685 - DNA, 669 bp, Homo Sapiens
  misc_feature (130)..(139): n is a, c, g, or t
  misc_feature (171)..(171): n is a, c, g, or t
  misc_feature (503)..(503): n is a, c, g, or t
  misc_feature (583)..(583): n is a, c, g, or t
  misc_feature (594)..(594): n is a, c, g, or t
  misc_feature (611)..(611): n is a, c, g, or t
  misc_feature (649)..(649): n is a, c, g, or t
ctgaagaggagatgttttaaagatattttatttttcaataccagtaatgactgaaaattaaagaattaaagcaggaagcaaaacaaaaacaaacaagaaacccaaaacttgcaacctaaactctccgggnnnnnnnnnnttgctataaatgttaaaagacttaaagagaanattgacaatgcagccctgatgtacctaatcatacttcaaactgctggatgttttaagctgagaatctccccagtgcctttctagtgctctaaaatcatctcccaaacagatgagaaatgaaacaaacaggtctcccttcttgagtacataatttttataaattgcgtcggacccacagtgaatgtattttagagagtttcaccaaaactatcaaagatcaaatggcagcaaaagatcagggaaagaaggtagaaaaactatgcagtcacagagctaacccgcaagctgcccttagtcctatacacctgaaatcaaatccatagccaatgggngaggaagaccacatcagaggttagctgcatgacagcacagctgggggtcctatctccctgccaggggggtcttcaactgntaactcgcggntccaactgctctggatncaggggtgcctgggggatgggctttcacagctgggggntttgaacacagagtaggggc

SEQ ID NO: 322686 - DNA, 671 bp, Homo Sapiens
  misc_feature (21)..(21): n is a, c, g, or t
  misc_feature (33)..(33): n is a, c, g, or t
  misc_feature (57)..(57): n is a, c, g, or t
  misc_feature (59)..(59): n is a, c, g, or t
  misc_feature (62)..(62): n is a, c, g, or t
  misc_feature (78)..(78): n is a, c, g, or t
  misc_feature (152)..(152): n is a, c, g, or t
cattgggttccccagaaccanatacctatccanagatcccaaaaacggattaccatnanaantggagtttgaaagtanacaaaataatttggtccttacatactggaaattaaaaaacctaattttaaaaagtgcacagtaaaaacagcatnaggaaaacctacaatatccatgacatacgtattggtttcccatttactgccggacatcaacttctgtatttgcctcactggttacaaatatgttttaaatatttcaaggccgtttccaacactgactagtttactaggtccaacaatactttagcttcctgaaggcagccagcatggacgtggtctcagccctgcggctctgtgcagcaggagcaggtctggaaagaacagtcgccaaccagctatttcaaaactatcgactcttgttctttttagaattccccttactggacatctttagtgtgtcaatctcttctctctgtttagataatgtctcattcatgctgcacaggtggtcactcatcatacttaactgatcctcgtaactcctcttggtagttgtcagctcatcctgaagtctgctgatgttctgactggcaagtttcatttcttctgtcaatgcttccttagacttttcagccaaggccagtcttttagaacagtgctcggcactcggca

SEQ ID NO: 322687 - DNA, 433 bp, Homo Sapiens
  misc_feature (334)..(334): n is a, c, g, or t
aattagaaaccaagtttacatacggttaaatggttactaaaagctcagttgtaaccactcctaacaccactagcagaacctcaagggagccaagagctcttcccttttcccctgttaatttccagtataatgtagcagcacaattatttcatgtcacatttaagaagaacaagaaccaatttatataaagtacaattgtatatccttaaacattccacataaacacactgtcaaaactcactggatatgctggaattggaggacttaaatttctacatattatttattgcacccagagtactggttaaaatgcactttctgtgaagatcaaatngcaataacgtatgagggtatttttaacactgtgaagtacacacataatattataaaatgccatttaattggaaggagttttctatcattgcaagtcata

SEQ ID NO: 322688 - DNA, 683 bp, Homo Sapiens
tttacatttaaaacattttatgagggataaaatatagtctttttctatcagtatgtccacacttcctggcctctcattgggaagctgtaagatgtccttcaataagatcctgaacacgcgacagaataatctcattagagctgctgcaattttctggatcatatggtgggtctatagtcaggaccccagccacacagagagtccttggagcgtctccctgttcagtgatggggatgtggttcttctcaagccatttctttaggctgttctttctctcttccagatcctctgggctgtatgctttgcagtctccagacgtgaacaaatgcatcagcttctccctcactctatggtccccttcattcatagtttcaacagtctgcacagcatgtcccataattccggtcacagacatgctgccatcttcaaggaagttcacaaggacaatattggcagagactgggtctgtagttaaaacccatcctttatactcattcttctcactggctgtcactcggacctctttgtaaatgtaatcttgccattctaaggggcctttcttcatccattcactcatgattgccacctggctaaatcagttaaaaaactcctcgcaactctgggtactcagcaaccatgcctcgtgccgaattcgccacccaggcctcgctaccttaggaccg

SEQ ID NO: 322689 - DNA, 677 bp, Homo Sapiens
ttttttccatttaaaaccatttttatgaggggataaaatatagtctttttctatcagtatgttcacacttcctggcttctcattgggaagctgtaagatgtccttcaataagatcctgaacacgcgacagaataatctcattagagctgctgcaattttctggaccatatggtgggtctatagtcaggaccccagccacacagagagtccttggagcgtctccctgttcagtgatggggatgtggttcttctcaagccatttctttaggctgttctttctctcttccagatcctctgggctgtatgctttgcagtctccagacgtgaacaaatgcatcagcttctccctcactctatggtccccttcattcatagtttcaacagtctgcacagcatgtcccataattccggtcacagacatgctgccatcttcaaggaagttcacaaggacaatattggcagagactgggtctgtagttaaaacccatcctttatactcattcttctcactggctgtcactcggacctctttgtaaatgtaatcttgccattctaaggggcctttcttcatccattcactcatgattgccacctggctaaatcagttaaaaaactcctcgcaactctgggtactcagcaaccatgctttgaggaaggatcgttgagcggagaccccc

SEQ ID NO: 322690 - DNA, 400 bp, Homo Sapiens
  misc_feature (44)..(44): n is a, c, g, or t
  misc_feature (46)..(46): n is a, c, g, or t
  misc_feature (53)..(53): n is a, c, g, or t
  misc_feature (73)..(73): n is a, c, g, or t
  misc_feature (134)..(134): n is a, c, g, or t
  misc_feature (175)..(175): n is a, c, g, or t
  misc_feature (208)..(208): n is a, c, g, or t
tcaaactggtccctaaggccctccatccaaccccaaaacaaaancnttaagcntcaggaactcctctaatgcnttaaggaacgcctctgcctgattgccatataagggaatcaagaacctagtaatcgtggagnactctcagggacaaatgtaggaagagaggacacaacagagntttcacaattttaacaagtaatctgtcaccatntcagactaccaaatgctaatttacttaagacaaattatttaagtatatattcccacctttgcaatttatttctaaatactgatatattcattttttaagcagaccacatcaggttaataatggtataaatcaatttgaaaactataataaactacttcaagaataggtatatttttccattataccttgatc

SEQ ID NO: 322691 - DNA, 903 bp, Homo Sapiens
  misc_feature (105)..(113): n is a, c, g, or t
  misc_feature (173)..(173): n is a, c, g, or t
  misc_feature (282)..(282): n is a, c, g, or t
  misc_feature (284)..(284): n is a, c, g, or t
  misc_feature (297)..(297): n is a, c, g, or t
  misc_feature (303)..(303): n is a, c, g, or t
agaaagcgggggcggccgggccgcagaaccctgctcccagctagggcgcgtgtgtcacagggccgtcctctgcgtttccccgcgcggcggcgggttttatttgtnnnnnnnnncagcgcccaggccgccttaggtcagagagccccgcggtgtctcgcttggagaaccgacgnctaatgagcccagtggtcccctttaccctacctgggggcccgcggccccacaaacgaaatggtttaaggaaagcttcttgagggggccgagggcggccgaccacggggngntctcacccccgcngggggntcgcgggggctttagaacaattctccagaacacatttattatgctccccaacccataccggttcaattaggtttttcttctaaaaataacttggatcaagagaatcatttactttatacatattcgaaaacaactcatccactttcttcagtgttcccacggaggggaaatctggtcccaaccaaacagatgtaagtaaaaagtatgtttccctgttttggcttctttgtgttaatgacccagggaaaatatttgttgttttcccatgttggcttcaacataatgcatcaatatccttttcttcctctgaatcttgccctgttatccaacactgatcttttacactcaaaaaatgcgtacttcaaagagttgcagtatccttccttcaaacactgccgaggtgattttccttcctggaccacacagtccgactgcagcagacacgcgcccaggtcctccttcaggcccgcgcacgcggcgccctgcggcttgtcctcataatacttaggcatgacggcgcttcccctccgatgcggacgcgactttctcccaccgcaacacttgcaaccgggtcgggagcgagcgaggccccagtctccc

SEQ ID NO: 322692 - DNA, 525 bp, Homo Sapiens
ggcaaatcaaagaaatttattggcgttgacaaaaatacataatacagaaaccaaaacaaaacacaacagaaacaaaaccagaaaccccagcctagtgggcccatgtgcctgatgtactgacagtgtgccgacccagactcccacaaagcatggcacttaattcatgaggacctccatctgcaccagcctcgcattggtgtccccagacgttcggtatggtatcattccagcaaaggtaatcagagtgcgggcttgacttcggagttgagagtcgcggtcctcgatgactcgctggggcctggatgacgaggatggacttgtccccttgagcctcttaaactgtgtgaacaagatgttcatggtggcaagaagcacttctgagaggttgtgcctgatttcatcactgaaatttctgaaggcagccactctctcttccacactttcctgattcaggggcaccagcttcaagcgctcaatgatattaaaagctctatcaatatgaccactatgatactcgtcaaaaaa

SEQ ID NO: 322693 - DNA, 1160 bp, Homo Sapiens
  misc_feature (96)..(96): n is a, c, g, or t
  misc_feature (297)..(297): n is a, c, g, or t
  misc_feature (363)..(373): n is a, c, g, or t
  misc_feature (400)..(400): n is a, c, g, or t
  misc_feature (411)..(421): n is a, c, g, or t
  misc_feature (602)..(638): n is a, c, g, or t
  misc_feature (647)..(664): n is a, c, g, or t
  misc_feature (1039)..(1051): n is a, c, g, or t
tgccgcaggatccgttgcgggccccgtcggcgacatccaatcgctctggtgaaggccaggcgcgtatgccaggcgtccgcaagatatttgtactgncggggggtctacccacaggttgtttgtaaaaaggaggtgggccccttaggtttacgggggtcccccgtggggagggagcgccgggtttgttggcagatttgttgggccccctcatcgaagccccagtgtaccccttggggaaagaaagaggggcggtaaacttcgccgagtacgcggtcgcaacgtaagagtcaacgccgntttggtaagcgggtcggtttgttttttcggtttggcccacccaccccaggaattagttttgttagnnnnnnnnnnngggaattttcaaaggaaagggtccctnttggatccccnnnnnnnnnnnggcccggttcattaaggccggggttaaaatttcccggggttactgccacccggattccatttaatgcaggttaaccctggcttatcgaaaattaatacgctccccctatagggaggcccgggcagatcctaccccctttgtccaagaaagctgggtcagggaaacagctatgaccatgtcnnnnnnnnnnnnnnnnnnnnnnnnnnnnnnnnnnnnngcctcgagnnnnnnnnnnnnnnnnnngcatcaatcaacctttaatgtccaaaagaggcgtggatgcagagcataggagatgtggcagggtctcaggccctgctccagaaatgagggagagatgaacacaaaccagacactttcaactggccacacagtctgggagggcagggggaaacacagatttggacattcataaaaaaataaaacctaaaatcaagcactcaattttgtgcccattgaagggtttgataaagggaactcagtcaccacccaggtctcccctcccctgccaacatcacaaagcaagctcggcacacactaagggcttagggaggggtattctcctgcctccccaccagccccaagaatggacttgaaaataaaagaataagctggatnnnnnnnnnnnnnacattgtcaaccctacacgagagttttgaaggcgactcatgcgccacccaggccgcggtgcttgggatagtgtgtgcagacgaatggggcgccccgcttccctctccct

SEQ ID NO: 322694 - DNA, 232 bp, Homo Sapiens
tttagttttttcaataccttctttattatgtctataaaattatatgtagcattggaaatgttattgaatatgacaccaacaacgtgctattgtattttttaaattttgacttcttttaaagaaggtgataacaatctgtggaaaatgcttttactgtatcatgccaatatactgcaaggagtatttcaaaataatataaaagtaattcacagacttagattaagtgaagatc

SEQ ID NO: 322695 - DNA, 1137 bp, Homo Sapiens
  misc_feature (399)..(399): n is a, c, g, or t
  misc_feature (425)..(437): n is a, c, g, or t
  misc_feature (637)..(808): n is a, c, g, or t
  misc_feature (1106)..(1106): n is a, c, g, or t
tggggggggagaggaaactcccggctcttgttttgttgccacagggatttgtgtgggacaaaaaattgtttttgtgcttaccgcgttctaaacaccccttgcgggtgtgttttcctctccgccccgcgttttttcggaagtaaagtggtgttttttagggagacaagggctttattccctccccgccccccctttctccccaggggtggggggttttaaccgccgggccccaaattttgggagcagggtttcttttacgcgccccccggtttattttcacatgggcgcaaattgtctttatcgagaggaatttcaattcgggcgcggggggcccttttgggtgtgttcgccgcccccctcctttccccggtttcgcccgccctccgcgttttggtccgntatttcttgtggggcccctcccggcnnnnnnnnnnnnngtgggcggcactggccgcgcgcgttccttcggctgggggtgttttctttgggcccgcgtttggtcgggtccccctttttttccttcccgcggtccgccccccctgtttttccttttcgccctgtttttctgcccgggcggggttctcccccgggtgtttttcttcccggggggctccccccccgttttctttggtctgcnnnnnnnnnnnnnnnnnnnnnnnnnnnnnnnnnnnnnnnnnnnnnnnnnnnnnnnnnnnnnnnnnnnnnnnnnnnnnnnnnnnnnnnnnnnnnnnnnnnnnnnnnnnnnnnnnnnnnnnnnnnnnnnnnnnnnnnnnnnnnnnnnnnnnnnnnnnnnnnnnnnnnnnnnnnngcacaggtaattttattctctcctgtgggtgttgacagtgctcattgattgaaatttgaaacgttcagaaatcccatacctgaagatggtcacatattctttacatcatgattcagtaactattcaacagttatgtctactaaatacagtgaacaaaacagtataaatgtttacaccattcccctgtgaacagggcttttgtgcacaatagtaacaaatggaattaatgcataccatgatatcaataaggaagagaccttctctttaaataaactattttgtttataaataaactctnatttttttagtacacatttacagacctgatc

SEQ ID NO: 322696 - DNA, 934 bp, Homo Sapiens
  misc_feature (408)..(459): n is a, c, g, or t
  misc_feature (648)..(891): n is a, c, g, or t
ggattccaaaatagagatttatttattaaggattatttagtttctgcataaaaatctccaattgttcctcattgggttttttcttttaaaacacacatcaactcttttggggttgctttgtttgccccagcactttaaaaaatacagctctttttagcgccaggaagaacagttaaggttaaggcagtgaggcgttttcttggatcttagcagctgaagggttcatctctccccgtcaagagaatacacacggtaggtagtttcttaggttggaaaatctgtccctgaaggaaataattctgcagaagaatgcaaacggagtcatctatggtcaattcgtttgtgccctatagctttgaaagaaacgcctcttggtcatcaagggcttgctggttggtttcagctgtnnnnnnnnnnnnnnnnnnnnnnnnnnnnnnnnnnnnnnnnnnnnnnnnnnnntctgtctagcgagacagaaagagcagggtttacaatagtgctgtgaggctgggctgtgcaaaccacatgagaatacacaccagtttgctttttaaaaaatcccacataggggccctgcataattttaaatcaaactctttatagtccttaaaataacaatacagcgagagcctcataaggtcacgtgcnnnnnnnnnnnnnnnnnnnnnnnnnnnnnnnnnnnnnnnnnnnnnnnnnnnnnnnnnnnnnnnnnnnnnnnnnnnnnnnnnnnnnnnnnnnnnnnnnnnnnnnnnnnnnnnnnnnnnnnnnnnnnnnnnnnnnnnnnnnnnnnnnnnnnnnnnnnnnnnnnnnnnnnnnnnnnnnnnnnnnnnnnnnnnnnnnnnnnnnnnnnnnnnnnnnnnnnnnnnnnnnnnnnnnnnnnnnnnnnnnnnncgacgcgtgggtcgacgatatcccgaggattccggaccgtaca

SEQ ID NO: 322697 - DNA, 992 bp, Homo Sapiens
tgccctttatcaagagaattttttattgttaattatttaccttaatagtttcagaaagaggaacaaattagctcagtccaacatgattggcagttggcatattctagtgaagcaagtgttctgactgctaaggatttaatttggataattttaatacttagccatctaacacttcaagcataacccagaataaatgcatcaccttccctttcactttaataccgcacctacctcacttcgatatagaaatatcattcaatatgatttccagaaggacaagtttcctggagaatacagggcatgaggacaatgcacaaaaagaaaaactcaaaataaaactctgtatgataatttactagtctaaggaaacaaaaccttccaatatattaagaaataaatccagttacaaatgcactaataggtctatgtgaagaggttctggtataataactgaaaatggctggctatttacaagatacacaagcagttacggtgcacctagcccagcaatggccctcagaagccaaaagtgttctctccgctgtaggccacatataagaatccatcttcatctttttccttctcgtaaagctgtcccatagttaggctggactgtgggactgtcttatccacaaacaggaagatcgccttttcagaaggaagctggatccttttcctgatgatccacatgaactgagccacagtgatatcagatggaaccaagtacttccgtttgtcaatgtcaacaatctgagagcctgagaccttttccacaatcaccggaaccctgtcgggatatttcgctcgaatcttcgcggactccacgcatctgtgttccagcgagtggtcctccttgaacatccacttcatggcggcggcgggaaggggacggaaccggctcgcggagccgcggagctcagcgcaccgagcacaacaacaacgacggcggcagcggcagcggcagcgacggcggcgactacacggcaggcccc

SEQ ID NO: 322698 - DNA, 245 bp, Homo Sapiens
gatcactttttttagagtgaagaaagaacaaacttgttttttgtgttttttaaaggaatataaaataatgaaggatgtataattgatgccaaataagcttgttctttagtcacaccgacgtcttatttttccctttaggccagttctgtttttaaggtgtacatggacaatgttacagtgtaagaaactccatatccatatgttcccattcgcattttgtattggttcatgtataccatttttac

SEQ ID NO: 322699 - DNA, 845 bp, Homo Sapiens
ttttttgcagcaggcagaaatgagtttattgcattagaaaaaacaccgaagaaaaccagcaaacacctccgtactagacagttattagtttgactcaagggcataaagaaaactcagatactagatttacttctgggagggggtgatggtctcatccctcctccttccctatccctttaaaccaatggacctctagaggtgtccactgtgcaatacaagtacgtgactcatttcccactgtgcttgcctgttcacatccaggcggagttagccggccacaatgagaatgctcctgaggtgctgggacagacagaaatatgaggatgggggtaggcagttgaagcctgagcctgagtttacagttagtgacagtggggctcccattgggagggagagcttgccttcccatggagctctgggaaaactgctcagtgatccctcgctctctccccacaaaccctagggcacaggcaatggcacaaatggctgctagtataaaggggggtgctgttcaaggaaatgagtgactcaaattctctcaggggagctgctcctgggcctaagggtgcctgctggaagaagcaaaccagctgaaactggatctggaagaggagaaaggaaaaaaaaggagctgtgatgcccagaaccccctggatggaggggagaccccaggcagaggggtctggagcaggaccctggaagacagagccgggccaggcaagctggaaaagggaacaacactggtgggaaacagagcactggccaagaccaacctgctaccctcccagaagaaacccagcctcagaaattctttctctttgggcccaattctgctagtagatcac

SEQ ID NO: 322700 - DNA, 1252 bp, Homo Sapiens
  misc_feature (41)..(41): n is a, c, g, or t
  misc_feature (72)..(72): n is a, c, g, or t
  misc_feature (76)..(76): n is a, c, g, or t
  misc_feature (110)..(110): n is a, c, g, or t
  misc_feature (130)..(130): n is a, c, g, or t
  misc_feature (145)..(145): n is a, c, g, or t
  misc_feature (154)..(154): n is a, c, g, or t
  misc_feature (163)..(163): n is a, c, g, or t
  misc_feature (165)..(165): n is a, c, g, or t
  misc_feature (180)..(180): n is a, c, g, or t
  misc_feature (191)..(191): n is a, c, g, or t
  misc_feature (194)..(194): n is a, c, g, or t
  misc_feature (205)..(215): n is a, c, g, or t
  misc_feature (221)..(221): n is a, c, g, or t
  misc_feature (224)..(224): n is a, c, g, or t
  misc_feature (267)..(268): n is a, c, g, or t
  misc_feature (270)..(270): n is a, c, g, or t
  misc_feature (273)..(282): n is a, c, g, or t
  misc_feature (610)..(610): n is a, c, g, or t
aaaaaaacccactccccaaaaggaaggctggccttaggaanggggactttgggaggaggctaagtcagcaancaantggcctctgagggtctggctttcacgtctgtganactgctgtggaactgggganacatgagacccctcnactgtgggntctgttggntnaaaatgcaacagacnacatttatagnacntcagtcatttnnnnnnnnnnngcttanccnccttcccctaccctacccaactgtaggaaaggaaaaattcatnnancannnnnnnnnnaaaggtttctgcagtgctatgaaagtttcaaaggtaaaacctaacagccccacattgttaggatgatctccagggaccctgaattggatacttgaaggttgatagaaactgaaatgagctggacttaagctgctggctcactccctccacaccacagtcatttctgtttgttccacctggagtggtcccgtgccacccctcagtgaaccctccgggcagcagcaggggggctgtttttggggaagctacttgttttgcccatttgccttccagaatccacatagactattaaccaaactttaccattaaaccactgttctgtcctgangttgggggaaagcccatgtggggagggggccgagttcactgggactcttccctccttggcgtggcgtcatacgtggccctcaggtttctcttcttccattgcttgactgtctgttcctttttcattagtgaccccttctgaagtcttcttgcccattgctttattggcctcttccttggcatcctgctctgcaaacttcttgaacatgttggcgtatatcctgcggtcccgctcgttgtgctccttggcctttttctggcacatggagatctgcagtcttgcagccttattctgggggtttacttccagcactttctcaaagtcacccttggctgactcaaactcgttcatgagcagctgggcttcacccctcctatacaagcctttctcattggcactgtccagtccaagggccttgtcacagcattcaacagctttggtgtattctctaagcttcaggtagcacatggccaggttcagaaaggcagcaaggagaaatgattcagaagctttcgattccttttctgataaaccatattccatctctaaccaggacactatcttcccatactgaatcaccgcctgcatgtatttgcctcccttgaagtatacggttcccttctctttgacaatggcagcccc

SEQ ID NO: 322701 - DNA, 988 bp, Homo Sapiens
  misc_feature (11)..(11): n is a, c, g, or t
ggctaagcgcncccctcttggaccgtcttgcgaaaaaccgtctccgcgcctggggggttccacgtggggccgtttcccgagggccaagtctcctcccactttccccggggatatccccaaggggacgccgctcataatctctctttttcagagatggaacttcttattaggcagggtacaactgtcggctctaaagacagcagcactttcctcctgataaggatcacatcaactggtcaaggtccacgccggtttggtaatacagacttaattgccttgtggcattacaattgcaaaactctcggaaacgaatcctaatttggaacaaaacattactggtctaaaaacaaccagggtagtaccacattggacagtttaacagagcggcagttcttgaagacagacggcaaacaaggcagtgcgccagcaatggggtctgcatgcgggctacacccatgaggcccttattgtgaacaacgcaacgttctccatcagcggggaagcacacagactgcttggccaccaagctttccgcctggtctgttcatactgagatttagcagtaacagcccagaagggaatgcagctccccgctccctatgacatcaatgtcttcaacacatgtgtaagattctttctggagcccctagctcctccactcttcaaaactaacaacgcagagaaagagaaataagaaagcaaagacatcacattgccttagaaaagctgtcctcaactcatcttctctacatgttttcagatcactgtctgacggaatggaaggagcagctccacctccccgaggcttccgtggactccgcacacacacgaccaccagtcttcagtcatgtgccatggagactttggtcccaaccagtgtctgccttttctagaaactggagaccctgattcaaatggcaagatgtgttagttcccatttgccttgcaataaccctatgcttcacaaagattccagactaggggttat

SEQ ID NO: 322702 - DNA, 1280 bp, Homo Sapiens
  misc_feature (29)..(29): n is a, c, g, or t
  misc_feature (123)..(123): n is a, c, g, or t
  misc_feature (258)..(258): n is a, c, g, or t
  misc_feature (261)..(261): n is a, c, g, or t
  misc_feature (310)..(310): n is a, c, g, or t
  misc_feature (459)..(459): n is a, c, g, or t
  misc_feature (552)..(560): n is a, c, g, or t
  misc_feature (563)..(572): n is a, c, g, or t
  misc_feature (611)..(625): n is a, c, g, or t
  misc_feature (640)..(642): n is a, c, g, or t
  misc_feature (689)..(689): n is a, c, g, or t
  misc_feature (705)..(705): n is a, c, g, or t
  misc_feature (707)..(814): n is a, c, g, or t
  misc_feature (821)..(821): n is a, c, g, or t
  misc_feature (823)..(824): n is a, c, g, or t
  misc_feature (827)..(829): n is a, c, g, or t
tagaggggtggagcagcggtagcaacganttatcatgtctcccgccgcctctgcgtggatgagtgtatgtttccacacgcttggctcggaggcgtgtgagagtgtcttatttatatatataancactcctacacgcgtcgttgttctcctccactaattatgagacccagtgccagcggcggcgcgaggagacgatcatatgtattatgtggggagcgagacgcggtcgcgtcgagtgcggacgcgcttcctcctctngtngagtgttgaggcgccctccgtccggtgtgcggcttcccctccgcaacgnacgccgcgccccttctctatcgtggtgtgtgttgtactatagaggagacctccatgcgtggttgtgattcgcgccgccgcgggcgggtgtgtgttttttgttctatctgggtgtggtgggaggtatcgcacacccgcgccccacggtgntttgtgtctcccgcgcgggggtggttgtttcttctgtgagggagggagaggacagagcgaggcaaccgtcgtggttgttctatcgtgccaacnnnnnnnnncgnnnnnnnnnngcacccagggaggggtggttttataaaaaatttttgtcnnnnnnnnnnnnnnncggccccccccaagnnnctccttcttcttgttcctgcgtgggtgggcggcctggccgtagaggnggctgttccggggttngnnnnnnnnnnnnnnnnnnnnnnnnnnnnnnnnnnnnnnnnnnnnnnnnnnnnnnnnnnnnnnnnnnnnnnnnnnnnnnnnnnnnnnnnnnnnnnnnnnnnnnnnnnnngtgtttntnnttnnnggttaaatgacttactgtgtaattttatttcatattacacaaatgttaatcaaatgctgagtagacatgcagatgacaagcagtatatgacaaactctgaagaaatagttacatgtagagtttctcagatttttagtgtatctaagaattaactgaagagtttgttaagaatgcaggcttaaaggccaatccacagattataatttcatacaaacaggatggagcctaagaacctgtaaattattaaacaactgattaaaaatagagaggtttctatgaagttaggcttgtccttatttcttatttgaactggacaagtagaaggataataggtaggaccaagtgagcattatcagaatcaaagtagaggcaataacaagccaaggtgttttagcctagctaaagaagctcagactagaaaagacctccaggatcaagctgaagaatctcc

SEQ ID NO: 322703 - DNA, 1077 bp, Homo Sapiens
  misc_feature (232)..(281): n is a, c, g, or t
gaaagggaaaaattcaaagtttattcaacattaagaattacagacagataaaggtttggacttaacagcataaataccaccaatatcatggtgtacaattaaactaacctcatgtcaacttgtacctgtttaacagatgcgatctttgtgggtgttgccaaataggataatgggattattgttatgtttgggtaaggtgctcaataattaaagactttatgtcgacttattnnnnnnnnnnnnnnnnnnnnnnnnnnnnnnnnnnnnnnnnnnnnnnnnnntatctatcttctttacactatagtcctcctgtcaaatatgttaatagacatttagtttgcatatatccgtacttcggtaataatggctttgtctctattgttttaatagtggacatttctttaatgctgcatgacaaaaatcgtaggaaggacgcaccttgggtcctttgccaagtaggagggtactctatgtgacgcatgaagtggttgactcgtgccaactctggaagggacagactcactatacgtctcgagacatccttgtcgagggtgctagtagactctctcgagatgtcttcatattccagagtctccatatttgcctattcacactatagggcaagtcagggcctggatccacagtgccgttggagatcgctctaatttgactcgtgataacgtactcgacgtgtgaccttagggggacagaattaggggtaaaagctgacgataaatctatctaagaaaacaccaaggagaagtagctttcgcattatccacagaattgtcatatgtgtattacaactaggagggcaagtaggggaagggatgccaactagatatatctctagagcttcatgagccgaaacacagaacccatagagcctctagagttagtaccattggaggaagtttacgtcgtagaagatgcctccgagcgaaagacaagtaggcgtgaagaacgggaaccctctaggagatggtctcacgtcacagaggttttccattagccgacccacgcccaactggtgagaaggacaccatcgtgggacagtcgtcctacacaaggggacga

SEQ ID NO: 322704 - DNA, 533 bp, Homo Sapiens
  misc_feature (354)..(362): n is a, c, g, or t
gatcatcaggggttgtcaaggcctgaacgtgatgggctgtgatcttgtcgaagtttcaccaccgtatgatctttctgggaacacagccctgctggcggctaacctgctgtttgagatgctatgtgctctccccaaagtgacaaccgtctgagtcttgtgctcttcaagacaaaacagattgcgtcgctgacaagttctcaagaagaacttatgagtaagcagtctgagaactaaagagtttatgccaagaaaactttctgctgaaagtgtcattgctggctgtgaagtcgggataatcagtagaattctcacccaaacagcaacatttctaaggaacttggattaattgggggnnnnnnnnnggagtacttgtactgctttgattttttttcctttgatgaaagatggaggataaagggtaagtgaggagaatttctttcaagattatctaaacattagaaacatgacatttaaaaaaactatgaaataatactgtataagcattccatatttctatatcttccttttaaaca

SEQ ID NO: 322705 - DNA, 311 bp, Homo Sapiens
aaaaatagatatttaaaatctttattgtttcatcatcaaaagttttctttccatagaagaatggtaatgttgtatcagtgcatattctatggaaaattcatatctcaagtaactagcctagaaatcagagacagcactatgtcaagctagtatacaaggtcaaagacacaatgctgccaatgcaattagtatatagaaataatacgcagctgttagaaaaagtctgtggccaagtggataaaacagtagcagtgcactgcactgacatccagaacagaaaatagggaaggaccagagaatgcacttcctgc

SEQ ID NO: 322706 - DNA, 123 bp, Homo Sapiens
tttcaggacaaaagttatgcggactttattattatcacggataaattctatagttccaatctgcctactaacttggaaaggataagcaggaatacaatctcgcacagtgttctttttcagatc

SEQ ID NO: 322707 - DNA, 1332 bp, Homo Sapiens
  misc_feature (1300)..(1300): n is a, c, g, or t
cttacgagacgatttgtgatcatttcgtccctagggcggtgttaaatctttgtttagcggtaaggttcggcccaaatgttttcgccccggcgccaggagttagtggtttccttctccgaaacgtttccccaggttaggcgggtttttccccgttccacaaaggggtgaaatgtcggccggccaagtgtcttagtttaataatatagacttccttaatggggccctccttttttaacaagaaagcctaggtaccgggttaaggttggggccctcccgagaggatattcttagggcagccccccctgttgttgatttcttgcctttcccagggggttgttatctgaattggcaagttgaagttcaaaggcttttttgagctgcccagtgttttttctcagcagccaccagaggcacattcaccggtggcgcgtcctggtgggcatcctggtgccgtcaccaggcagcagccgcccctccctcccgccacagtaggtctgtgcggcctgtccggccccgctgcgtggcgcaggcaattctcccaaacggctccactgggcgcctggtgctgggggcggagccagtgaccacgggagggcgggacctcgccccggggcccaggacccctgaacacaagtcctccgagctggaggctactccagaaccacggtgccgcccaccgcctccagggccgccttgatcttctccgcctcagctttggcgacattggctttgatttcgtggggcagggactccaccagcttctttgcctggacgaggttgatgccttggatgtagttcttgatttccttgatcagcttcactttgtccacgggcttcgcctcggtcaggcggacggtgaaatgtgtccgttctttcgctatggggatatcttcttccaccgcctcctgggctgctgcagcagggacagccccagacatcacaccacccatcggcacaagcccgacatcctggatcttcaacgttttcttcaggagctcgttgaggtctgagatttccaagagagtgaggctggcgatgtcctggaccagctgctgtatcttgggggggtactccttgggggcgttatccaggggtgcaccagcgagggcctcacacctctgatggccgctgctcctcatatgtcgcacggcacagacacatggcacctgtcgcctggcaaggcggaacgcagcggcccgaagcccaaggccagagccacagggggcgagcgccgccggcagcatcggtccgcgggctggaaggtcacacgcggttccccgggaggaggcgacgctcttancgcctcggccgccgggattcgctgtgccgaat

SEQ ID NO: 322708 - DNA, 545 bp, Homo Sapiens
  misc_feature (226)..(240): n is a, c, g, or t
ggggaggaaatccaaaccctttgttaattgccagggtttccctgggaaacaagctatgtccctggttaatttccctaaggggcccggcgcccaaagaaatggttttaaaaaatttttagggggccgggggggccacaaacaatatttggccttgagttaggaagttggggaggacagttttttaattcagagagtggggtttcttttaaaggagatgcagaggtcnnnnnnnnnnnnnnngacgttagtcgagcatttaattacttgtacaagaactggaatgcagtaggtatgcaatacatgtttgtcaaatagttttagaaagtgctatgatgaagcgacataaccaaagacataacgcaattattttgatttcaagtccagcgctcttccgagtaactaggaaaaatgaggggaactgtgtaggcagaatgctgtggaggggtggaaatctgaggtccccaagagtctctaagtgtctctttagatcgaatcgaaggtcttttaaacaacagatataccagatataatgcacaactctttct

SEQ ID NO: 322709 - DNA, 1143 bp, Homo Sapiens; identical to SEQ ID NO: 246301
  misc_feature (52)..(52): n is a, c, g, or t
  misc_feature (62)..(62): n is a, c, g, or t
  misc_feature (66)..(66): n is a, c, g, or t
  misc_feature (75)..(105): n is a, c, g, or t
  misc_feature (107)..(224): n is a, c, g, or t
  misc_feature (226)..(226): n is a, c, g, or t
  misc_feature (826)..(884): n is a, c, g, or t

SEQ ID NO: 322710 - DNA, 379 bp, Homo Sapiens
  misc_feature (359)..(359): n is a, c, g, or t
actcttttagacccttctgagtgtttgcaggttgagtgttcacagggtgttagcctattgagctttcttttgcggttcttatgcaggtgatttctgcctttgcaggccggagccctcatgacttcagtgacctgcttctgcccctctaggtctatcagccacagtctctgcaagtttccaagagcagcagaaaatgaacacattgcaggggccagtgtcattcaaagatgtggctgtggatttcacccaggaggagtggcagcaactggaccctgatgagaagatagcatacggggatgtgatgttggagaactacagccatctagtttctgtggggtatgattatcaccaagccaaanttcatcattggagtggaggt

SEQ ID NO: 322711 - DNA, 861 bp, Homo Sapiens
  misc_feature (22)..(22): n is a, c, g, or t
  misc_feature (489)..(489): n is a, c, g, or t
  misc_feature (495)..(495): n is a, c, g, or t
gaaataatttttcacatatttncatggaggggaaaatggtagttgtaaaaaactactcaaagtagcaatcaccgctggcagtgttttctcactttctgttctgcaattgcaatcacacttccaaaaagaaaagcaaatgtttgctaaaccatagacagacaacctctttgtgactggtattataaggtttataatgaaaacttatcaaatataaaaggtgctccctcttgaaaatgtgtattttatttgaagttttgagtaagaggtgagtgtttggcaattttcaacactcccctcaaaaatctcccaaagttgcaaaaaagtcagtttagtaaaattccaagcacttaaatgcttcattgagggccagttgatatacgcaatgcactaatgtgtaaaaattaaccgaatgcaactattttataatggagagctcttaccttttccttccagtttttaaactggcataaactttattgacttcatccntcctantttttatagcaacctagttttaagatggtacaaagttgaatttctatcacaagacaaataaaataacatgaaagcattatcctagttaatgctatttcaacttaagaaatatctacattgaagtatttgataataattgtaaagttacttaaccgtatgtcatgttcagacagtatgtagcagctagtaacgtgcctggcacagagttgatgcttaataaatagttgctgaataaatgaaaaagaaaaacctgcctttggttgtgcatactttaatcactttctgatttagaaaaagatcagtctagagctcactactgcacactacatcaaactttgctgtaaacaaaagtaacaacttcaaaca

SEQ ID NO: 322712 - DNA, 360 bp, Homo Sapiens
tcccgggaaacgtatctcttgggatcaggagctgggatggaaccccagggctcctgagatgggacaaagctatgctctgtgcacctgtcttgcctcctcactttgtacaatgagtgtgccttcagccaaaagcagaactggaaacatcctaagtgggccggtaacgaggctagctctgtcgactagttcaagacccctgagcgctttgggcctgaggttcctcagcttccaagtgaaaggcttcgacttggcattctaagagacaatctctgtgaccatcagtttcctcatctgtaaaactggcatcatggtaactttgaaggtaattgtgaagattaaagggagtcatgcatgtaaacc

SEQ ID NO: 322713 - DNA, 512 bp, Homo Sapiens
aatgatgtagttgtttattttgaatataatcatgaagtggggaaaaattttaatacaagagtagaaagaggattccagagaaaaacattccagtgtatcatggttctttgtgagtgagtagagaggggtagtgaggatgctgtccacaatgtattcatctagttaatgaattgtatggcccacaagctcaaacgagagatacattacagatggttgtattataaacctaatcttaagaaaccttaccaagcaaatgcttaaagactgatttttttgtgatctgataaaaagcctgcaaatcgtgaatcacttttaaactgtacagaatggactacacaccagtatggtaaagttcttgtaaaacaccaaacacaatggctcatagatatatacctctctcactcttaaatgggcatttcctaattatagaaaatgtttacaaccaaagaaccagagggatccaactaacaatcaataaggagaactgatgtgaagtcccatacactgttact

SEQ ID NO: 322714 - DNA, 523 bp, Homo Sapiens
  misc_feature (447)..(447): n is a, c, g, or t
  misc_feature (476)..(476): n is a, c, g, or t
  misc_feature (512)..(512): n is a, c, g, or t
ctttcttacataatatatttgttttgatagagatgtagagttgggtgggtgtttttgtcactctgaagtttagacctcattaaatatttgacatctacagttggataattttgccgcttagtgtccttttttatatacaatataacaaagtgagagaaatttatattactggcaatttcatttttggcagtctatttctgtatcatgtaccgcttttcttaaaacttaaattgcttattttgttgtgtaatgtcattgcttttgatttgctttgtgaaaggagataaaccgtttcagtaattgtcagagcattttgttgcctcaggctgtgttacctcaatttcagagtaagtagtggttgattagtaatgtagtatacactggcagacatctagaatagtatgatgctttacatttaaatgaggtttattcttttaaggacttttnatttgtatgttttctgtaagggattatanaataattgtaattaagggatataccatactatattnaaacacattct

SEQ ID NO: 322715 - DNA, 773 bp, Homo Sapiens
tgccacagcgggggcttcagtgtgcacgtgaccaatgatgaccggggccggagcggtgtggcctggacccaggaggtggcggtgctgctgtgagacatggccgtgcggctgctgcaggacggggcagtcacggtggatgggcacccggtggccttgcccttcctgcaggagccgctgctgtatgtggagctgcgaggacacactgtgatcctgcacgcccagcccgggctccaggtgctgtgggatgggcagtcccaggtggaggtgagcgtacctggctcctaccagggccggacttgtgggctctgtgggaacttcaatggctttgcccaggacgatctgcagggccctgaggggctgctcctgccctcggaggctgcgtttgggaatagctggcaggtctcagaggggctgtggcctggccggccctgttctgcaggccgagaggtggatccgtgccgggcagcaggttaccgtgccaggcgtgaggccaatgcccggtgtggggtgctgaagtcctccccattcagtcgctgccatgctgtggtgccaccggagcccttctttgccgcctgtgtgtatgacctgtgtgcctgtggccctggctcctccgctgatgcctgcctctgtgatgccctggaagcctacgccagtcactgtcgccaggcaggagtgacacctacctggcgaggccccacgctgtgtgtggtaggctgccccctggagcgtggcttcgtgtttgatgagtgcggcccaccctgtccccgcacctg

SEQ ID NO: 322716 - DNA, 694 bp, Homo Sapiens
  misc_feature (557)..(557): n is a, c, g, or t
  misc_feature (578)..(597): n is a, c, g, or t
  misc_feature (612)..(612): n is a, c, g, or t
  misc_feature (650)..(650): n is a, c, g, or t
cccccttaaactgggctccttacccttcttgagaagcattgacagtattccaggggtggccagcaccctgaaaaccacagcaaagcgggcagagttaaaatttaagactaaaaatgacagcatcaggcatgcacgcgggaaggaacagaacaaccagctcccaggggttcccatcacccagggaggccaccaacgccccaaccaggagccatagcagcaaatttatgaaaaaaatattttattccaaaacactgtttacacaaatgtgtggtctttgtacaaagtacaaaaaaacccctcttctcatccccacctcccttcagagaagtttaaaccttgggctctcaatcttccatggtcagctgcccctgactgcgagtcctacagcctcagagggaggagcgtgtggggttgggagcaaggcctcaccagaacacagccagttacgcaacagcgcaaggcctgctccaggggcccacctccagcggagtcaaaccagatcagcttttacccctcactccagattccacaggcacggcagcacatggctgatttgncagtttgtctttcactggcannnnnnnnnnnnnnnnnnnnccaggaaggcaagangaccaacccctccaaagtcccgggggcccctggtccanccaccatatcctagacccaatcttttctaacctctttggtcgaa

SEQ ID NO: 322717 - DNA, 494 bp, Homo Sapiens
  misc_feature (44)..(44): n is a, c, g, or t
  misc_feature (58)..(58): n is a, c, g, or t
  misc_feature (302)..(302): n is a, c, g, or t
  misc_feature (350)..(350): n is a, c, g, or t
cacagctagagaattgagaattaactatactactagccattttngggcaccaaaactngggattaaacacttcctacttcccactcccaactcctgaaatgaagtcttgctatctgtgactagttttatttttgtgcttttaatagtccgagcagtcttaccttgtttacacatgtattgacaccatttgcttcaggccatggagcactgtttctccctttttactatttataggattccgttttttcacaagacttttaataaaaagaaattgtagaaataaacacattaaaatttgcccngctgtcgtctaagccctcttgattgacttgcccaagtggcaatagagntctaatatctataataaagggagatttgctattattagtggaatgttgaccccgtatgtagagaaacagtacgtgcctttgcctctttatgcacacagagacccagggtgagggagtatttgttcccagtttttaagatagtat

SEQ ID NO: 322718 - DNA, 770 bp, Homo Sapiens
ggggaaggttggtttgtaaattgcgggattggttctccctggattaagggaaagggaaagggaaattctaaattccttgttaaagtccgtaaaggccatggggggttcatgtggaaaaaggatggcctatagttctgggaggagggagggtattaaatgtagcttgtgtctacagcaggaaggcttggggtgcgggattctggagatgcttgatgtggaagacttaaaatgcctttattatttagtggtgatgtgggagatagggaaggacagggtcctcttggcagatgggctcttcttcctcttcatcagatgaactgtctatggttaggtcaatcacttctactttcttgtttttatttgaggactggtggtgagacgctacctgatgctccaatgtggagctcaagcatccatcgactccattgtaagaggcagaaacttcctgtacttccttttttgatctcatcggtgcccaagtgccatcctccttaaattgtatttcattcacagtctgtacagtactttaggatttccataaacaagccatcaataataaggtgttcatatggagccttcttattacagacaggacaaacccaggttggttttttctcattcatctgaatgtaaagagttgcgtcaaaacattgtagatgagaacatgtaagggcccgacacggaattgtcagccgcattttaccaagtggacatagtagagaaacccttaggctggttgtagctatttcactgtctggatccgcagtccc

SEQ ID NO: 322719 - DNA, 302 bp, Homo Sapiens
gcaaagcaaacatgtgactacgggaataagagtgagttacatttaaagtcagaaatatggtcaagttagagtgtccagtgaagtgataataattcagagatttgtttcacagattgtattttatttaagcatacttactccctgacttttaaaaactgtttaagtcatatgctcctaatagtgcttaaaaatctattgcaagaagttagttctccaagtacatacaatgtactcttcttaagtttggcttcattcattaaaccgaattattttgaggtccatctaggttgttgagagtatca

SEQ ID NO: 322720 - DNA, 454 bp, Homo Sapiens
ttttaacttttggtgagtgtgtttattaactcttactccccacgggcaaggctgggttttggtgagggaaagaaaagaccctcattgaggacattgctgggtaaaaagccttcagagagctacctactctttgtgggtgtggtaatgggcagccttcagcgcaatggctaccagggatatgaattcttgaaagtcgacctgttcatcttgattagcatccaggccttggaatatttcatcaatgacagctttatctttgatattcttgatggtgtttgcaagctcctttgtaagcagctgcttcagctcacccttagagagggtgtcaaaatgccccttccgaactgagtattggtggaagatattgacaattccctccagatgctcttcaagttttgtcatcttcccagcctaatgttaacccctcaatgcacaggaatgtggagctacagca

SEQ ID NO: 322721 - DNA, 871 bp, Homo Sapiens
  misc_feature (231)..(231): n is a, c, g, or t
  misc_feature (351)..(365): n is a, c, g, or t
gtgtggtgggggagaatcccccacggcctctgggttccaggcgccccggggttctttcctctggggaaaaccacggccttgggcccacgtgtttccgtttaacggtatggggggggccccgcgcgccccccaaagggaaatggtttttaagagaaggcttttcttggagggggcggagggtcgggaccgccccaatgtactctctgcgctgcggggggcacgttcctgagnattttccctgggccccaagccccctattcttaaaccataaaaattaaaacctgccagggcgggaaatttaaccaatcccattaaaatcaggcaaataagtttatgaaaatccataaagcnnnnnnnnnnnnnnnaagtaattaagggtagttaaattatttaaagtatacaaagtccaaacagccaggggtaaggtctccaagaggccttcccagggtaagggagagggccacaggggaaccttggagtttgaaagacaaagggaacacatgacatcaaagtgcaggctagaaatttcacttagaagaaaataacattactgaaaatattcgtaagagtaacaatagcacctgcacagtgggactgtgaggaagagagagactgcctgtaggaaaatggaagcaaatctttacattaaaatgagacaagtgctgaacttaactatgttaactatgatagtgtgtctactatagatatcagatggttaaaagctgggtaaaagggtaatgattctaaaaacaaaaatagcattgaccctttttctacctagcccagacctcattcattttgtgcactataaagagtgaggtgtgaggtgttttatcattatcaaatgctgcatcaaaatagatgatttttt

SEQ ID NO: 322722 - DNA, 1096 bp, Homo Sapiens; identical to SEQ ID NO: 130359

SEQ ID NO: 322723 - DNA, 1575 bp, Homo Sapiens
  misc_feature (104)..(104): n is a, c, g, or t
gaggtaagttccccctgggggccagttgttggtccgaagttgtgaagtgttttctgagcggggttccaggtgagtttgtaagtccccgtgtgaggggtggaggngatgtgcttagcacgggcggtgggggcacgtgtgggctcaggtgggtgccataggcagcagcactggtcgtggtcatcctgtgcagggaagttggtgctgcccgggaaggcaaaagtccatccggccattcaccaggtgctcagtgtcatcggagacgctgggcctctggctgcccgatggagagcgtagaacgtcatcgctgtacataaggaagctgtcgtagtcctccccgctctgggcgtccacgatagggatgtcagggatgatggggatggacatgggcctcttgggctgggtggccaggttgatgatggcctcccgctcaggcccccagccggccccgttgcgcgccttcaccgtgtagcggtagggctgggactcccgaaggttctcaataagcagcatccggttcttagggttgtcaaccagcactttcttcatgggcccaataggtcggttgtcatcgttgaccaggccatagcagacctcgtaggctgtgatctcaccgttggtctcagccggctcagcccagctcagctgggtcaccgtggaggagacgacattgaaggccagacgccctggctcgctgggcacttcctggtgggtgcggcaggacaccagggagctgtagggtccctcgccctgagccccgtaggcgcacaccttcatctcatagtcgcaatacgggtacaggttggtgagctccactgagggcaccttgctgtcgagcaggtgggcttcggattcggagtcaccctgaatccagtactttaccctgtaccccattggcttgccagaagggggcagccagttgaaatggatcttcctggacccagcggccttagcattggggttctgcggggcgcccaggtcgccgtgagggggtggctgtgatgacaacatctgactcgtgaagctccggtccagttcatctgggtccctgatgatgatggtggtggagtggggctggcccaggtgggccccaaacttagggttgctgagctggacgtggaaacggcggacctggcggccccgcaggagggagtcaacttcttgcagctccaggagcttcacctgcagctctttccaggcctccccaggctggaacagcagctcaccctccacggggatgtagtcccggttgccctgcgcggtgccatcctgtgtgcggtaggagacctgggacttcccgccgtccaggacacgccggatgacagggatgcgggccacctggtccccgcggctgaccgagaactcaggctgctcaaaggacaccacgtctctggcttgctccttgatgatggtgatgtttaccaggcggcggccgagggtggcagtgcctgcgggcacgtcgatggcctccaccagcagctgcttctcgtcgtcatcctcaggccggataaagaggggcacccgtacgtccaccagctccacgccctcctggaactccaccatgccccgggcgtcctg

SEQ ID NO: 322724 - DNA, 2464 bp, Homo Sapiens
  misc_feature (99)..(99): n is a, c, g, or t
  misc_feature (215)..(215): n is a, c, g, or t
ttggttgccccgccaccggttccggggagcaagggcctcccgtagatccaggggtcaaggggcccccgggcatcagggcttctggggagtgaggtatgngaatctgaggctcaggggtcagggggccccggcgtcagggttctagggagtgagctattggaatctgaggctcaggtgtgggagtgtcagggctcaggacataggtattagaatcncagggtatgaagtttcaggtttggggaattagagcccgtgagtatttgggggaagagcacggagcgcttgctagccacggggcttgggtgttgaaacactgggcctcctgcctggggtctgagatgacagagtagggggttaaatgcccaggtatcaagtatccaggtccccaggtgtctggtcctggggatgcgggagtcgcaggactgggctgcctgttctcaggagtcttggcctggtgctcacagccaagctgctcccatcagggctgtgcaccccagacgtgcgtgttgcccttcctgcggcgcagcagcacatagacgagcgcaaccgccgccaccaccgcgaggcccccaaagatgatgcccaacagcaccgcgtagctgcgtcctggctggcacttcggggtgggtgaggaccaggtgccgtcagcctggcaggtgctggtctctgccccggccaggctgtagccgttgtcacagtggaagtagatggtggaacccgccaggtacctgttgccctccttttgtccgttgggaggtggggccagccagccacaggacaccactggctgcaggctctgcatgcgacgctggtgcagctggtgggccacccgagtggcagtgcccgtgctcaggctcccagtggctgccacatcaaagttgcagaaatgatcgtccccacatagtttggctgcctcttgtgccaggctggggttgagggtggtctcactggggaagaggggctcgaaggtggggtcgtgcttgggttggtacaggaagttgtggaccaggaaccaggaatcgtaggtgagcagggaggacgcattgtgcacggtccagttggccccaaacaggaacagctcctggggactggtgcctgggggcaggacgcgcccgctgtgcagggtgaagtcgtcggtggggtcgttgttgagtgtcccgaggaggccgtgggtgtgggtgaggaacttctcaggcagcaggacggacacactcaggaacgggccctgcacgctgacctccaggccggcccctgatgccagcatgatggagaccctgtccccggcagccaccgacaggaacattcctttcaggtccatccagctctgctcggtgaagctcagcacctcctggttcagcagcacctccagacctccggtcctgttggccagcctgacttccaccacatctgagttgccctcctggacggccactgcggtcagcccagtgccacgggtctccgtgccgttggacatcgtcccgggctgggcccgcgcctgcaccctcaggtcggtcagcgctgcctccagcagcacgtactctccgcgcccattgaatgtgaagttggtgccgtcgaaggtcacaaagtgtgggtctccgaaggcggaggccagtcttgggggccggtagttgcggcagtcattggagggccgccgttgcatgtagcgggggcagtcgggtgcccagaggcagcagtaatagaagctgaggacatcgtagagccagtgggacatgctgggcactcggggtggcgtgcggaacgggggtgcgccccagtcatggccgcggtcgggagtgctgccgccgctggagtcagctgtcaggagctgcgtcccgtccgctgtgtagcagcactgctgacctgagccgtaccggaggctggcctgcacagaacgcacacagtgcacggccccggggtggtaggtgcacacgctgccctgctccatgtcacagccgtagtccgtgaagaagcggccggagtcagcccgggcctgggtcagggtgcaggggcagtccggcagctcctccaggaagttgggcagctgatcctccagctcctcccaggcctggcactgagttcgtgcccaggccacagggtcctctcggaagtcatcgctcaggtgccaggccagtgcgtggtcgttggtccagagcgcctgcacgtccttctgccctgcgtaatttttgctgtcgatgatccgaagtgcacccactcgccatctctggtagctgggaggagcaggttttggggtgaaagtgaaagagccggagttggggatgtgtgtggccagggggtacaggtacgaccactttgcagtccactcctgtgagtagggcattcctgtctctttgtagccccacagttcgatggtgatggtctgcgtgggcagcgacttgacatgccaggtcaggctgaggttgcctgaggtgttggcggtgccgtagtattgccaacacgtctcgtt

SEQ ID NO: 322725 - DNA, 968 bp, Homo Sapiens
ggagggtttagggttttcttcccagggggagccgtgccagggggtttggcttgggctgggatgtacttcatgaagcggtgggcctttccccccagcggagaaggggctgcctgtgggccgccaggggggagaaaagccccttcccatcaactcatccatgccagcaatggggtggacaaagtagtggaacttcttttgaaacacgtccagggtgtggccccaggacctggcgttagtcggccttgccctgggcgatcaggttcagctgtttctccactgcactgcggatggtggggagcaccagctctgcatcaatcttatagtagccgtgcaccaggacgatgccgaggttggtgggcttgagccggcgcccgctctccaaccgtgacatagttgcgctggcagatgttgttgatatgcacagggatgctggcatccgtgccgatgccatgcttctccatgagcgtgatgagctcggcctccgtcaggtagtcgggtgggttcgtctgcttctccagcatcttcacctcgcccacagggaaggcatcaccccgctggcaagtgggcaggctctcctccaggggcacgctctgccagggcatgacctccgtgaagcctggtgagaggacggtcttcccggagcaggtgaagagctcgggcccaattctgaaggagatggtgctctgcaggtacttgcagtcatggctgaccgtggcgatgaagtgtctggtgatgtactcatagagccgccacgcgtcaccccctaattcggcctctgtggcagacttcatgggggtgatggggggatggtcgccggcgtcatggcctttccgcgggcggttgataccttctgctaacaaccgcttcaccgtgtcggcccagtaggggtggttggcctgctgccgcagagagcccttcaggtcaaagttctccctcgtgccgaattcgccacccaggcctcgctcttt

SEQ ID NO: 322726 - DNA, 2549 bp, Homo Sapiens
  misc_feature (231)..(232): n is a, c, g, or t
  misc_feature (244)..(244): n is a, c, g, or t
  misc_feature (286)..(286): n is a, c, g, or t
  misc_feature (336)..(336): n is a, c, g, or t
aaaaagaactgagggcagggaagggcaaagtcggggggggttccctaatttccctcaacatcccttccctggaccaaaccacacaagggggcaaaacaaaggggggaggggagggcaccaggtgatcgctcccactgggagaggaatgcacaaagcttacacccacgcggcacaaaacgagaacccctccctccccaccaccaggggggctgggcggggcgacacagagannagccagagcacntgtggattccggggggcagggggaaagcaacaaaagtctccnttacagacagggtggccggccccttccccgttccccgtcctgctccatcnccagagtctatcgctgcccctctgctctgcccagccattctcccacggcctccagcttcttccctgctgccggggacaaaaggaaaaagggtacagagcagaggggctgaagtccatccctcagcccctctccctcatgccaggtggtcttcccctgccctcattggtaaggggtgaggcaggctcttagctggccactctctggtagaagtagatgtagcccaggtccttgggcggcttctcggaggcacacactttctggtcattgtagatcacccatctgccttctttcttgatgtggcagacgtagtgaccacacatggtagaggtgcccatgtgactaatgaaggcaaagagctgatactttccaggaccatcccggactttaggtcccactggcacagactcagagatggagtcggcagctgagcggccctctgagatgtccatggcagcttcagcatccaggtcgtcaatgtgactgaagatccagtccacagcccgttctaaactattgttcgtggcccgcagcgctttcaaggcctggtcccgggagaagcccatggagacaatggtggtcacacagtcctcaggaggggggtcggctgctgcgcttgtggagcccggcccactagagccaggcaggatgagggtgtttgcaaaatctggatcatccaatgtgtgacatgaccccagttcatggcggtcctcagccccgctgttgcccgtgtagtagacagctttgcggcaggcgtccatagggaatcccatctccaccagctggatgatgactgattcatccaagcatgggcgctttgggctcatccggagtgaccagggttggggcaatgtctggcagctcctcctctccgggctgcagccctgtgcccctcaactgggagatgtcgagctcctctggcatctcgatggacacatccagtttcttgggcacccagtctaagccgaaggtgaacttcttgatctggatgaccaggtagtcagggaatgaggcaaatcgtgtggtcttgacagctactgacttggcctgcagggccgtgctccagaagtcatcgacctgctcaggggccccgtaggcctccaggcaagagctgaagggcacctgggcccgaaccagttctggcagtgccatcttctcctcttcggcttgccgcttcttctcctcgtactccagaagctcctctttgttaagggctgcatccatgggcacaggcagctgcatgatgtagtcaactcgctgggtgtacttcaccttctctgtggccaggcacttgatctttttcctccaccaagaagcggaacacttcattaggattttcagagctccggcaattcctctccaccatgttgataaggtgaagggaagaactcctgggcatcctgctgccggtttgtggagaattcagggtggcccttgccgatgagggccttgaacatccgaggggcaatgccatcttgaacttccttctgttttggcacccgctccccatcgcccgactccggtactggcttggaatactccccggagagaaggccatggcccagcttggccacctgggtgctgaaatcctgggtagggtccgtcggggcattctggaagatcttctccagcttatccacatacttcctctggaagtcagggatgctgaagagcacctggaccacagagttgaggtagcagctgttacccaggttccggatgcctgtgtagccaggcccaaacaggggcttgagtggcacacctgactcctggatcagctcccattcaccaatccgctggttcatgtctatctccaactcagtcatcgtcttgtctgtcttctgcatcttcagcatgtcgatgccgaagtgggacaggtgctcagccaggctggggtccaggaccatgtcatcctcatcatatgagtacacgtcagctccatcaggggtgatggtgcccagcttgacagctaacgggtagcctgtctctcggtagtgctccacagcgtggttgttgcccccactgccatcgaagtagcgtcgcccacagaggatggagccatcagtcaggttgagccacaggttctctctcatgtcacacttggagcacttccagccacagggagggattcgagcagggttgtccaactgcttgaggctgaaggcatgcttagacacctgccgtacttcccctcgtgccgaattcgccacccagc

SEQ ID NO: 322727 - DNA, 2114 bp, Homo Sapiens
gagtacttgggcctacatgggccagaggtggtttattcagtctccataagagaggggacaaacggcacagttgggtccgtgaagaggagggtccaagagctcacaagagagcctctctgagatttgacccctccatcccctcctcagggaggttgtggagtcactgggcctcatgggataggcccagggcaagcaatgatgagactccaaaccagctggacacagtccaggggcaggaaggcagccaagcgtcctgacccacaaggccctatacagcaatggagccatcgcggaagtccgtcctcccaatgaggatgttgaccacaaccgggtggccgtctcggcactgctgctgggcatcgtgcagcaccttgaccacctgatcctcgttctcccgtgagagcagcaagccccgggcccccagacccatggctgccttgtgataatcagtgtaggccaggccacaggccacgttgctgcccagagagggcacctgctcccgagaaatctgtgtccagccagcatcattccctaccaaggccatcactgggatcttgtgtctgacgaatgtatcaaattcgatgaggctgtagccaaaagctccgtccccaaacaggcaccagacttcagcatctggccggcacagcttggccccaagtgcaaatcctgcaccaactcccagagtcccaaaggccccaggatcaagccagcgcagggggccgcggggctgtaccagatgggcagcagtgcccacgaagttccccaccatcccaccaccagaattgagttgtcaggtagcgtttcctccaccagctgcagcacctgcactgggttcaggtgctgggccacaggcatcgctgccttctcccgaaaggtctgctccttctgccggtcggcttcccgcagctcctccacccagtctggggcccaggtctggccctgaaggccctccactaacttcagcacgaaggaacccacatctccctgcacagcctcctggggcttccagaagatgtctgagttgagcaacatctcttcccgattacgattgacgatgatgatcttgctgctgtggctgaggacacggccataggataggcggaagtcacacacagttcctgctaggacaatgacatccgccttcttcagggccgcactgcggttctcccggatgtggagggggtggttgcggcctaacagcccccgtgccatccctccaaggaagcagggaacacccaaggtctccacggcagcccgaagcttgtcggcagacgttggggtgagcagggcctgactccccagcaccatcagaggcctcttggcccggctcaggatctccacacagcgctgaacctgctgcggggaagccctgggggatgtccaggggcagcggtccctcgggctgaggctcccagggctcctgcaaagaggttggccaggtaattctctaaataccaggagaccactcggccccacgaggcccttgggtggcttggctggcaccatctccttctggaccatgaagtaggggtacagcacgtcaacgggcagctccacaaacaccggacctggggtgcccgactgggcggcagccatcgcggccctcagggtgggcacaatgtcccgcaccctccgcacagacacacaaaacttacagagtggccggaaaagggacagctgatcaacagcctggagcgcaccccggttctgcagcagagtgctggcagccccacccagaagcaggattggggactgagccatctgagcattcttcaccgcagtcaccgtgttggtgaagccagggcctgctgtcactgccgccacgcccaccgtcccggacaggcgggccatagcatcagcagcaaagacggccgtgacctcatggcgtgtgtccaccacacggatgcccagtttctcacaggccaccagcagcggggaaatgtgcccaccgaccagcgtgaagatgaaccgcacaccatgggccctcagcacagcggccacgttctctccgccatgccggacgcttgccttgtccaccttgtgcagcagctgatagaagagccccaggcggtgagcggcgcccagcaaggcggccaccagcgtcccgcaggcca

SEQ ID NO: 322728 - DNA, 1362 bp, Homo Sapiens
tattccccagttgggaaacaaggaaaatggaaatggtccaacctttgggggacgggggtcatcccagaggaagtcctaagagccccccaacatggttggcgtgtctctgggtcctcaggtcatcaccccaggcctcaccccacaggggcacccgccacgggcccgtggcccaccgtgcaaaggttccacttggtgcctgcgtgggaacgcaccacctgccgtggaacttcctcctgcggggcagaggaggggtccagaagccacaggagtcaagtcagcaaaattaagttaatttacaaagttatagtaaaaaccacaatagtgacccagtccctcccacgcagtgtgagccctgggctgcgccacacccgcaggtggcccgtgctggcacctcacagggcaaaggtggtgaagaagatgtgcatcttggccaggaaggtggtgacggagccctgcctccagagcttcatctccacatccagggcaaagtcccggggctccagcacggcccgctgcaggtagaccacacccgtgtaggcattgagcctgcgcgtgccaaagtagccctcctcattgcccttgatgatgttcagggcgatggtgtcccctgtgaaggctggcgcggggccaatgcggaagatatgcgcaggcaccaggaggcccgtctggaagttgagctggtagtgcgtgatgcgcgctggcgagttctggcactccaggaagtcatggcacgtggtgcgctcgcacttcgttttggagacttggacatagttgggaggacactcgaagcgcaggcagcggaagctaccctggatgttgtggcaggtctcagcctcggaacagttgtgggtacccagtgcacactcatccacgtccttgcaggacctcccgttggccgtcatggtgtagccctgctcagggcatgcacactggtagctccctggcacgttgagacagcggaaggtgcagaggatgccggcgccttgagcacactcgtcgatgtctgtgcaggtgtgcccatcctcagccagctggtagccctggcggcagtagcactggtaggagccatagatgttggcacactcctggctgcagcgctgggcctcacactcattcacgtcttcacagcgcttgccgtccgctgctagcaggaacccggaggcgcaggaacagcggtaggagccgagtgtgttctcacacgtgtgctggcacaggcggcctggcgaggcccagcactcattcacgtcgatgcagccccggccgaaggcatcccgctgaaagccggctttgcagtcacagcggtaggagccagggaggttgtggcacacttggccctcaccgcagcggtgcacacctgtctca

SEQ ID NO: 322729 - DNA, 891 bp, Homo Sapiens
  misc_feature (259)..(260): n is a, c, g, or t
  misc_feature (272)..(272): n is a, c, g, or t
gtggaaaaggtggaaaccttttgttgtttaagccacccagggaggcccggccccaccagctgggggcttcgggcaaccaggggcaggcaccatggcccctggttgccttccacccctaaaaaaattggggaggggctggtggcagaagggctcccctgcaggagggtcaccctgaatgactctcagatttcaacagacccccttctgccccccacaacccctgtaaacatgagaatgggctcgtgacaccctcaacacnntcaggacaagantgagggtccgagatgtgtggctgggcttcaagcggccccaggagctgccgggctttctcctgcatgaaaagctggtcccctggtccccccgcaggccaccgtcttcccaggcactggacataggggcaggtgtcgtgaagtggcttcggggcttctgggccactgctgccttctcgggcttggcctgcaagaagccctggttgagcaagctgttgtcttctttgatacctgacagggtgaggctggaagagtttgaaggggcagttgtcggcaaggatagagacttgggcagtgtggacatcatcagcttcacatcctcatccacaatgtcaagagccagagacttccggactttcttgaatgggtccgccgcagcccaggcttcctcttctgcttctcgggcctgatgtcgtcctcgatgatgagttcgatgccagcctcagaacgcagcacctccttcaagtcctcctccaggtgcggggtctgtggctgtgggtaggcacggggcagcccacgtgaggcaccacactcgggctgtgtgtgtgtgggactgtgggaccaacccagctgcaactgggctgtcctgggtaaggcaggaaggaggcctgacgccaggatg

SEQ ID NO: 322730 - DNA, 2569 bp, Homo Sapiens
gctgggggggagagaaagctggaaccgggaagcttcccctctgtgggcccttggggggaggggatcccaggcccaagaccctgggaaggggggaacttttgtttgttagccaccaaggagcccgcccccacagcgtggggctggggcaaacaggggcaggcacatgggcccctgtggcctcccacccgaagagtttggggagggggctggtggcagaaggctccctgcaggaggtcacctgaatgactctcagattcacagacccccttttgccccccacaacccctgtaaacatgagaatgggctcgtgacaccctcaacaccttcaggacaagatgagggtccgagatgtgtggctgggcttcaggcggcccaggagctgccgggctttctcctgcatgaaaagctggtccctggtccccccgcaggcccaccgtcttccaggcactggacataggggcaggtgtcgtgaagtggcttcggggcttctgggccactgctgccttctcgggcttggcctgcaagaagccctggttgagcaagctgttgtcttctttgatacctgacagggtgaggctggaagagtttgaaggggcagttgtcggcaaggatagagacttgggcagtgtggacatcatcagcttcacatcctcatccacaatgtcaagagccagagacttccggactttcttgattgggtccgccgcagcccaggcttcctcttctgcttctcgggcctgatgtcgtcctcgatgatgagttcgatgccagcctcagaacgcagcacctccttcaagtcctcctccaggtgcggggtctgtggcaggggcttcaggggtccgtacttctccagggcgttcttgaacggggttggcgtgtggggagtgttgtccatggagtacttctgatctggggttacaaacgcagcatgtttctggtgcaggggtgtcttgtcccggtgcagtggtgtggtgaccaccaccttctggctgcacactggggtggatgtcagcgaggggctctccagctccaatgtgtcctgtttgttccagaagttcagaaactgggagggcgagaagggcagggtcttaacaggtgtgctcttgggcgtgaggctgttacaggaatccaggaaggacagactggtgctattctcagtgacaggggacagagccacacgcctcttcctctgccgcttgagcacagagggcggtgtgccaatgccagagcccccgacttcagtgctgggggagatggggatcagctcgccccggctgctccggctcaggtctgagatggtgtggccatccaggcggtactcggtcacactgggcaccagggcggaaggctggcggggtggcaggacttgctgctgatgtgacgcttgcagctgcactaggctgttgttgatactgtcctctgcagatggttcctcagggaggtcaaatttactcaggtcacaccaagcatcagggtccgactcgatcaagtccagggcttcagagaggctagaacccacagcggggatgaggagtttagttgcttccaccaccccacttgtaaggcaggctcgtttctggtggggagccttcctggtcctcacgcttcgggaattcctccaaggggctctggtgttcgcactgcgtccagatctgtaccgatgggctcctgttccttcgatgtggtggctgctgcaagttcctcctcactgttttcctcctcctttatggtaggagggacggagggccagttggtcagaagacttccctggccttccgtgggctgggcactctggaggccgtccttgtcctcgagctccagcagcaagtacactgggggcttgcagtctttggactcgctcaagaagcctcctgtgtccaccttccttttgatggtagagttccagtgattcttcacagcattgtctgtcctccctggcaacatcttggcgatctcggcccagcggttgcccagcaccttgtgggcctcgcagatgatgcggtcctcctcctcggtccagcaagacttcttcacctcagggttgaggtggttgtgccagcgttcacggcactgcttccccagccggcccttcaggtgcttggcaatcagtgtccactgctttgtgccatacttcttaaccagctcgatgactttttggtcttcctctttggtccatggccccttgacaaggtctggattcaaaactctcagccacctgtactggcattgctggtcagtgcggttagggaagtggctggccaggaacttccagtcctgctgtccaaactgcctcaccagggccctcagctgctcgtcctcctcatgggtccatttgaccttgcacttgctatccctctgctccggcacatctgaatctgtgtcctggtagtgcagctcatccagatcctcgcagcgcgtccgccgagacatccccccggcccggaccgcgccgcgctcgcccgcccgccggcagagcccggagcgggagccgggccggggtcaggacccgggctgctccggccgctccgggccccgggccgcgctcgaaggcgtcagcgtgtcagcaggt

SEQ ID NO: 322731 - DNA, 568 bp, Homo Sapiens
  misc_feature (492)..(492): n is a, c, g, or t
  misc_feature (519)..(519): n is a, c, g, or t
attttttaagagagaggcaattttattcttccaaaaaaatgcaccaagagagggtgagcacaggagcacccctggccacatcccccatcctaagcagggtctgagatgaggccaggcctgacgtgggcttgggagaagctgacggagctccctgtggccttggggagggaaccaggcagacctgggaagtggaactttgttgttagcaccaggagccgcccacagctgggctccggcaacagggcagcacatggccctgttgcttccacctgagagtctggggaggggctggtggcagaaggctccctgcaggaggtcacctgaatgactctcagattcacagacccccttttgcccccacaacccctgtaaacatgagaatgggctcgtgacaccctcaacacctcaggacaagatgagggtccgagatgtttggctgggtttcaggcggcccaggagctgccgggctttctcctgcatgaaaagctggtncctggtcccccgcaggccaacgtcttncaggcactggaacataggggggaagtgtccttaattggcttcggggctt

SEQ ID NO: 322732 - DNA, 973 bp, Homo Sapiens
cccgtttgcaatcgggcccgacccaaacaggggggcggggtcctgcagccccccaggaagttccaggggggccgcagggggagggtttcatgctgccaaggccggcgcggcccggcccttggtgttgggacccccaagccctccgggggccttggaggggcctgcagcagccgtttgcagcttcttgaggaagatgtcctggaaaagccacaaagtcgatgacggcacgttcacattctcaggttcctggtaccctggtgctgagggggaagccagtgcagctggtgccacagcgtgtcattgggaggaagagcctggcaacattgagggcccaggcccagggccgtgcagttgcgggtggggctggcactgctctgagctggaactgctggctgagaaggtgcctggggggcacggctggcactgcgtgttctggctgggggtgcccggggcaatcacgccggcaccaggtggacacgatgcgtgctccaagcagaaaccagcgtgcgcgaagaagccggtgcggcagcggcaggcgcggttgtgggtggcgtggcaagcccgtgcctcctcctcacgctccccgcagaggacgttgcagtagcggcagcgctccaggtagttccagaactgcgtgtagtggcgcggtggacacgggccacacgtcgtggggctgtctcggcggcacggccgctgcacaaaggtgcctggggggcactgggcacacaccagccgctcccctgtctctgcgtcccgccaggggtaggtgggtgtttctgccactccgcgtacagccggcaccggcagcagggcaggcagcgccaacaccaggcacagcagcgacaggcctggcccctccagcgccctcatggtccttgctggagcagggagagcgcggctcagcgcggacacaggaccctgctgtgcctgaccgacatgccacctcctttgcccccggtccgcctgcggaggg

SEQ ID NO: 322733 - DNA, 879 bp, Homo Sapiens
  misc_feature (249)..(249): n is a, c, g, or t
cagttgtacagcatagtgtagtgaccggccccctgggggccctgcctggggcattcaagtccagagcagggggccagcatgggggtcagcaccacatccaggtccagcgccctccactgggcaatcacggttttgcggtacacctcgatctcgtgctgcagttcccagagttttccagccgaacgagacttcatgttgctgaggaaagctgacagccttggcaagcagaggcttcacccaggaaggccnagcagtcctttaagccattggggaagcttcagaattgaagacccaggtccccccaggcaggggtcccacgaaatcacctttgaagttctgtaggaagttgtggccaccatcactgaagagcccacctgttgacagggtctccagagcatggggtatgttgcttggcaagaagggaaccagcgtgtgccccgcagcctcaaggctctgtttggtctccagcacggcccgcctcatggccggggagggcatggtatagttgtcagtctcatagtaccccacacgcaggggctgagagctggtgtagacctcttctctgaagggcaagggaggcacagtggggtccaagcggaacatgtcctcgcacagcagggctcgcaggcacagtgccaggctctccacgtcccgggccatggggcccacggagagacgcactgcctcctgtccatagacacagcccttcaggccactcttgctgaggcggttccctgtgggcttgaggccgcagatgccgcagaaggaggaggggaagcggatgctgcctccgatatcagtgcctaagcccaggggggagcctccagacccgatgagggccccttcaccccctgaggagccccctgggcttttggagga

SEQ ID NO: 322734 - DNA, 1028 bp, Homo Sapiens
cagaggagtactttcattagtgttttcaatagtgtgggcgcaggctcagaaggtggagaggctggcctcagaggacacccaggcttggggctaagtcccagtgtccatatgaagctgtttctggccttgtccgtttttgttgtcccaggctctgtgcccctcactcagtcaagaacttgtctttgtgttgcttcttggggacatgctcagggcagaagtcagagcggaggaggccgggaaaagtagattatgatcatcacgtccagcatgagcaggatacccagcagggaaggtgcccagggtcttctgtttcccataacgcaagaagaaatgggtgaggtaggcctgaggggccaggcggaagagaaagtacatgaccaggttcacatacttgttaacccggtagaggagatgatcctgggcattactgattttcatcatcatgcgaatggtgaggaagatgttgctgacttccaccagtagtgttaagacacccccaccgacaaagctgctccaaaagatgccggagaagaaggcacccatggccatgacgtgatggacaaggtattcccaagaggctcgcgtctgtccgctagccacgatgtccaccgtatcgtggatgaaataccccgcagagaagcaaacgagcaaatagccagaaagtgaccacgccgtctcaatctccactaacatgtcaggagtctgccatacacacagcagtgcccagatccccgacacaatggagtgagcgaaggagacgagcaggttgtgccagcgccaggtgcgcagggggtcggcgcgcacgtgcacgggtaggggcaggcgacagagcgcgcgccggagcgcccggaaggtcagcgctggcgcccaggagcagcggcagggcggggtgcagcagtcggggcatgctggccctccctgccgtccgccctcgaggccgcctcctaggtctgttctgggaaccgggatccctctcgggccagtccaggccggccgcctctcccgccggccgccagccccacacagtg

SEQ ID NO: 322735 - DNA, 994 bp, Homo Sapiens
tcccacaatgacccaggttcgaatcctctggaaaacagcctagtaaagaacttctcattaggtgagaaggccatctgcgtgactgtcaaactgtggaaaactaaattctgcacctgtttccaagatgtagtgttccaaagaatgatagctgcatgctctttcttagctgccttacaagctgaggcaagcagagtctttgaactgttacaagtaacacaaaatatttcataaccgtgcccatatagtttttgaacttcaggccacaaagtattctgcagaagatgatcctcagtgggaggctcagtaagtatggagggctgaaaggccacctgctgatactcaaaaccagtactagttaacagctcctcttcatcagaaggctgagaagctatatctccctgaaagacagctttatttgataatcccaatgcagggacagtggctccttctggaagatcactatcttgattacagagcacatgattcagtgattgtcctgtaatggcacaaaaattttccacaaaattccgaggtgcagaaaaaacccgaagaactttttcatctgctccagatacaaactgaaaccgattaatcattgccaaacatttcaggtcatacccatgtatctgaggccttgcaatttcatgccaagtcacctgtgattggtcttttctcttccatggagcaaaaagtctagttgtctgatcagtaccaacagtgataataaattctccttctggatcccagactaggtcttggacaccatcaaagtgtcctgaaatgacaatctctggagtccactctcttgggttaactgtattctgtttccaaaggtgcaacgctccgtggaaagcatgagcaatgatcatggagccatcttcattgaactggcaatcataaaatcccaaagtattcccacctacttcacctactcgaacctgttctagccaaactcctgactcttcatctggagcccagagaatcatgttttatc

SEQ ID NO: 322736 - DNA, 1994 bp, Homo Sapiens
  misc_feature (581)..(624): n is a, c, g, or t
cgatatcagttttgtttaatctgaaacctataaaatagagatatatctacctatttatggatggataataccatcatctcatatttgtggaatgctttatagtttttcaaagtacttttattcactttatcttccatatatgttatctcctctgattccagcaataacagcccggtgaggtagccagggcaagtatgtattttacacattagcaggaagggaggctaagcgaggtttatgtaacttactcaggctgaaacactgaagaaaaatttgtgactctcatttcagtgatgttttctgcattattaaaaaatattatgctactcctcactatattatgttgatggttgaaatgtcattataaagcttaatttatatgattctcttgatgaggatgatgaagcaaatgctccatcaactcactagtttacaggggcaagcattttcctacatttcacacataatttgattacctctgtcctaagtgaataatctactatctgggtatgagaaacatgatttgaaaacactaaaccactatattatttcaacaaagaaccatctttcacacctaagtnnnnnnnnnnnnnnnnnnnnnnnnnnnnnnnnnnnnnnnnnnnngatgcatgaaatcaagtcaaaattgggtatcttttaatctgtttcttcggttgtggtgaagaatgttgcctggattccttccaatctaaagacttgattgttagacctgtggcagaactctaggatctgactttagccttggggaagcaaagaggaccaaaacctaaaagctcaactttctgcatggtatgcatgattcaatgagctctttctgctttggagtctgttggcttggagactcggatatgatagggcttcagttcctcaggagggacagaatctggggtattgctcatgaggtcatgtccccggaaggactttgggaaggctatgacatctctgatgcttggagatccagtgacaaggcatatcagtctgtctaaccctaaggcaattcctccatgagggggtgccccataatctaaagcctggagcagatgggagagcattttcacatcctcctttagtaaggttgccaggatataacgctgcagctctgcattgtgaattcgaattgaaccacctcctatttcattgccatttaaacccaggtcatagtgttggctacgggcctttttgggctccagtgtacaggagatgtatgtcactggggtggggagcagtaaatgggtggtgggccgattccagctcttctgggattttcctcccttgggcaggaagagtgggaaaatctaccaccccaaaggaaagagaacagagtggggtcacggagcaccactcctcttgtttctagaaggtcagcacattccagtcgtaattttcctaacaaagagcatgctttattgtgctctccagcagttagtaggaccacatcttcctcttgggtctccattagtctgattaattccagtctttgtgactccattatgaaattagcaactggagaattccagtttctattggcgttaaggaatacaggtaagatttcctgattaaaatggtcagctgcaaagtttctaatggattcaatgtctttcctttttaagtattttgctccttcagggatacatatggctttcacagttccatggggcttactaagtgcatcttgaagaaatccaatctctgtgtttctaaacacatcactgatatctataatcttcattccaaagcgagtgtcaggtttatcagttccataggtggccagcacctcagcaaaagtcatagtaggaaaaggaacaaccacaggatctttgtcattgggccaggaatactggagcaaaccctcaattaaactctggatcccagtctggtctacaaatgacatctctatgtcaatctgagtaaactcaggctgtctgtctggtcttgaaccttcatctcgataacatcgggcaacctgaaaatat

SEQ ID NO: 322737 - DNA, 1286 bp, Homo Sapiens
  misc_feature (146)..(155): n is a, c, g, or t
  misc_feature (251)..(251): n is a, c, g, or t
  misc_feature (542)..(542): n is a, c, g, or t
ggggcgcaagaagatgttctcccggaggggcgggaatatcatccgggcgggagtccttgcaggggggttgagagtggtttcctcccgaaatttaggcggggtgtctccgggaaatgtgctggatcccgggcgaggctcaagggggnnnnnnnnnntgggaccgccatcccccttgtcgaggaggccccggccccatttttttctccgccgggaaacagaaagtgttcaggggacagcactttccgaagggnccgtggcagcgagctggccctcggggccttgttctgcagaagggcaggaggtcactgaggattctctcggtccgggcatcagctggagacgtctctcggccaccattgccgttctcagagctgctgaggaggggttctcgggtgctgctcgggctgggccggggcttagggcgaagaggcaggggcagggactttcagggatcccggcagtttcagtgatgagagcacaccagtttttcccgctccgacacagtctgtgccaccagctcgtatatctgggcctcctggtcnccaggtaaaaaggacgtagaaggctttgtgatcggtggccacctcgcgggtcctggcggaggtgagccgcagcacgggccgcagcatggtcttgccatcgggcgtgggcgtcagtgtccggctatgggacttgagcagcagccgctcgtcctggcgctggagcagcagcagcaggtcgtccagcagcagcacatgcacctccactgccttgtccttagtcacccgccacgtcagtgggccctcgtggaccaatttcttcttggtgatgtccaggttcttgaactcgctcagcatagggtcgctgctctgccgaaggtgggacaagtccaggcgccgctgatagtccttgagcctcagcaggtcctccatgtcacgcacggcttggttgacgtggtgtagaatttcccggcagcactcggctgccagctccactttctcccgttctgtgggctcttctgtgttctgcccgatgctctgcaggagcagggggtacttggtcagccgctgcatctccgtggggatcatgtccttcagctgcaggcggcggcaccgcgggcggctctcagcttcctgcacgaaggcacagaaccgagggtccttgcgttgcttggctctgagctgctctaaggcaaatgactggcggctgcagaagcgggaggagattttctggaaccaggagccatcagcaccatcaaaccgggccagcagcacgtctccgatctcctcgatgaggtagccactctc

SEQ ID NO: 322738 - DNA, 942 bp, Homo Sapiens
ggaggttggggcagttcaaccaggggccagggtggaaggccttgattgcaggaaggagcgccttctgggaggaagcgcccagttccactgtccagtggaacagaactgggcggccaaagtcaaaggagcgggacaggtagccgctggggttctccagcaggaagggcagccccagcaccacctggaggccagcacagattcccagcttggggagggccccacggaagcccaaactgtgtgaggagaagaaacagtaacccaggggcgaagagcagcacattcatcttcacagagactgccaggctgaaaaagcagcaaccccagccccagcgctgggccagcaggaggttgatactgaggaagagcagcaccatggccactggttcattgaagagccgcagcacaaagatggagtggacacggtaagaggcgcagcacatgaagaaaaagacgaagggaggtaccttgcaggtctggtgatagatcaagaagacaagcagcaaggtagccaggtagagcacagcaaagatgttctgggccatgcggatgtcagtgcctcggctggtggcatagtacaaccccataaagatgtacacgaaaccagctgggtacacaagtggtccggtgtcaccctgcagttgggtatagtcataggtaccattgatgacgccttctacctcggccatgtaggccttccagtcaatctctgtgtatgccaccctgtgaatgacccagaaggtgatgcccacctccgccaggcagaggcaggcggccaccagcagcgtgtagcgcggctcccgcagcagcaggcgccgctcttgccaggcgcgctgcagccattgcttgcagagtccctctgcctgggccgcggaaccggaccggccgcgtttccgcagcaaagccgccatcttaacggtgattccgaagttccggaccggtcca

SEQ ID NO: 322739 - DNA, 1187 bp, Homo Sapiens
ttaagatggcggctgggctgcggaaacgcggccggtccggttccgcggcccaggcagagggactctgcaagcaatggctgcagcgcgcctggcaagagcggcgcctgctgctgcgggagccgcgctacacgctgctggtggccgcctgcctctgcctggcggagacacagagattgactggaaggcctacatggccgaggtagaaggcgtcatcaatggtacctatgactatacccaactgcagggtgacaccggaccacttgtgtacccagctggtttcgtgtacatctttatggggttgtactatgccaccagccgaggcactgacatccgcatggcccagaacatctttgctgtgctctacctggctaccttgctgcttgtcttcttgatctatcaccagacctgcaaggtacctcccttcgtctttttcttcatgtgctgcgcctcttaccgtgtccactccatctttgtgctgcggctcttcaatgacccagtggccatggtgctgctcttcctcagtatcaacctcctgctggcccagcgctggggctggggttgctgctttttcagcctggcagtctctgtgaagatgaatgtgctgctcttcgcccctgggttactgtttcttctcctcacacagtttggcttccgtggggccctccccaagctgggaatctgtgctggccttcaggtggtgctggggctgcccttcctgctggagaaccccagcggctacctgtcccgctcctttgaccttggccgccagtttctgttccactggacagtgaactggcgcttccttccagaggcgctcttcctgcatcgagccttccacctggccctgttgactgcccacctcaccctgctccctgctgtttgccctctgcaggtggcacaggacagggggaaagtatcttgtccgctgctgagggatccctcccaaaggaaaggttccacccccagcccccttaaacccaaccagatcgtttcttcccctctttcaccttccaatttcattgggcatctggtttcagccgcctcccctcccctacccagttcctaccgtctggtaattttccccacacttgcccctaactccttggtgggcccattgcctggaacccttggcttcaaacaaccttgctctcaggttgttttgtgggctgggagcgctcatcccaacc

SEQ ID NO: 322740 - DNA, 946 bp, Homo Sapiens
  misc_feature (916)..(916): n is a, c, g, or t
ttttcgatggcggacagggagcttcgggttttcaggatggagtcccggttcgggccccccgcgggccttgaatgtcttccagcacagccatgttcccacgagaaggtcaggaggggcagagggcaccagcccgcactcgttcaaggccaggttctcgtcctcggacagcttctgccctcccgaggccagcagctcaaaaggcagccagtcgctctgcagggcctcccggacgaaacccgtacaccgcccccagccgctcccgagcgtagaaagtgccctgcaggaggcagccatcggggaggcgcacgcgcagcagcgtgtagttgtacttgcgcagcccccgctgctcctccttctcccgcatggccttggtccgcagcacgctcagccgctccaccgcctcggacctgagcctctgctcccgcttgatctcctctgctgtgaggttgaagaagtccccaggcagttcgaactgcgaggccaggggcgagggctggaagacgcggcgctgcctgtccagcttggcgcgcacgggctccgcagccagcagctgttccttgtgcctctccaggctctggggctgggccaaggtggtctcgctcagcacgtagaactcctcggggtcctcctgatcctgggcgggaagcaacaccttctggaacccaatggcctcaaaaaactcgtgggtcccttccaggcagttaatgcgctcctgaaacaccttgttctgcagcttgatcttccggtacttctcctcctcggggtgcaggtggatgttgtccaggtacttggcaatggtgtccacacccagcttcacccggtcctggtctttgttgaacgtgtagatcttcatgatggaggcggccactgggtcggtggagaagtgcaagagaatggcctccttgactgcacgcgnccgctggtccttcctcaggggtggccccaa

SEQ ID NO: 322741 - DNA, 1132 bp, Homo Sapiens
gatgccattaaaagcggtcccacttggttccacacaggtggccaccggcccgcaccagggtttgaagccacattcatcgatgtcaagggcacaggtgggccccgctccagccccgatgggcagtgcattcgaagccggacggcacctcatggcaagagcccccgttggcacacgggttggaggtgcaggcgtgctcagctttctcacagttcctgcccgagtagccgtcagggcaggtgcagcggtactggtcaggctcggcgttgatgcacgtgcctccgttggtgcaggggtggtggctgccacagtagttcaggtctttgtcacagagcaggccgccccagttggtctcacagttgcactgccagggctccacacaactgccatgcacgcagccggggtaggggacacactcatcgcagaacctcccttgccagccgtagctgcacctgcactccccaggcacgggtgcatccccccgtggagcaaatttacccccttgtttacacacaggttccttgcactccttgcccatccagccgtccatgcagggccttgttgccgtactggtcgcaggtgtagtggccgaaaaagtcgttgcggggccggcagaacttgttgcaagtggcgctgtagtagttctcgtcgcagcgcacgcggatctgcagctccaggtgcgccacgtggccgctgaagtgcaggctcttccagcggtcctccgggttgatcatgccggcatgcgacactcgctcgatcagcagctcctcattcggggtggtatcgttgtcccagtcccaggcctccacgatgagggtaaaggagcgcggccaggcgaactggaaggggatgacgacgaggcccgggtcctggtcgccgccggcccgggcccgcgcccgcgctcggtcccccgcagcgcccgccggcggcaggtagaaggagttgccgcccagcacgggcgtggcgccgtggccgtagctgcagggccccgtgggcgtcaccttggcctggtactccttaaggcacacgcgcacgtacgtgtcgcactcgtcgtggccgcagccccccgcgcgcgttgtccggccgtcgccgtcacagcaggcgccgctcagcagctccccgttcacgttccgca

SEQ ID NO: 322742 - DNA, 1014 bp, Homo Sapiens; identical to SEQ ID NO: 131258

SEQ ID NO: 322743 - DNA, 1280 bp, Homo Sapiens
  misc_feature (335)..(335): n is a, c, g, or t
tcccgatgtaggcgcctgccgcagctggccacccgtttcgcgccactcctgggtccctatcccccgcgggtggtcctgcgtgccggtcgtgtcctctgggctgtttagggcgccgctcttcttgtatatccgctctctgggcccccttgccacctactggtggggcgctctactgcgccccccccgggtgtgtttttggcgcccgccccccttcttggtcgctgttctgggtcatctcttgctcctctcctccttcctttgttcctggtttgtgttttgttctcctgttttgaaagtgttttaattagacaaaagcatcaggacaaaccattttnaaaaacaagtcttcaacttgggtgttgagattggcaaaaggggaagcaagggaaaagccaaggaaagataaaatattcagaagaaagtcaaagttatctgcaattacatgttagaacagattttgcaggttaaaaagatgttgcttaaatatattcataagcctgttgtaagattttcacttatgcagtttcagaaaatttagctgcttaacatatgacagaactgtattttaacaaatgacattaaaagtcaggagagctactcagttaattgataaagtagaggcaacgtgggggagccctccccacgtttattgaagatttgtggctcccccagccccgtttgcctgcatcaggctaacaacctcattcctcccatagagcctggccaaatcacaggcggtgtcccccttatggttccgatgccccacattgctggccgtgtgcttcaccaggaactccaccacccggaggtggccttctttggcagccaagtgcaagggcaggttcccttcattatcctcgatgttaacatcagcttgaaactccagcaaagtctgtaaagtgtccaggaaacctgctctggccgcatcatgaatgacagcgaaaccagttcggtctttcaaatcgggattagcacctctaagtagcagtctcctggcaatctcgggatttccaagtttcataacctgcagcgcagtccttccaaatccattttgtgcattgacgtttacattattttgcaacaaactagtaagttgctctaggtcccccctggcagctgcggacgccaactcgttcccccaaggctcggccattctttagggtcctgacgatcaggaaaagatgaattagtcgtttttctttttcccctttcctttgctcctaaccaggctgcatgatggcatcggagactgacagaaggactgggatggttaatctccc

SEQ ID NO: 322744 - DNA, 1042 bp, Homo Sapiens
  misc_feature (283)..(283): n is a, c, g, or t
  misc_feature (289)..(289): n is a, c, g, or t
  misc_feature (324)..(324): n is a, c, g, or t
  misc_feature (369)..(369): n is a, c, g, or t
gtaactgaggcccccaagggtagtagttgccattaatgtttaccccagtgcagtggcttcttgggagttgccctttctctgccctggcccgtggtggttgtggtggggaaaaggggctcagggcaggacccacggcataaggttggaaacatctccaccagggagatgggaaagtctagaagggaagacactcaaagtttgggggggaaaagtctttgggtgaggcagagactccactgcccagcttttagaggtgggtagaagaaaggccagtgctggtganggaagnccctgatcttggagggcctagtcggagacttcgcntgtagggtaatacttgtgggcagctggcgttgtcttccagccggnccgcccgggaacttcaatgatctccagcagccagcagctgggccagggagctgaggccagttgggagcaggaagccatcccggatcagcacaaagagctcatccatgcgctgcccattcattttctccagctgctccccaacccggtgcagctgcagcaccaaacagtccacctcctcctccttgctcaaactgtctggctgggccagccggaagaggcagtcatagacagggttcaccagggccatcatgggcatgttgttcaccctcaggtagtcaaagatgttgcagataaaggtgacatagcagacccagccctgcagggagcgtgctcgcagctgctcccgagcctggtactcctgctgcagccggttgaggagtccacgtcggaagacactctggcctgcttgtttactctctgcctgaatgatggcgtagcacatgcgtcctgcttccttgctgaacacacagtcctgcagagaatggtccacaatcacattggccactttctccaagtccacagcacccggatctttgagtgctgtcttcagcagctgctgggtctctgcatcaaaggactggattttatactcctctctactgggctcccccatgactagccagccccggtagctcttgactgggctgggaataaggacagcacctgccgggcc

SEQ ID NO: 322745 - DNA, 890 bp, Homo Sapiens
  misc_feature (155)..(155): n is a, c, g, or t
ccattttagagtatagtgttaaaaacatttctgtaataaaaatcataagacccacataaaaattaagctttaaccctatgcacaaagccagttttgtaaaaactactaagtgcacaagtaataaataatttgcaaagttgtgtataaacaattcntaatgttcggcatcattgtaaacatcagcacatgtgtaaaatgcagcaaagtctgacattacattttgttttgccaaattgaattcctattatccaaagacagaccagtggagtacgcagccaacattttggcaagttgggtctttaaaattaagagtaacagtgcaagtaaggaatgcaaagaattcctagtgcaataaagaagagaagcacaggcaatattgctgattaaaaattcaccacctccttgagtttcccgtggggagtgtctaggagacttgtgaaagctatgcaaagccactgacttaatgcccagatctcttttaggatttctctgtgttcctccagtccctacctttgcaacagtgtctgtccaacattagtctctgcagtgtgaacagttcgtgaaatgcccagttcacagtcatcgagcgaggttagggtggttttgatgtctccccaacacatggctgggtacgacgtctgccttgtcaaagcagccatttggggagggagacagatggattccattctgacaaccagtcaggccagcattaggtcccagctggacaatgacaacaacgtcaaatcttccttcttgacactatgaaaatgtcaacagtcagttttcaatttgtcgagggaattatcaattttggtcaaagtctttttgatacgcagtgctgtgagtcttgcggatggatttgatcccgggaatccggaccggtccagcct

SEQ ID NO: 322746 - DNA, 483 bp, Homo Sapiens
  misc_feature (442)..(442): n is a, c, g, or t
caagactcacagcactgcgtgatcaaaaagactttgaccaaaattgataattccctcgacaaattgaaaactgactgttgacattttcatagtgtcaagaaggaagatttgacgttgttgtcattttccagctgggacctaatgctggcctgactggttgtcagaatggaatccatctgtctccctccccaaatggctgctttgacaaggcagacgtcgtacccagccatgtgttggggagacatcaaaaccaccctaacctcgctcgatgactgtgaactgggcatttcacgaactgttcacactgcagagactaatgttggacagacactgttgcaaaggtagggactgggaggaacacagaggaaatcctaaaagagatctggggcattaagttcagtgggctttgcattagcttttcacaagttttcctaggacactnccccacggggaaaacttcaaggggaggttggttgatttttt

SEQ ID NO: 322747 - DNA, 1233 bp, Homo Sapiens
  misc_feature (710)..(727): n is a, c, g, or t
  misc_feature (736)..(736): n is a, c, g, or t
  misc_feature (746)..(746): n is a, c, g, or t
  misc_feature (880)..(880): n is a, c, g, or t
  misc_feature (969)..(969): n is a, c, g, or t
aatgcctaaaggaggaagaaagggaggccacaaaggccgggcgaggcagtatacaagccctgaggagatcgacgcgcagctgcaggctgagaagcagaaggccagggaagaagaggagcaaaaagaaggtggagatggggctgcaggtgaccccaaaaaggagaagaaatctctagactcagatgagagtgaggatgaagaagatgactaccagcaaaagcgcaaaggcgttgaagggctcatcgacatcgagaaccccaaccgggtggcacagacaaccaaaaaggtcacacaactggatctggacgggccaaaggagctttcgaggagagaacgagaagagattgagaagcagaaggcaaaagagcgttacatgaaaatgcacttggccgggaagacagagcaagccaaggctgacctggcccggctggccatcatccggaaacagcgggaggaggctgcccggaagaaggaagaggaaaggaaagcaaaagacgatgccacattgtcaggaaaacgaatgcagtcactctccctgaataagtaactgcgacccgtgggaggagatgccggggacctgggccgcgctgccaggacctctgctgtgtctcgcccaccctgtgccctggcgccgctgcaacagcccctcatggccaggagccccccatgggcctggggcctcctcttcatcttggcacagaaattgtttnnnnnnnnnnnnnnnnnnagctgtggngggaaggggnaacctggctatcttttgagacagaaaagatgcagggacagcattttcatatggtaaaccatttgaaatgtttttttgctggtttttaagaaatttcagaagccccttggcctggggggggtgcccttgggaagnatggggggtaaagaaagaagcttttccattttggtctggggtaagaatagataggcattgttaaggggggggtgggtttggtccccaanggagggccagcctggctggaccaggggtttgggctaccacaaccagcccccccgggggcttgttggttgcccctggggggtgcctccattttccagaaggaaggggggcttattccatcctggggaagcccctggtggcccccctggggggtcccctccgaagggggtccattgggcctttgggtcccccttgggtcccagggtccctgggttcttggacctggaccccttccaggggggcctttcaccccttcttcttgggcc

SEQ ID NO: 322748 - DNA, 1365 bp, Homo Sapiens
  misc_feature (87)..(99): n is a, c, g, or t
  misc_feature (227)..(280): n is a, c, g, or t
ccgcggggtagggaagacccatgttgtcctcacgaggatcccccctttttgcgggtgggtggataaaacttggggggggcgtttctnnnnnnnnnnnnntatatagtgttttagcccccccatctttccgcggagaaaaacccccggggggtggcgcgggtttatatatagggtttcccggggggttgtcgccgggattctttgtttcacgggagaaaaacccccannnnnnnnnnnnnnnnnnnnnnnnnnnnnnnnnnnnnnnnnnnnnnnnnnnnnnaggtgtttccttggtcaaggaggggccccactgggaacccattggtgattcggggaagaaaccaggtttggcccatgtttcccccaagagttccccccaaaggatttagttaccactgtctcggaggagggtgatttttgttgacggtaatggcgatgaaagccagcttttcagcaggtttgttggcatacttgcgggccttccttccggttccgtgaagcccttccacattgtggtacaggccagtcccaccacatttgagccgatgaaagcattaggggatggtaatcttgagccacatgcggtcacggacctccaacccttgattcaggggaggccatggcttttacgatggcagccatgtcactgtggatggacaagtggaagtcgtctaggcgctctgtgtcagggatggaactggtgatggaggagctggtggaggtgatggtgctcagggaggggctcatgccgtatgcagggaaggtgccggtcatggctgcagtgtgggagacccaggccgcagggtcaatgggccggatgggctcgctcctgggcaatgtgaagcaaccacgtggacttgggtcccagcacttggctacagtcagggtgatgggccccggtttgtgcacaatctcccgcagtacccggactgcatcgtcattactcatgttctcaaagttgatctcgtttacctgtaacaacatatctcctggctcgatgcgtccatcagcagccacggccccacccttcatgatagagccaatgtagatgccgccgtcaccacgctcgttgctttggcccacaatggagatgcccaagaagttatatttttccatgttgagagtgaccgtgatgatgttgagtgacatggtggagtccgtgatgctgctgaaggacgaggaccgctcaatccgagaaaccttctgcttccgccgccgccgcttgtgtcttctcatcaggcgtgaggcactgctctgttctgtggagctgctgaacctgctggtggagtcatcctcatctgagtcaaagaagctggtggtctccagctcactgctcaatcccgggaatccggaccggtccagcct

SEQ ID NO: 322749 - DNA, 1094 bp, Homo Sapiens
  misc_feature (657)..(665): n is a, c, g, or t
aatgtaggcagcaccgccttcagcacctggtggttgagttactggatcaagcaaggaagcggaaacaccactgtgactcgagggaacgagacctcggtgagtgacagcatgaaggacaatcctcatatgcagtactatgccagcatctacgccctctccatggcagtcatgctgatcctgaaagccattcgaggagttgtctttgtcaagggcacgctgcgagcttcctcccggctgcatgacgagcttttccgaaggatccttcgaagccctatgaagttttttgacacgacccccacagggaggattctcaacaggttttccaaagacatggatgaagttgacgtgcggctgccgttccaggccgagatgttcatccagaacgttatcctggtgttcttctgtgtgggaatgatcgcaggagtcttcccgtggttccttgtggcagtggggccccttgtcatcctcttttcagtcctgcacattgtctccagggtcctgattcgggagctgaagcgtctggacaatatcacgcagtcacctttcctctcccacatcacgtccagcatacagggccttgccaccatccacgcctacaataaagggcaggagtttctgcacagataccaggagctgctggatgacaaccaagctccnnnnnnnnngtttacgtgtgcgatgcggtggctggctgtgcggctggacctcatcagcatcgccctcatcaccaccacgggggctgatgatcgttcttatgcacgggcagattcccccagcctatgcgggtctcgccatctcttatgctgtccagttaacggggctgttccagtttacggtcagactggcatctgagacagaagctcgattcacctcgggtggagaggatcaatcactacattaagactctgtccttggaagcacctgccagaattaagaacaaggctccctcccctgactgggcccaggaagggagaggtgaccttttgagaacgccagagatgaggtaacgagaaaacctccctctcgtcctaaagaaagtatccttcacgatcaaacctaaagagaagattggcattgtggggcggacaggatca

SEQ ID NO: 322750 - DNA, 955 bp, Homo Sapiens
  misc_feature (97)..(113): n is a, c, g, or t
ttcgaactcaaagctgtagtttacttacaacacaaattctaaacacatagactgtatatacagattttttgaacccacaaataaaaaataccctccnnnnnnnnnnnnnnnnngacagtgagttgaagcctcgtcattgtctaagtcacaccagctggggcttgccttggagacctgcccctgctcagttctgttcctgttctcctggccctgggtggcccctactcgtccttctgtggtggatgtcagcatccctttgtcgatcagatgagaccgcagcgtgttgaagatgtggagctgctgatctggccgtaaagtcaggaactgctgaatcagtttgcttgggttagggcctctgataaaactggcgatgtatacattgacaaaggtggccatcagatactggcagtcaaagcgatccatgatgcctccatggccaggaatggtattggcaaagtctttgattttaaaggctcgtttgaatccacttgcgaagaatcctccaaaggggccaatgagcgaggcaaaggtggagagagcgatgctgtgaatctggaaggggtacatccggaccgttttccagccaatgactgactggatcaccccaggaatgttgtactcctgcaggcgaaacaggtccgagggctcacagtccacagtgaagctgttggtgtcattgttgtactccacagggcagacaaagcatctgtacccggacatcacataggacagcagaaggccaaacaccacagtagcaaagaagcccccaatgaagccttcccaggtcttcttcggggacagcttgatgagtggggtccgaccaaagaaaaagccaaacatataggccatgatgtcattacagatcacacaagatatggggacaatgaaccagatcattccttcaaataggttgggataacaagatgtgactgtgttacaacaatcagcaatgtca

SEQ ID NO: 322751 - DNA, 2297 bp, Homo Sapiens
gtcgatgttggcacggtgggtggtggttttggcgcgcgcggttcttgttttttaatcgtgtttgcctgctcctgtttgccggggtgacctttttgagtggcggctggggtttccttgtgtgtagtggagccttctctgttcccggagtgggtcgagattttgttccggcgtaatgtcaagtggagcccgccctgttggggctttcccgtccctcccggggtacccgatgccctggaggccttccgctggcctggcttttacctctgcctccgcggttgtcttctcgccttctgtgccgcccgccgttgttccccgggtcgtcggtggtgtcgtgcggctcgtactgcacaggcacccaggtacctgcagagaagacgtagcagtcctgcgtgtagaagtgccaactcctcttccggcagccgcgcaaacttcttgccctccagcacgaaaccctccatgccgtctaggtcttcgttccactcctccatcagctgctccgcctcggccagcgacatggcggctgccgcggcaggaaaagcgcagtgaggtcagccttcatctggtctttcttctcggcgtcgcgtttcaccttcccggagagacccgggctctgcagcacggcctccgcattgcgtgtgtagtccaccgtcaacacatcgtcccaattcttgaacttggccttgaacacctgcgcctcggtgccctcgaggctgcggctgaccgtggcatggcgtggccggtgcagcatcccgcacagctcctgacccagcttgagggcggcagcgcgcaccaggcgcggggacttgcggccgagccagatgaacacgtcggaccaacagtccagaatgtacacgcagcgcgtgtccagcagactctgcagcagccgcattcttggcatcagctccaccttgggacgctgcttatgttccacggagagcttgtagttgatctgtggcagctccaggtagcccaagcccaggcccaccttgtacagcttgggctgcggcggccagaagtcttcaggcacgtgcttcttgatctcagagggctccccacccagtgcctcccagaactctgggagctcctggccctgcaccagcagtgtgatctcagccttccctttccgctcattcttgttaattttctctgcaaagagcctggccttggtggtgctgctcagtgtggcctgggccccccgccatacgtagatgtctagccctcggtccagcaggaaaacaaaccttgggtccagagaggtccccttgaggggcacaggctccaacttgatgttctttttcccatacacacgatacatcctggtgacatagtgtgtgtcttccacagtgtagaagccactggctgttccaccctcaatgtaggagatgtcgttgtcaaacacctgcaggaactcctcgctctcatcgcccatctcctcccggacagtgcggcactcagcacccaggtagttgcgcaagttgacagcgtggatggcagagcaagctttcttgtcgagtgtggcctccccgccaatccagtagtagatctcccagttgagggagccgctgtcatccagaaaggtcttgagcacaatgtagcagtcagcctcgtagaacttgccgtggaaggcttccgtccaccagcacaggcaacgaagttctctatctgccagatggtcagtccgggcagctggcccacgtcctccgtgaagaactcggagtagtcaaggcggggcttctccaggccctggtcccaacgccgcacctttcccgctgggggcccgggcatctgcgctctcctcctgctttttgttcttctcctgggcaacatctgacatgcccttcagcacctgcttggcctggtcatcctgggctgaatccttgcgcctccgcagtcgcatcttgcgagccatagggtccttgggcccactccctgcagctgcagctgcagccacggtagcaggagaggcacccgctagccgcagctggttctgcagcgagaagtcgatgttgtaccactcagcggcacggtctgcgggcttgggcggcatgaccaggttggggttctcccgcacatccaggacctcgatctccgtcaggaaatggatggcttctgggagggtcaccaggtggttcttgttcaggacaagtttcctcagctttgggcacctgcagagactttcagggaccagctccaggttgttgttggcagccatgaactcttccaggttggtgagcttgccaatgcctgaggcagcgacgcgtgggtcgacgatatcccgtaattccggaccggtacca

SEQ ID NO: 322752 - DNA, 1116 bp, Homo Sapiens
  misc_feature (989)..(1047): n is a, c, g, or t
ggccaggttaatctttttgggcccatttcccccagcttgttgcccgacggcactttgggcatagcagggaggagtgcaagggcaatgccccaggccccaggggcagccccctgagtccccggttcagggaggcaaaagggccgggctatcccacgtgtatccattcagggccgctcacaccacttgaagggctaggctgatggaccaagaaagatcccaggcccagtgtaaagagggtccaatagatgaggctggtgcctagcatgagggccagtgcagtcaacccatagaagcttagctcccgctccataggcactcggggagtcatcagccagcccaggacagcgccagttattaggccagccagcacctggtgagggaaatgtgctaagatgaagattcgcgacaagccaaccgccaaaaggaaggtgcaataagccaggctaggcatcacccttacccagcggctgcgggcccgagtggccacctgcgaagacagggccgtcattatgggccagagggctgctcctgtgatcatgcagtgtccagaagggctgcctggaccagtctcacaagaagaggggaactggtgaacctgggctggagcctggctgtagtaaccagactcatggacccaccaaaagggcctgtctccaaaaagaaaccacttgaagatgaggttgagccactcggtgatgaggctgatccagagcaccgcgatgcccacacggcgggaggcgtagtaggccgcggggaagtagaacagaaagaggatcttgggatcgcccagaaaggtgatccagagccacacgttctccagccaggctagctggttctgtagcgcctcggctatcacgatgcccgcgcccagcgtggactccatggcggcccagctgccgaccaggccccggcttgctccagggcggaaaccagagtccaggcaacgaagcagcgtcgaccctctgatctccaaagcccacccctctgannnnnnnnnnnnnnnnnnnnnnnnnnnnnnnnnnnnnnnnnnnnnnnnnnnnnnnnnnntcctgcaagaccggcctccagccggtactgtttcctcctgcatcccgggaatccggaccggtccagcct

SEQ ID NO: 322753 - DNA, 1399 bp, Homo Sapiens
gtttgtttttgtgttttgttcaaagtattcaagggctttattggggccgccctggctggcccctcacagtgttgcaagaacccgctggtcttgctgttgcctttgctctttgggggcttgagaggaaaggcagagggaggaccaacttatctgggagagagaaggcccatctttggggctaagaccaggtggtgcggaagcagatttagggaggggagggcctacttaggggctggaaggggatggggctgcctcctggagtgtggtggtcacagagtgttggctttgtgggagggaaaggaaagggaggcacacaagaagtcaggaagagtggatgggcggtgcttcctgggcactgaacatgtgcactgcccagggcacgagggccaggactaggcatggccagagggtgtacttgaggaaattgaaaatgtagaagaggctgatctgaggggggtggcccagccagtccagggggcccagcagccccatggccagcacaaggcaggctatcttctggccatttcccagctgtgcccgacgcacctgggcatagcagggagagtgcaaggcaatgcccaggcccagggcagcccctgagtcacggctcagggaggcaaagggccggctatccacgtgtatccactcaggccgctcacaccacttgaaggctaggctgatggaccaagaaagatccaggcccagtgtaaagagggtccaatagatgaggctggtgcctagcatgagggccagtgcagtcaacccatagaagcttagctcccgctccataggcactcggggagtcatcagccagcccaggacagcgccagtttttaggccagccagcacctggtgagggaaatgtgctaagatgaagattcgcgacaagccaaccgccaaaaggaaggtgcaataagccaggctaggcatcacccttacccagcggctgcgggcccgagtggccacctgcgaagacagggccgtcattatgggccagagggctgctcctgtgatcatgcagtgtccagaagggctgcctggaccagtctcacaagaagaggggaactggtgaacctgggctggagcctggctgtagtaaccagactcatggacccaccaaaagggcctgtctccaaaaagaaaccacttgaagatgaggttgagccactcggtgatgaggctgatccagagcaccgcgatgcccacacggcgggaggcgtagtaggccgcggggaagtagaacagaaagaggatcttgggatcgcccagaaaggtgatccagagccacacgttctccagccaggctagctggttctgtagcgcctcggctatcacgatgcccgcgcccagcgtggactccatggcggcccagctgccgaccaggccccggcttgctcca

SEQ ID NO: 322754 - DNA, 832 bp, Homo Sapiens
  misc_feature (48)..(48): n is a, c, g, or t
  misc_feature (61)..(61): n is a, c, g, or t
  misc_feature (70)..(70): n is a, c, g, or t
  misc_feature (82)..(82): n is a, c, g, or t
  misc_feature (150)..(150): n is a, c, g, or t
  misc_feature (157)..(157): n is a, c, g, or t
tgttaaacgctgctaatgttgccctccctaaatttgggtaacctgctnagggaagaagtanattgggganaaatggggaaancccaagacccttccaaagcgaaagttcccaggagatgatggcggactcccatgtttgtgaatccctgncactccnaagtagcacattttcagtgttccccgggcccctgtgtacttctacgagttccagcatcagcccagctggctcaagaacatcaggccaccgcacatgaaggcagaccatggtgatgagcttccttttgttttcagaagtttctttgggggcaactacattaaattcactgaggaagaggagcagctaagcaggaagatgatgaagtactgggccaactttgcgagaaatgggaaccccaatggcgagggtctgccacactggccgctgttcgaccaggaggagcaatacctgcagctgaacctacaggctgcggtgggccgggctctgaaggcccacaggctccagttctggaagaaggcgctgccccaaaagatccaggagctcgaggagcctgaagagagacacacagagctgtagctccttgtgccggggaggagggggtgggttcgctgacaggcgagggtcagcctgctgtgcccacacacacccactaaggagaaagaagttgattccttcattcacttcgccattcattcatacttccgtccatccattcagaaagcatttattaagaatttactcaggcatgatggcccatacttgtaatcccagctattgggaaggatgagatgggaggatgcttgaggccagaggtttgagaccgaccatccaggg

SEQ ID NO: 322755 - DNA, 1074 bp, Homo Sapiens
gcccggtgggggaaacggccattgggtgtggggaaaccaaagtgtggcccaaggtttcccccagctgctttccgagccccccggtgggttcacccagcgtgcccccccaatggtagagggaattcccccttttccagcaagcattcccggaaattatttagtggttcccgggaggttgactggaatagggccacagcctcctttgtggttgagggtcttttatttcttgcccagcttttccttaaactttctgggcttcgcccttccctgttgggcaaagcttcgaactgtagggcatgcccgacagacctcaaatggccacctggctggactttgccaggagattcccgcacctgcacttccagcaagtggtgccattttcccgcttttttgggcagaaggaaaagcagaggcagggtgatcagggtgaccatggtgaggggacactgatccccagagcatgatccccaagagacataggcctcgcaccaggtaccacagaaataagctcagattctcactcagagaatcactcagggtggacgtgtcctctgttacccgagacatgatgttacctgtctggttctgttggaaaaactccgtctcctggcgcaggacagccccaaacacctctccttgcaagtggctgtgcacgtggcccatggtgttgttatagatcccgtcacccatgaactccagcactgcactgggtatggtgagaatggacatgagagttaagtttcgagtgaaggtatcggctgagccatcttgtagaatccagtcagtgaggcggcccgtaaagaatggaatggccatctccccaagagaggagaggaccaccaggaccaggaacagcgagaggcggcgcgtctccgagcccaggcagcctagaagccgacgcacagggtttccagagccgccctgaccgccgggcacccagaggctcctgagtttgtgccacagggctgctgcgggcagtgccgctgcataactgacatcgaaggcggtagggtgacttccccagtgcagtagcgtggtcatatccgaggacccgggggctccccatgagatcag

SEQ ID NO: 322756 - DNA, 920 bp, Homo Sapiens
  misc_feature (161)..(161): n is a, c, g, or t
agaaaagtgttttctttcttggggaatccccattcctgagctgacaagacagatttcagtagaaatgagcccaaaggatagggcaaaatagtgaagggagccaggtgcatatttgaattctttccagtgcagactggaactagacatgcaggtatccctcntaaaggcaacgcccaaatccccagccattcccactagaggccaaaccgcctgcccacagagattgcacagccaatgttcatctcataactctcctcccagcagtgcaccagtaaactcagatgcctgagtgcttgtggccaccacacaacagatgcggccttcctcttcactggcccctcggctgctgctgggtctgcctggccatcaaggagcagccagtatttgtgtggctgtgtggtgtgggaagggccagaataagcaacaaagccaattagatgtgggttctggggctctgtcaacatggtagcaggacaagtcaccacccacagtaggaccatagggccctgtgtcctccattaattcttctctgggcggtttctgttcagcacagctttcggggcaaattctagcttgtccttaaggctcaccacctgcgtgtggtccttgcctagaagctcatccagcttgcgatcctcccggcgctctgagatgctcttttcctcctccacgggctgggggtcctttcccctgatgaaccattccaggtggtaacccacagccccgaccacgaaggcaacagggaatgtgacataaggagcataggtacgaaccacggtccaaaacacaggccacatgacatctgcggcccagcccacactccccagtgcggcccccgctctccgcccgctcgccgggagcacggaagtcgccgcacccagcggcccgcgggaccttgccctgtgaccctgcccactccc

SEQ ID NO: 322757 - DNA, 1000 bp, Homo Sapiens
  misc_feature (359)..(359): n is a, c, g, or t
cgggacccttcgaccccgttttgtgggcaggatttcccaaggcccgcccccggctgggttttccccctttcccccagggacccttctccttttaggttgtgacttcgacccttcgggactggtttggggaagatgacccttccccttccccacagctggagggatcctgttgaaggagggacacgcagtcagtgggggcagccaggctctggggagcccaggaaggccaggggcggtggcctgattgctctgctcggtgacctcggtcacatctttcaggctgtatttgttccagcgctcggggtgtgccacgtagtcggggcccggaggcccccttggtgaggcagggctccgatggngccctgcccaggccccttccactggagaccggcctgagggcgctaggggccgcttgaagcctccgttgtcactcatgctggtgtgggccacagaggatggagcccgtctggccgccccctccaggcagtcaaagatgtcacggctgcgctgggagaaggtggagctcatgcctctcagatggaatggctgcaccgtggctgggaggaggcctgacgggggtgagggcggctcatcaggacctgaatcctcctccccaggcagccccatcggggacagtgcttccacttcagcaccaccgggcaagctgaggtcagagtccgagtcactgagggagactgtgtcggaaggcagcgtgtcatactccgtcccgtgttcgccctccacgctgggggacggctcacctgttcctgcctcagccatgcgtccccagggccacgccacacctctcttggctgctgggtgccagtggttgacactggagtgtgattggacagccaagcgggccaagtggacggagccctgatgaaggtcctcagcggcacaggcgtggtcgtctcaggcctcggagtgccccggcatggcctctgttcagctgctcaacggctccctcgtgccgaattcgccacccaggcctcgctac

SEQ ID NO: 322758 - DNA, 1139 bp, Homo Sapiens
aagtggtgattttctgtttattgctcaaaaacaagaattcagaagcaaaggtggagagactgtgggttggggagatggcaggaagggggcaaggcttgtcccagctctcccctttgtccttcttctgaccctcctggccggagtcaggcctagggccaggggcatctgggaggggggcaccttcgtggccaagggaacagtagagctatcgggggcagtccttgaggggtgccctgggcaggaggggctgcaagatttgcaggggaggcagagttcccctcccagaatccaaaagccggtagggcggggggcaggcccctcgtttggcaactgagaagaggcggctttgggcggcaggatgctggtttatttactgtaggatctccagggcccatcaaagccccctcgtggggatagggagactatttacacagccagggaggagggcagccaggaggcagagaccgggtcccgtatttccctctgcccgaatgaggaggggaggggcgtcctgggtcctgcagctgtagtcttggggttcagatggaaacttcatactcccgcgtatccccagcttcatacagcgggttgctgaagtccgactccacggtgatggggctgtaggagtgggagcccgagaagccgaaaagggactttccctgaagcttggtgtagtagatgtaaacgccactgccgaggacaatgaccaagcctagaggcagcaggatggccagggccaggttccccccttccagctgccgtgatggatctgtggtctgggtcactttgcagagtgggggctggctggtccactgggaggggtggccgggcacacaggtgatggtgacctcgccgataagctcaaagccctcatagcagaagaagcgcagagactcgcccgcctggtagtggtgcttgtacagcgtctggtagccattctcgggaacccccgggttcaggcacggctcgtacttcaaggcgcatttggggaccctatcgctccacttgggtgtgcctgtgtcccggctgtagcaggtgagcatggctgccccctcgaggctgtaccctggcaggcagcggtactggacgtgggagccaacggggaagccggcgtccgaggcggtgcggtgcccgttggc

SEQ ID NO: 322759 - DNA, 803 bp, Homo Sapiens
  misc_feature (551)..(551): n is a, c, g, or t
gctccgacattctcacttgccagtgggacctgtcttggagcgccgcgccgcccgcctgccaaaagatcctgacttgtgctgaccctggcgagattgccaacgggcaccgcaccgcctcggacgccggcttccccgttggctcccacgtccagtaccgctgcctgccagggtacagcctcgagggggcagccatgcttcacctgctacagccgggacacaggcacacccaagtggagcgatagggtccccaaatgcgccttgaagtacgagccgtgccttgaacccgggggttcccgagaatggctaccagacgctttacaagcaccactaccaggcgggcgagtctctgcgcttcttctgctatgagggctttgagcttatcggcgaggtcaccatcacctgtgtgcccggccacccctcccagtggaccagccagcccccactctgctaagttgcctatgaggagctcctggacaaccgaaaactggaagtgacccagaccacagatccatcacggcagctggaaggggggaacctggccctggccatcnctgctgcctctaggtttggtcattgtcctcggcagtggcgtttacatctactacaccaagcttcagggaaagtcccttttcggcttctcgggctcccactcctacagccccatcaccgtgggagtcggacttcagcaaccccgctgtatgaagctggggatacgcgggagtatggaagtttccatcttgaaccccaagattacagctgcaggacccaggacgccccttcccttcctcattcgggcagaggga

SEQ ID NO: 322760 - DNA, 943 bp, Homo Sapiens; identical to SEQ ID NO: 152224

SEQ ID NO: 322761 - DNA, 1187 bp, Homo Sapiens; identical to SEQ ID NO: 152225
  misc_feature (94)..(94): n is a, c, g, or t
  misc_feature (96)..(96): n is a, c, g, or t
  misc_feature (101)..(102): n is a, c, g, or t
  misc_feature (110)..(118): n is a, c, g, or t
  misc_feature (353)..(353): n is a, c, g, or t

SEQ ID NO: 322762 - DNA, 913 bp, Homo Sapiens; identical to SEQ ID NO: 152226

SEQ ID NO: 322763 - DNA, 948 bp, Homo Sapiens; identical to SEQ ID NO: 152227

SEQ ID NO: 322764 - DNA, 905 bp, Homo Sapiens
gggagccccaagcttaccacctgcacccggagagctgtgtcaccatgtgggtcccggttgtcttcctcaccctgtccgtgacgtggattggtgctgcacccctcatcctgtctcggattgtgggaggctgggagtgcgagaagcattcccaaccctggcaggtgcttgtggcctctcgtggcagggcagtctgcggcggtgttctggtgcacccccagtgggtcctcacagctgcccactgcatcaggaacaaaagcgtgatcttgctgggtcggcacagcctgtttcatcctgaagacacaggccaggtatttcaggtcagccacagcttcccacacccgctctacgatatgagcctcctgaagaatcgattcctcaggccaggtgatgactccagccacgacctcatgctgctccgcctgtcagagcctgccgagctcacggatgctgtgaaggtcatggacctgcccacccaggagccagcactggggaccacctgctacgcctcaggctggggcagcattgaaccagaggagttcttgaccccaaagaaacttcagtgtgtggacctccatgttatttccaatgacgtgtgtgcgcaagttcaccctcagaaggtgaccaagttcatgctgtgtgctggacgctggacagggggcaaaagcacctgctcgtgggtcattctgatcaccgaactgaccatgcccgccctgccgatggtcctccatggctccctagtgcccttggagaggaagtgtctagtcagagagtagtcctggaaagtgggctctgtgaggagccacggggaaagcatcctgcagatgggcctggccctttgtcccaccgacctgtctaccaggaatgtcctcgttggaacctcccctctgcaaaggaactgggaccct

SEQ ID NO: 322765 - DNA, 905 bp, Homo Sapiens; identical to SEQ ID NO: 152228

SEQ ID NO: 322766 - DNA, 865 bp, Homo Sapiens; identical to SEQ ID NO: 152229

SEQ ID NO: 322767 - DNA, 1307 bp, Homo Sapiens
  misc_feature (647)..(647): n is a, c, g, or t
gttttcctgccggctctttgtcttgtggcttggtggctgtcgtcctgggcggtcgtgggttctgggttgatcttggtggtagtgcagggtgttcatgccgtttagggttgtgtgatgagggggcgcttggtcttccgggtcgccctgtgcgctgagctggacgtcccttggctgtgttagttcccagatggtcttcggtgatgcgctggttggctgttgggagtcgctgtgcttagctctgggggctggagtagttgcgtgcctcctgcagcctcgtcagcatggttcagtcagcgggtcacctgcagcatcactggggggcatctgcttgcttgtcgatccctcccgtaggcatggagtagcgcggtccgagaggcctgactatcctcaggccgtaactgcagcaggggaggtccactcgtgctgttgtgggctggctgcccatggatatgttgtccatcacccacttggcaggatcttcccaggggggcgcgccttccatagaggtggagtccttctctgacggcttccaggagataggggataatggaatagttccacaagtcggtgaaccacactctcggagccgtccacatcgatggggcatgacaggaagagccgggggccgatggtgacgtcacgagganactgtgagcctccaggaagcggttgaggtgatgccagaccttgggaatccagtcaatgatttttaccagctccatattgcgcacccgcccactgatctctgtttccatgagcttcctcctcaggaatcggccaaggaaacccttcacaggctccgtgtggttggcacaaagcacccatctgaagttatggtgaagctgcaggttgggagtcgaagaggtagcctggttcattgtgccaattatgtaagggcatttgtggtacttgcagttgagcagcccattgaagatctcgcccagagagctcacgtggtgtaggttgtccaggatgatgacgaggggcatgtccacagcattgttctcactgttgcactggtcagcaaggttggacaggtactggcgcaattccttgctggacttatggtccacgttaaaggtggcgataaccccgtctgtcaactcccgtccctctcgaagcactatatactcagacagccggttggccaggtaggttttcccagtgccgctggggccagagagaatgatccgacggtgctctatcaggagggagacgtagcgctgcaggatgggcttgggaatcaaggactcaaacaccagtgagtccaggctgtttcatcccgggaatccggaccggtccagcct

SEQ ID NO: 322768 - DNA, 1896 bp, Homo Sapiens
  misc_feature (828)..(828): n is a, c, g, or t
  misc_feature (844)..(844): n is a, c, g, or t
  misc_feature (1656)..(1656): n is a, c, g, or t
  misc_feature (1739)..(1739): n is a, c, g, or t
  misc_feature (1759)..(1767): n is a, c, g, or t
gggggagaggtgctgagaggggaccggattgtcaacacccctttccaggttctcatgaacagcgagaagaagtgtgaagttctgtgcagccagtccaacaagccagtgaccctgacagtggagcagagccgactcgtggccgagcggatcacagaagactactacgtccacctcattgctgacaacctgcctgtggccacccggctggagctctactccaaccgagacagcgatgacaagaagaaggaaaaagatgtgcagtttgaacacggctaccggctcggcttcacagatgtcaacaagatctacctgcacaaccacctctcattcatcctttactatcatcgggaggacatggaagaggaccaggagcacacgtaccgtgtcgtccgcttcgaggtatcctgagcatgattatcattcggaccctccggaaggacattgccaactacaacaaggaggatgacattgaagacaccatggaggagtctgggtggaagttggtgcacggcgacgtcttcaggcccccccagtaccccatgatcctcagctccctgctgggctcaggcattcagctgttctgtatgatcctcatcgtcatctttgtagccatgcttggggatgctgtcgcccctccggcgggggagctctcatgaccacagcctgcttcctcttcatgttcatgggggtgtttggcggaattttctgctggccgtctgtacccgcactttaaaaggccatcggtggaagaaaggagccttctgtacggcaactctgtaccctggtgtggtttttggcatctgcttcgtattgaattgcttcatttgnggaaagcactcatcangagcggtgccctttcccaccatggtggctctgctgtgcatgtggttcgggatctccctgcccctcgtctacttgggctactacttcggcttccgaaagcagccatatgacaaccctgtgcgcaccaaccagattccccggcagatccccgagcagcggtggtacatgaaccgatttgtgggcatcctcatggctgggatcttgcccttcggcgccatgttcatcgagctcttcttcatcttcagtgctatctgggagaatcagttctattacctctttggcttcctgttccttgttttcatcatcctggtggtatcctgttcacaaatcagcatcgtcatggtgtacttccagctgtgtgcagaggattaccgctggtggtggagaaatttcctagtctccgggggctctgcattctacgtcctggtttatgccatcttttatttcgttaacaagctggacatcgtggagttcatcccctctctcctctactttggctacacggccctcatggtcttgtccttctggctgctaacgggtaccatcggcttctatgcagcctacatgtttgttcgcaagatctatgctgctgtgaagatagactgattggagtggaccacggccaagcctgctccgtcctcggacaggaagccaccctgcgtgggggactgcaggcacgcaaaataaaataactcctgctcgtttggaatgtaactcctggcacagtgttcctggatcctggggctgcgtggggggcgggagggcctgtagataatcttgcgtttttcgtcatcttattccagttctgtgggnggatgagttttttttgtgggttgctttttcttcagtgctaagaaagttccctccaacaggaactctctgacctgtttattcangtgtatttctggttttggannnnnnnnnccttctttgttttaacaaatggatccagggatggataaatccaccgagaataaagggttttgggtcactggtctccaccctcaattttccttcaggccttgttggcccacccttatggactaaactggc

SEQ ID NO: 322769 - DNA, 789 bp, Homo Sapiens
  misc_feature (23)..(23): n is a, c, g, or t
  misc_feature (769)..(769): n is a, c, g, or t
ttccatccttccccttccttgtnctggttcctaggatgacaccaagtctgcctacaacctggtcaccttgatcttggagtgaagttaagctttcataaactctattagagccggctgaagcggcaggaactctggttgccgcacccttctggtggcggaggggggcgtaccctcttccacgttcccctgctcttgcctctgctggaggactcaccccacaaatcggttcatgtaccaccgctgctcggggatctgccggggaatctggttggtgcgcacagggttgtcatatggctgctttcggaagccgaagtagtagcccaagtagacgaggggcagggagatcccgaaccacatgcacagcagagccaccatggtgggaaagggcacctgtagacatggcaccatgaggcccccacgaggccctgatgcccgggaatgggggctgcgccaagggggaggggaccttctgggctcccacagaaggagaggcgacttgtgccagcagaagcacactccctgcccccaccacagggctccctggccagaatctcttgaggctgaccccagccctgatctggactcccagtgaagaaggcacctcagcatcccagaggagctcaccatccagggaggaagtaggggaggaacaggaaggagtggactgagaacgtgaagagatgaagaggtcaaaatgaagagattacatgtggcacattatgtgaagaaaagaagggaaaaaacaacactgtacaaagtgctcccaatncttgtcagaacaaaactaca

SEQ ID NO: 322770 - DNA, 881 bp, Homo Sapiens
cagggcaccgggcaccttcaaaacattgggtttcaaatttcacaaacctccccggagccgcccaaaaaggcccatggtggggcgggaagagggaattccacgcagcccccaaggacccaccgtggccttcggcattctcaggaatcttctccagcaagtttcagctcgtgcttggacttggagcgggtgatgccagctggtggtgctggaggcggcagctcacgctctcgctccacttccagccgggtctcaggaacacctcgccatgagaggctcggtgacgtgggggtcactctcagccccctgaccatggtgatgccccagcagggagcccagggagccagctgagatgttgcgggggaaggagaagtccttctcatcacttgggtggctgtgtttcaacagcagagcccgcagcacgttggccctgtcctcggccttgatctggtcagagatgaccatctgctccaccacctggtgggccactccgggcagggtctgctggtccagatccaagagcacagccccatgggccagggtcctgcggagctccaggagactgcggaaggagagggaggccacgtggggcttcccccagcgctcggtctcctcctccacgtcctcttcaaatttgatccagcgagctgtctcccgccactggggctcctggtttttgtccaggagcaactcattcagctccacaaacacctcatggggcttgtggggggcccgggttcgggcccgaggtgtggggccaggctcccgcccttctcggccactctgtgtggaacctttggcattcttccgcaccaagtgccgccgcaccccaggaacgtcctcaaaccggtgactcttcatgaggtctaggtcggccgtggcca

SEQ ID NO: 322771 - DNA, 975 bp, Homo Sapiens
ggtttcctgggctagccccgagataaccctgctttccagtttcctggggctttcccctgtggaagcccccttgaggtgggagtcacactctttcgcacgtgtaggaacccgttggggtttcttacagaactgggcagcgttgcagggaggcggttgggccggcacatttgttccacatccacacaggcgccttcgtccagcacccagcccacttcacactcgccgcagtttctgttggtcagggcccgagcacgtcttgcaggactcgtcacaggctgtgcagatgctgtgggtctcgttccggagcgagctgaagtagccgtccatgcagtcagtgcacagcgggccctggtaccccatgtggcaccggcaggacccgtcgccctgtctgctcccatctccgctgcagtggccattcccgctgcagggcctctgggatccgccctggcatgcgagacagtcgggaccgtaggttcctggagagcagcacactttcagtgtcttcacacaaaaccactcgaataagtcaggatattcgctcttcagctgcagccaccaggcctccaggtgctcctcctgcgcctctagcatctgattgcattcgaagtcgctgctctcgcacagcccctccaggatctccagcaggcgaatctcgctggactcgtacttggacagcgtcttttcctcccaagccgtgttcccgccgccaaagttcttctttgcggtgtccaccatcccctggttaaacttgtccaccagcccccggcaccggtggcagggcgtcggcttcttggcggcctccggcgcgggcggcagcagcagcagaagcggcaggagccccagcgcggcccggcgcggcaggcgcatggcgggtagcgctgcgggaagacgcagccggagcttcaggtcctgcggccgtgctgctccggcctcccggccgcccacccgctcccagccgcgccggcctgtccccca

SEQ ID NO: 322772 - DNA, 1020 bp, Homo Sapiens
gtagcaaaaccatttattaagtgcagaacaaaggctgggtccttgtgctgctcccagctctttggttacaaataggtttgggcccacagaggacggaccttgcccccttcatgcctcccaggagacacctagcccctgctctgtgcatgcgggtgggctgggccccccaggggtgcaaggatggagtagctgaggaggctccgggagaggagtcgggaggacgcctagtgggacatggcgggggtggggcagggtgcggtcaagtttggaagaactgttggtccatgtgggtgctaagggttccgctggtggtcagtgtccggctcacaaactcctgggtcacatgccgggtgagggagccgcctgcctccaggtgctgggcccccagggtcggcccatccactaggaagggctcggtggcgctggtgtgggtggtggtgatgctgctgtactcgctttgcagcgggtgctggaagagcccggcacggctgcccagctgcgggaagggtcctccatcctgggactctatggtgatgatgccctcgcgctctggcccgaagccctcagtggtcctggcctgcaccttgaacttgtagggcacgttctcgctgaggcccggcacggtcagccggctctcggggctgtctccatccacccggaatgcggtggctggccctcctccttgggccatctcacaggtcaccaggtagccgacgatatccccattgggcctccgtggccgctcccagctcagctgcagcgagtctgggctcagggcagtgaacaccagcgggcctggggcactgggagtgctcaaagtgaaggcggagcctggcaggggacacagtgggctctgcgggtgcacctgggattcaatggtgatgacaccctcacgctctcggccccagccttcctggctctgggcccgcacgcggaacacgtaggagtggttgggcaggaggtcttccaccaccaccgaggtctgggcagggttggggatgttgagccgatgcagctcac

SEQ ID NO: 322773 - DNA, 909 bp, Homo Sapiens
ggacccttcccgccctgggccccacccaatgctcctggggccctgagaaccgcgaagccccgaatgcttggagaatgaaaaaattcctgctaaccaacctaggtgattggaagtgcctgtgtggagtggaaacccacttgggtgccgctcggagctcctctgccccacatcgcctcactgggactccgccatccagtctgacgtctttggatgtcccccataaatctgctggctttcaggagaaacacgtcttgaagcacagctgaacttgaatctttttctgggtcctcctgctggggccgtggtggggagccgctcccgttgcctcaaggcctccaggcctgccaggtcaggctgatggcagtggcttgcgcatgaccatgatgcggtggccctgggttatggcgcggctgcggcagcccagtccgagcctggtcccggcacatccacgtacaccttctccccagccgccttctccttcctgtagaggaaggactcgtgcaccaggaacctgccccccagggaagtcctcaggaactccaggggccggagaggatctgggctgtcccactgcgccaggttggggaagtgctcccgctgccgcagggcctccaggccgcccaggtccggtgggtggcagtgcctgcgcatgaccatgacccgccggccctgggtgatggcgcggctgcggcagcccatgcgggcctggtcccggcaggtccaatacaccttctccccggccgccttctcccgccggtagaggaaggactcgtacaccaggaagctgccccccaggggcgtcttcaggaactcggggcctcctgttgagaaatgggaggggaggagcagcggacaccagctctcagagcccagatcagcatggccccgagatgagacctcccacaacgc

SEQ ID NO: 322774 - DNA, 993 bp, Homo Sapiens
  misc_feature (843)..(855): n is a, c, g, or t
  misc_feature (858)..(919): n is a, c, g, or t
gtgtggcgctacgggggcagcttcctggtacacgagtcgttcctctacaagcgggagaaggctgtcggggacaaggtgtattggacctgccgggaccacgcgctgcacggctgccggagccgggccatcacccagggacagcgggtgactgtgatgcgtgggcactgccaccagcccgatatggagggcctggaagcccggcggcagcaggagaaggccgtggagacgctgcaggctgggcaggacggccctgggagccaagtggacacgctgctccgaggcgtggatagtttgctctaccgcaggggtccgggtcccctgactctcaccaggcctcggcccagaaagcgagcaaaggtcgaagaccaggagctgccaacccagcccgaggccccagacgagcaccaggacatggacgcagacccgggaggccctgagttcctgaagacgcccctggggggcagcttcctggtgtacgagtccttcctctaccggcgggagaaggcggctgggtgagaaggtgtattggacctgccgggaccaggcccgcatgggctgccgcagccgcgccatcacccagggccgacgggtgactgtcatgcgtggtcactgccacccgcccgacctgggaggcctggaggcccctgaggcagtgggagaaacgccccaacacggcgcagcgggggaccccaggagccccgagttcctgaagacgcccctggggggcagcttcctggtgtacgagtccttcctctaccggcgggagaaggcggccggggaaaaggtgtattggacctgcccggaacaggcccgcatggggtgccccagccgcgccatcaccannnnnnnnnnnnncannnnnnnnnnnnnnnnnnnnnnnnnnnnnnnnnnnnnnnnnnnnnnnnnnnnnnnnnnnnnnaacggggaaccctttccccactctgggggcgagggggacgagcccgagttctttcccgcgccccgggaggtgcc

SEQ ID NO: 322775 - DNA, 1021 bp, Homo Sapiens
  misc_feature (34)..(34): n is a, c, g, or t
  misc_feature (45)..(45): n is a, c, g, or t
  misc_feature (49)..(69): n is a, c, g, or t
  misc_feature (89)..(89): n is a, c, g, or t
  misc_feature (100)..(100): n is a, c, g, or t
  misc_feature (128)..(128): n is a, c, g, or t
cctgctgaaagaactgtcccccacgcgctcttgncaaagaacccnaagnnnnnnnnnnnnnnnnnnnnntaacaccagtgatgttcctnagctacagaanttttagggcatccaaactgttgtgaatncctgctaaacaggaggccctgtgggatctgaggttgatgaactctcctgaagttgctcagttagggtggcacccaggacctggcactacactctgagaggacgttaagcttacctgtgaaacacaaatcctctggttaacacaaaacagcgcacgagtcctctctgtcaatcaccaatccccttgcaagtctcctggctgcagataaacagggacaagggctgaggacagacagaagccactgggtttgggagaccctgtgcccatcagacagtgccctttggtggtttcggcagagatccccaatgtttcgttcattcgtagagacatgcttgttcacacctggcagcagacctcattggttaacacagctgtggccccagcagggaaagcaaagccagcccagcaaaccctctgtccaccccacatggtgttttggccttcagtggctaactttcctccttgtttcccatagagctgggccaggactgcatgcctgctggaagtggcatgctgggttagtgagcgtgctgagtgagccaactcccactctgcccgctgcagcacagaaggatgcctgcccatgcacaaagtcctccaggatcccagcaaggatgcaaatgctgtgggcagcgggaagaaaggactaatgaacaggccgcagcccacttcagagcaaccaaacattccacaggagctggtgccagctcaccccacctgggaccaggggcagcagcatggaggagaggacgccagcagtccctgcagctgtagctgtgggctcctctcacgggtcctggaccttggcccttttggctttcagagacaggtgcgttccttgttgataaaagtgtggagccagctccaacagccaggccgattcaatggcagtca

SEQ ID NO: 322776 - DNA, 1402 bp, Homo Sapiens
tcagggatgctgccagtttatccaattaactactagtagacacatattcacatattgagtatctattctgcacaaggcaccgtgctaatgttgtggtcctcaacaagataaaggtaacataaccacaatttatatctgctattatttatattaatcacatcctttccaattcaggtcagttcataggcctcaatcaatacaaattatttcaagaaaccatcctttgtgattaaagtaaatattgatactacatagcccaattatcatatggctaataggagaagcaaaactgtagagctagttttgaaacgtgacgttatatggctctatctctacaacattttacatggtagatctctgcccagcctcatccagagctaagtttcttttccttgctgctacttcactgtttaactctgaatctgatttgtccatgttgttgccagagtaggctggcatggaacctcttgctccctgttcagtgcctccatttggatgaagaatggtagaatttggctccttaggacgtttccattgcggtctggtgactatccaaaaaatgagggccccgaacaccaggatcagaaggccaagcgtatttacgaaaacaccttctggcgggaatgtactgtatgcaggatctctcagggaaaaaatcagtttctctgtcaatcccataagtgctgttgcaatcactgttcccaaagatgacaattccagaataaacatgtatgggcatgagaaatgctcggagagaaagcggagcccatggaagcagaaagactgaaaaacctgaaagaagctgtaacaaatagcatatgacagctatcagtccaacccagctgtgcagactgtacatattggctatattgttaacattgtggttctcaaacacggccaccacagagataattgcaagaatggcagcaactgcatttaaccctgcatggatggatttcatcaggagcttgctgcatttccaggtccacggcagtctgtagacgatgatggcgatgccctggatgaagacgaagccggtgaccatgagcactgggtgccagttaaactctagtgcgctcccatcccagccaagcccctctcggtagtggaggacccagacgagggcgaagatcaccgacaggaagccgacgagcagtgccgaccccagcagcgccaggaagcgccagtagccctccatggccatcagcgccccatactccgcaccgcgggggccacaagaacttggagaggcggcggcagccctctgggtagtggccgggcggcgggaccggggcgtcgacttcttggggctgtctccgcctgcggggagggactttctgggctgctggcccggaatgtggggccttttgcgggtggggagctggccccaactcagaaatgg

SEQ ID NO: 322777 - DNA, 888 bp, Homo Sapiens
aaggcaaattttggagccaaaacttttggtgggcaggaatggccaggagatttccaaggaaagggttcttgtataaggggttttgagaaggagattccccccatttctgacagcttccacctccaggcccccccatggacacaaaagtctttaaggccacaggagagaacccgggaaatgatggtgccaggaaaagaggagccaatatgtgccacaacccagtcaaagtgtggagaatgctgaacagaggtatccagcaaggcatccacacacgcatctgggcagctaccaatgagagccgagaggcactgctcatagatgtccattaatgtacgcgtggccctacaacccatccacagctgtagcagttcattaagagcgccagtagcgtggggaacacgctggtgctggcctgagtacgtgctgctcagttgccccatgaggtcaatggaccatgctctaatcacaggtgcccaggcctttgggttggcccggataaactcagacagcacgtgttgcacttcctgaaccacatcctgtagatcaggtccaccagcagggacatgagagggtggaggtggacggaggtgaggtggaccagccacaggggtttcatccagggcagccaggtgggcccggacactctcatcaaagacacctctcaagtggtcaagcacagcagcccgagcaggtggcaaagaccggagcaggagaagaccacagcgagcatgttcccgggttgagagttggtggcccagaatggggtctacgccagtcagaaaagccttgatttcctgggacagctcctgagcactgagaggcgcgggaccgtgggtggccggggcaggcccaggtggccctggggccccgggagggtcgcacagcgcg

SEQ ID NO: 322778 - DNA, 916 bp, Homo Sapiens
  misc_feature (308)..(321): n is a, c, g, or t
ggccccgggccctggcaacatttaaccagaagccagccttcgagcttctccgggagcccgacttttgtgaaagcagagtggagtggaggggggctgccccaccctcgcttgtacacagctgggcccagatggccccttctgatccccccagggctgacccagtccccagacccaggcacgaagagagaggtcagagccggtaagaaggaccccccagagtctctccgtcagtgcagaggcaccagtcaccaagtgaacgtccagcttccgaacaagggggagcaagctccagctgcactcgtgatttnnnnnnnnnnnnnnccccggatcttctgggtatgctgccagctccggcttcttggctgccccctcccagcctgcagctcctgggccagagctgcagagcagggaacttcccaggagagtccaggagacaggaattacagacctcccaggccagaaggaagtggggacagagaccccaggacggggcccggggatggccattctgacctcgggcctgtcatttatccggcgggacccggtgggcaagtgggcgagtgtggtggcaagggtggggggcggaggcgaacacatgggcaccatcagtctgaggtacacaccggagactccaccctgttcccagcgctcacttctggctcatttcttcgtgcatgtggttccgggacaggtacttgagggcctcatccagcaggatgacaggcagagatatctggagcaccaccacccactggcgcccgctcagtggggtcacctggaaaatgagaggcaggggcggcacgagcaggatgaggaagtgcagggccatggacatggccacagccaccagcagccaggggttcatccagggcggcatccgcagcagcgactggttctccgagacgctgttgagggc

SEQ ID NO: 322779 - DNA, 914 bp, Homo Sapiens
  misc_feature (867)..(867): n is a, c, g, or t
caggctggtccggtccggaattccgggatatcgtcgacccacgcgtcggtccggcattggtcccaggcagcagttagcccgccgcccgcctgtgtgtccccagagccatggagagagccagtctgatccagaaggccaagctggcagagcaggccgaacgctatgaggacatggcagccttcatgaaaggcgccgtggagaagggcgaggagctctcctgcgaagagcgaaacctgctctcagtagcctataagaacgtggtgggcggccagagggctgcctggagggtgctgtccagtattgagcagaaaagcaacgaggagggctcggaggagaaggggcccgaggtgcgtgagtaccgggagaaggtggagactgagctccagggcgtgtgcgacaccgtgctgggcctgctggacagccacctcatcaaggaggccggggacgccgagagccgggtcttctacctgaagatgaagggtgactactaccgctacctggccgaggtggccaccggtgacgacaagaagcgcatcattgactcagcccggtcagcctaccaggaggccatggacatcagcaagaaggagatgccgcccaccaaccccatccgcctgggcctggccctgaacttttccgtcttccactacgagatcgccaacagccccgaggaggccatctctctggccaagaccactttcgacgaggccatggctgatctgcacaccctcagcgaggactcctacaaagacagcaccctcatcatgcagctgctgcgagacaacctgacaactgtggacggccgacaccgcggggaaaaaaggggggggccaagggctccccaggagccccagaagctgagtgttngcccgccaccgccccgccctgccccctccagtccccaccctgcaaga

SEQ ID NO: 322780 - DNA, 902 bp, Homo Sapiens
  misc_feature (712)..(765): n is a, c, g, or t
aggggatttgggacgagggaaaaggggcccccggccccccaatgccaaggttccaagaccagggtggatgtttcaacgcaggccgctccaaaaggggatgtcttcaaagcgtctgtggggtgggggcccagaaagccccgccccacttggggccctggaggaggctgggagtgtgagagcttctgtgacgcgcatctgccgggttattcatacagcccagtgccccagcgctgtcctcccagcagaggagctcgtctgcgcggaaccagagagcgatctcgcggcgggcactctccacccgagtcgctgccgtgaatcaggttcttgccaacctcgatgcagaaatccccgcgggatggtgccgggcggggcgtcggccgggttcgtggctccgatgagcgcccgcgaggtgcgcaccacgtccagccccatggccaccaccggcccggaggccatatacttgacaaggcggccgtagaacgggcgttcacgcagctcggcgtagtgctcacgcagcagctcctcggaggcctgcaccagcttcagcgccaccaacttgaagcccttcctctcgaagcgccgcacaatctcgcccaccagccgccgctgcacgccgtccggcttcacggccaggaaggtgcgttcgtgtgcgccggtgcaggccgcggggaagaggttagcgaagatggtcagcaccaggcagatcatgatnnnnnnnnnnnnnnnnnnnnnnnnnnnnnnnnnnnnnnnnnnnnnnnnnnnnnntgcgcttaaagaggcctggtcggggcgctgcggcctccgcggggaggctgcttcacttgcaccccggaacccggcagccgtggggggccggagggcagctgcggaggccaagtctcctccagcagctcggacactaa

SEQ ID NO: 322781 - DNA, 1015 bp, Homo Sapiens
agctgcctgttcctgggcccaaaccgaaacgaaaacgaggactttattataaaaaaacgttggaccacgttgggctgggcaccaggacagtgtcctggcacgtttccaggcgagccgcgcaggctcctggagcagctcctcgggcaggaaaccctgtacgccagggattggagaggcctgcgccaccctccatgcaacgtccagacaggtggatgttcagcagcccgtccaaagggatgctccaagcgctgtggggtggggccagaagcccgcccacctgggccctggaggaggctggagtgtgagagcctctgtgacgcgcatctgccgggctactcatacagccagtgcccagcgctgtcctcccagcagaggagctcgtctgcgcggaaccagagagcgatctcgcggcgggcactctccaccgagtcgctgccgtgaatcaggttcttgccaacctcgatgcagaaatccccgcggatggtgccgggcggggcgtcggccgggttcgtggctccgatgagcgcccgcgaggtgcgcaccacgtccagcccctgccataccatggccaccaccggcccggaggccatatacttgacaaggcggccgtagaacgggcgttcacgcagctcggcgtagtgctcacgcagcagctcctcggaggcctgcaccagcttcagcgccaccaacttgaagcccttcctctcgaagcgccgcacaatctcgcccaccagccgccgctgcacgccgtccggcttcacggccaggaaggtgcgttcgtgtgcgccggtgcaggccgcggggaagaggttagcgaagatggtcagcaccaggcagatcatgatggcggtgcgggagcgggatccgcggggcggggcggtggcgcccggggcggggcctgcgcttaaagaggcctggtcggggcgctgcggcctccgcggggaggctgcttcacttgcaccccggaacccggcagccgtggggggccggagggcagctgcggaggccaagtctc

SEQ ID NO: 322782 - DNA, 1120 bp, Homo Sapiens
  misc_feature (42)..(84): n is a, c, g, or t
caacatatcaccagtcccccatggttttcctctactgagcannnnnnnnnnnnnnnnnnnnnnnnnnnnnnnnnnnnnnnnnnnatatatatttccaatagataactacattcaagtaatgaaacacaggatttacaatttccctccgaaggcagaggaaaagcagattcacacacagttcacagaggaagtaccatgagagcccggccagacggcagccaaggacgctctgggggcaggggcggggccagcagcagaagttcaccacagtcccactggtgcttatcgtggggagcgggcaggtgtgggtggagggcagggctagcctgatctgtccaggaacctcaatcttccaggaggtgctcgaatttggggttcacaaaggagaagccagcgaatgcagactggtccatggagtcgatgaggttcttgtcgctgtaggagaggcgcgccttctcgttcaggaactcctggtcaaagttactgtagtctctgggtgacttcactttgggcctgaaagggtggctccaaacctccgcttttccaagcagagtccagtttatggtcttgaagaaggggtggattttgatgtttcccgtcactcccagcctcttggttggttccctttcaaagagcttctccaggatgtccttggactccttggtgatccagcggggataatgtggcgtgtccacacggatggactcgaagagttcatcctcatcatcaccatggaagggggactggccaatgagcatctcgtacagaaggaccccgaaagaccaccagtccacagagaatgtgtacttcaggccctgtaggatctcaggggcgatatagtcaggggtgccgcagaaggtgctggcccggctctccccgaatatgttctctttgcacatcccaaagtcggcaatcttgatgtggccatcccggtccaacagcacattgtccagtttgaggtccctgtaaatgatgcccttgctgtgtagaaactgcagtccacacattatctcagcggcataaaacgtggcacggtagagttcaaagcggcctttgtcctggatgtggtacatcaggtcccccccgttgaggaactccatcacaaagaacaggtgtcctt

SEQ ID NO: 322783 - DNA, 1636 bp, Homo Sapiens
  misc_feature (191)..(231): n is a, c, g, or t
  misc_feature (233)..(233): n is a, c, g, or t
cgggtgggccttgttcaaaaccttgaggttccgggagcgggcgccatctcaagggctggttctatgggcccacagacccaccgcccccttggcaagttttcccagtgcccgccctcgttcccacaataccccagggttttgggacccccctcaaagaaaaaagggtggggccttggaccacctggcgtttnnnnnnnnnnnnnnnnnnnnnnnnnnnnnnnnnnnnnnnnntntactcgtagatggtactcagggaagcagcagcaatgactgatccgccagtaggaagcgcagccggctccatctcctttctgtatctgcattcgctccccgcagctttcaggtactgggcaggaaaacggggggctgtgtacacactgagcccccctggatcagctcctccagcttccgggcccggagcccaccctctacaactgacatatctttgagctgcaggtcattgacagggtcgagggtgggaggtccggctgggtgggcctgagccagacgcagcagttcctggacagcagtggtcacggctgcaaggggaggatccttcttgaattttggctgctgcctcttgctgaagtcctccaagatcttctccccattcacccggagcaccttggtggtgatggcagccatatctcctggctggagcttgaccacggtgtggtcacaaggcccttcaggcaggaacagcttgaatcccacgaggtcatctggatagggcacctctgcagtggctggccccctgtcctgtgggtcctgggacaagggcttatcacacaagaccagggttgtgaatactctgctggtggagttcgaggagacctgtaggatcactcccaatgcgttgtgatgctcctgattcttcacaaccaccacccttcctgctgagagagacttcagcccgttcacagactccatgatgcgtcgctggatcatgtgctgggtctctgtcagttcctccccccagctgtaatattcaggcaggtcgaccagttggccagtcatgtcaggctcctccaaagctcccagcctcttggtcagttcagccagggcctgttcatgggccttgctgtctttgcgggagggaaactcagagaagctcctcttcatcatgtcctccaccctgagggcatccactcgcagcaagttgaggatcatagtgtacgtgaggcggaactgggactgcagctgggacggcttccccatcatcatgcggtgcaggtctgccatctcgggcactcggcccttgcagagcaggataacggtgcctgtggggtccaggcccctccgccctgcccggcctgccatctgcacatactccccagggagcaggtcccggaaggtggagccatcgtgtttgcgcatggagtcaaacactactgtacgagcaggcatgtttactcccatggcaaaggtctctgtggcaaacaagaccttgaccaggccacggctgaagagcatctccacgatctccttgaggatgggcaggatgccgctatggtgcacacccaggccgcgattcaggagctctgacatgtgcaggacctggggcagctggcggtcagagccacggaggcgagcaaggcagcgctgcaggaagaggtggatctcgctcttctccgaa

SEQ ID NO: 322784 - DNA, 870 bp, Homo Sapiens
  misc_feature (29)..(29): n is a, c, g, or t
  misc_feature (31)..(31): n is a, c, g, or t
  misc_feature (87)..(87): n is a, c, g, or t
ctgaggtcctggccctttcccccaaccangntggcttcctccccatgacccaagttctttccaaggctacacagccccttccctctncaggtccccggtgatggagaccccagcggcacaaacccaggcccagcctcctactgggtttggctcagcaggggcggggccggagcaggagggggaagagtcacttgaggcctacaggggtgtggggagaagcaccaggcctgggggtgaatggccatgggcaacaaagggtgtccttggccaccaatgcctccctccaggctggacagtgaccggtccctctgccccttcctctccccagcccctctgttctagaggctaccccaggtttcaggtggggggaactggtccacatcccccatctcgttgtaggtctggtcacccatggtgaaggtgagcttgtagcggaggcgaaccttctccttctgggggttggcaagccagcaggaccctgggtgattgctgaggggtggacgatggggttaaaagctggcagctccgtgcccgagggtggctgcagcttcaccttcataaccttggggacagctgactggaacacgatgttgcggatgggctggggggcggtgctcagcatggaaaccaccaccaccagcacgtcggagcgccctggcagtgggtcccgggcaaaatggaagaggatgcggaagccgtgctggtcatacacagtcacgggcaggatgttgctgggtttgatggactccaggggcacagtgatgctggccagtgagagctcggttggtacgggctgctgcggaggcctggggggctctggggacacggtgggagaaggctggtggcgctggagctgggggagctgcagct

SEQ ID NO: 322785 - DNA, 1069 bp, Homo Sapiens
  misc_feature (409)..(409): n is a, c, g, or t
tctgggtattatgtgtatgagtgtgtttgacacaaccctatccctgtaagcctgaagcatatgggagtgaccttgatgacacccccattctttcctaggaatgggtcttccagatgctatcgcgacagaacaattacaccgtcaacaacaagagaaatggagtggccaaagtcaacatcttcttcaaggagctgaactacaaaaccaattctgagtctccctctgtcacgatggtcaccctcctgtccaacctgggcagccagtggagcctgtggttcggctcctcggtgttgtctgtggtggagatggctgagctcgtctttgacctgctggtcatcatgttcctcatgctgctccgaaggttccgaagccgatactggttccaggccgagggggcaggggtgctcangaggtagcctccaccctggcatcctcccctccttcccacttctgcccccaccccatgtctctgtccttgtcccagccaggccctgctccctctccagccttgacagcccctccccctgcctatgccaccctgggcccccgcccatctccagggggctctgcaggggccagttcctccgcctgtcctctgggggggccctgagagggaaggagaggtttctcacaccaaggcagatgctcctctggtgggagggtgctggccctggcaagattgaaggatgtgcagggcttcctctcagagccgcccaaactgccgttgatgtgtggaggggaagcaagatgggtaagggctcaagaagttgctccaagaacagtaactgatgaagctgcccaaaaatgccttggctccagccctgtaacccttggtactgcctctgaacactctggtttccccacccaactggcggctaagtctcttttttccctggatcagcccaaacgaaactttggaacctttgacaaggaaacttttcctaaagaaaccggcttgaataaccaggaaaaaaacccaaacccaagggtacaccgcagggcatgcaacgggggttttcctggccccacgaaacggccttaaaccaagccccccccaactgggccttgg

SEQ ID NO: 322786 - DNA, 907 bp, Homo Sapiens
  misc_feature (127)..(127): n is a, c, g, or t
ccccggtaacaggatggtcctggcgccattaaaggcaggccacagatccccggacagaggtctcccccactttaccagagaaggccactttttgaggaatatgatgacttccttttaccaaaagccntgaataggccaggtaataacttctagcatgcaagatggtttcaaaaataaaatcctctggcaagtgaaatgtaacttcaggtggattctggaggcgatgagaagctcaagcaaatccaggaaacacatcaggatgtttactattttagaagtatcccggcagttttcaaaatgctgagagaataagggaattgtaaaaacaccttcaaaaatggtgtcgaaatgaagtccaggaactgcctttagaatttcctgttttcctgtgaacatgaatcctttaaagatttccttttattattgctgtaagagtcccagaggcagtatattgctttattactctcagagtattcagaaagatttttctggcaaaaagcaatccaggaattacttaaggttatcttttctctcaattggaaatatagaagcaatgcaaggcactgtgcagccatgtgagataacaatttatctgaattttggaacatgcagattaatttagaatcgactttggctgattctaagagaattttaattacatctctgtactgctcctttgcatggaactcggttttgacagacaatatccgggttgtcatcactttgatcactgttaactgaaggagcattacttctctggaaccgctcatctgagagttggtcttcaaacacacaggtgctacagcaatgggagccacaccaacagagatgggctgatgcctgccctggataccacaggtgtttgcccattctaaggaggtggctgtagaacaatcttgatctgaaa

SEQ ID NO: 322787 - DNA, 1583 bp, Homo Sapiens
cggcggtggcacattttttagctggtaacgagcggggtggggaagggggtagttgtaggggcacagtcaagaacagggcggggcgggcatgcgggccgggtgggggtaacagggcacgcccggggaggggttatgggggcgcgcgcacaaacgggaaatggcgcggggctaattaaggagcggaggaggtgaacaggggaggcagatcggccaaacgggcgcgggggcaacggaagctaacgcgatgaggtgcgactgggcggggacattacaggcgggcccgaaggtcacggcgcgtggtgggcccagaagccctaccggccccctctccggaggggcggggggaaccggcaggaagactgagggcctggcgcgggcacctggcggggctcctggacacgggctgcaggcggccagcctcactgctgcttgcaggccgacagccggcgggattttgttgctggcggagcaggccttgcggggcagggttgggggcccggccctccgcccctggatttggtgctcagctgcgccgcctctgtgccgttcatacacacggccttggggaggccccggcgctgtccattgtgactggcctcctcttctgggacctgtccgggcaccgtgaagtcctgagtgtagatgatgtcatcctcgatgtcgaagaggtcctcgtcctcgtccgcgccgtgcaggtcctccaagtacggcaccacagtcatgctgcgccaccggtccttggtgtctgggctcggtgggatgggcactggtgcttcagccggaggatgtttcttccggaaccagctgtgctgccggatctgccggatggagaacctcttggccggttcgtactcaagcatccctttcagcaggtcagagagcggggggccacagtcgcccgggatggcgtagctccccttcccgatgttctcaaacaacttgtagatgttgtccccttcgaaggggtacagacccgtggtgatgttgtagagggtgaccccagccgaccagatgtccaccttgaagccggagaaggtgtccaggccgttggcaatctcgggcggctggaaagccggggagccctggctggtccggcaggtgtcgtccgccgcgaacgggtgcagtgcctcggccacgcccaggtcggagattttgagggtgccaccggtggtgagcagcaggttccccggcttgatgtccttgtgcacaatgccctggctatgcaggtactccaggccgtcaatcagctgacagaagtacccgtgggcctggcacactgggaaacgcttctccggcacgctgtccagcatttcctgcatgccacacacgcagtactccatcaccatatacattttctgcttctcttcgttgtataacacatccaccagctggatgacatttttgtgccgtaacctcctcagtagttgaatttccttcttcacgttggcctccccgttggggatccttcgcaacttcttcttcttgaggatcttgacggccctcctgcacagcgtctccgagtccagcacctccttcaccttgccgtaagagccttcccccagcaggtcccccatcaggtcttc

SEQ ID NO: 322788 - DNA, 970 bp, Homo Sapiens
ccaattaaagggtttcaagccagtggccccggcccagttacagggttggtccctgcccgctggggaagggggattcccgtgttcgggacgtgaagatcccccagtgtgtcgttcagggacaccgggcgtcccggcagctccctggagcacccagttccaactcctttggtccatgcggccgacggtggtgtactgagcggccaggtcggctcgggctgccgggggtgttggggacgaagtaaggcaccagcacgtcccagtgggtcgtaggcctggggggtccagtctgggatacgacccatgccgctctctccgttgccaaacttctcacagaaggttccgtactggggctgggagtgcccacagcggtgggggtcgtggaaggcgacgtagaggaagaaaggccggtcatcctgagtctgcaggaatttccggacgagcagcttaattctagtgatgttccgccccacctggaggacggagccattctcctccgtgtacgcaaagtcaaacgggtacacggtctccggccccacgtgcttcttcccgatgatgcctgtgcgcgcaccagcttggctgagcagcagcggcaggctccgcaccttgtcgaaggagttgaagtggtgcacgtcctggtgcagcccgtacatcccattctgatgctggggcaggccagtgaggaggctggcgcggctgggagagcagctgctgaccgaggtgaaggcattgcgaaagaggaggctgcggcgggccaaggcgtccaggtgcggggtggcgatggcgctgttgttgtacgcgccactctcaaagcctccgtcatccgcgaggagcagcagtgcgttccggggacgcgcccggcagagccccaggactagcagcagcgcgcagcaggcgggcacggggcagctcatggcggcggcggctcggactcgggatcgggatccggctccggctctctgtttcccgctcg

SEQ ID NO: 322789 - DNA, 543 bp, Homo Sapiens
  misc_feature (65)..(65): n is a, c, g, or t
ggaaacaaaccaaaaactttatttacaaaagtaaattttaacttgcttttatatgtcatataccngttaatgatgacagcaacagatttaaaatacattgaggtttgtgcagctcatttccccctagttataccataaaactttataaacattgctttagctttgatgtttggtcacgtttgttgtgcagaagtcacgtttcagggtaggttcaccgccagacacggtcacatcaccattggctgtggatttccaagaagcaaaggggccattctcagcaaagctcgcactggcatttttagctgcttaaatttgaagagcagttcagcaaagcttgtgctcccttctagtcctataggtggcaggtgctgtggagctggcacagagtggtagacgaggaagcaggccagcatgctcagctgtgattcctccaagggctgcccgctgaggtaggcgtgcacacacatatcacccccgacttgtagccactggtccagggtattatcaatggtgcacttcacaacagggaggaattccgagttc

SEQ ID NO: 322790 - DNA, 966 bp, Homo Sapiens
  misc_feature (104)..(105): n is a, c, g, or t
  misc_feature (139)..(139): n is a, c, g, or t
gacccttaaaattcccattaaggggttaaagtttggccctcttccccccccacatttatagggcgggcattaggccctctgagggcaggggactggcaccgaanncatcctggcccagtttttgaggcccgaccctggncggaccccgagggagggtggaggtgcagtcggcagccaggtactggtacactcgccaggtcttaccgaagtctgaggagcgctcaatcagcatgccggcgggcatgggcccctggaactccatcatgacttcttgaagctggaatctcctgtccaggtccagctgcagagagacagggttcacatcattctgtgactgccaccagcgcatggggccggaggatgaagccacattctctactcggtgactgtagtagttgtgaggctgcctggagtcacacttgcagcatttcatctgccactcgccatactgggtgcagtaggtctcaggcttggtcagtccacaggtagatgaagctcggagaaaccgggtcctcccaacaagcaggtccccaacaggtggatagcaggccccacgggagcaggcttgttgggcatgcaggaggccaggcagggcaaaacacaagaggaagaatggtctcatcttcagccaatggggtgatccccagaaaggacctttcctagggtcctgatctaggacacttggagcagcagatacatttgtagcttggaaaatgctggagctctagacccttgtctcaagtggcatgtgactcacagggtgccctgggaaaatcccatcccttcccagactccagcttcctcctctaaaatggatgggaaggagtgtggaccctgccctaccccacacagccgtaaggacaacgtggggagcaggaaaaggctggaccctttgcaggagaaaagctgtagaaagggccaagacctagttcctgccccaagagagagggctggcttttctcaggg

SEQ ID NO: 322791 - DNA, 902 bp, Homo Sapiens; identical to SEQ ID NO: 126426

SEQ ID NO: 322792 - DNA, 1160 bp, Homo Sapiens
  misc_feature (204)..(204): n is a, c, g, or t
cccccgggcggtttggtttattggggggggaaatccaaagccctggttccaggcgccgggtttttcgtagggaaaacaggttagggccccaagttccagtttacctaagggggccccgcgcccccaaaagaaatggtctaggaaaagtttcttgaggggcgaagcggggccgacaagtttaaatgggggagggggaggggtttntttggaaaagcattttaataaaattaacaaataaatattctaaactgtataggctacagggacaaagggtagaagctagagggccagtctttcctgctcaggccctcaagtcccctttagagagaccctgcttctgggctgggttgggggctaggactgctgacttggggagggcggggagtgaaccccggaatgggtgatctgggctcttgcagccattcctctttgttggtgtaggggaggagagaagaggtcaaagaaagcaagaccctgcaagaggcatcccagtgacccccagaagtgactggggtaaggggagcgctatcctagaaggagggggtgggacggagggggcagtgaagcagggcggtgagcatggccagtggtgggcttcggccgcggttctacctgtggccactcactctcggacgtagaccctggtgcacacaacgtcatccgccgtcatggtcaggatcagttccccatcgttggtcagttctctggtccacgaggtcttggggccctctcccttcaggagcttctgctcacagaccattttattctcactctcccatttcaccaggctcttacagggcctcccatccacagtctgctcctcaaactcctccccaaccttgaagttaatctctgtggtgcgcacggtggtggaggttttgatgtagaaagtgtctccctcctgtttgatctccactgctggcttggacgctgcagccacagcaatcttcctcagcatcacattcacccccagcactttgagcaattcctcgaagttttccgatcggatgattttccagttgccagagaagttgggcatggtggcggcgcgggaggcggtccccgtagactcctaggctggagcactggacactgtcttttagtcaaaagagacgtcgccgtcgccgggtcgtcaggttctggaaccaagacaagtccag

SEQ ID NO: 322793 - DNA, 858 bp, Homo Sapiens
  misc_feature (502)..(517): n is a, c, g, or t
  misc_feature (534)..(542): n is a, c, g, or t
ttcggcacagaaaaatcccactgcagccaaaacatttcaggattttgaatccagttatcatcaaagagactgcctttgacatccttcagtactcagagcctcagtcaaggttctggggccgagataagaacgtccccacaatcggtgtcattgccgttgtcttagccacacatctgtgcgatgaagtcagtttggcgggttttggatatgacctcaatcaacccagaacacctttgcactacttcgacagtcaatgcatggctgctatgaactttcagaccatgcataatgtgacaacggaaaccaagttcctcttaaagctggtcaaagagggagtggtgaaagatctcagtggaggcattgatcgtgaattttgaacacagaaaacctcagttgaaaatgcaactctaactctgagagctgtttttgacagccttcttgatgtatttctccatcctgcagatactttgaagtgcagctcatgtttttaacttttaatttnnnnnnnnnnnnnnnnttttagctcttcccacnnnnnnnnncctatttatttgaggtcagtgtttgtttttgcacaccattttgtaaatgaaacttaagaattgaattggaaagacttctcaaagagaattgtatgtaacgatgttgtattgatttttaagaaagtaatttaatttgtaaaacttctgctcgtttacactgcacattgaatacaggtaacttaattggaaggagaggggaggtcactcttttgatggtggccctgaacctcattctggttccctgctgcgctgctggaccggactcaaagccttagtgagaggggagactgcttacacgacgcgagatctagcgtag

SEQ ID NO: 322794 - DNA, 899 bp, Homo Sapiens
  misc_feature (645)..(831): n is a, c, g, or t
ggacctttgggcccttccaaaggtaggaaacctaagaagtcctttcttcaaaaattggcgattagttccttcacttttgttagaggttttcgtcccaccacaaccagggcccttcccccgactttggtagaggagttcccggatgcagtagagtccatcctggggctctccccgggggcttgtagccttgaacaacctttccacttcgcaggactccgtggtgttgacgaagaccgagttgggcagtggcaccttctcatagtcctcgtccgagtcgtccccgccagtgtcagcctgtgagggttgccggggcttttcaaaggagaagctcctgaaactctgcccatcggggggtgatcgccctcaagccttccgggctccggggagtcaggctccaggtaggagtcatcctcatcgtcgtgctcatagtcttcattgtccgtggggtacggggaaaggctgatatccacaggccgctcaactgcgccgtagaagctgtctgtgtccgagctggagtcgctgcaatgcagggtgcgttggggcggacggtgagcaccaggcctgggaggtcccttgatgctcacacaaaggtacacacaggcacacgcggatacatggacagatacacagatgcacacacggatnnnnnnnnnnnnnnnnnnnnnnnnnnnnnnnnnnnnnnnnnnnnnnnnnnnnnnnnnnnnnnnnnnnnnnnnnnnnnnnnnnnnnnnnnnnnnnnnnnnnnnnnnnnnnnnnnnnnnnnnnnnnnnnnnnnnnnnnnnnnnnnnnnnnnnnnnnnnnnnnnnnnnnnnnnnnnnnnnnnnnnnnnnntggatatatatacacaaagacacagggacacgcgcagacatgtagacacacagacacaaggactctgt

SEQ ID NO: 322795 - DNA, 1125 bp, Homo Sapiens
ttttgcaaactcactgctgctttattggaggcaacagcccatactggagcctgtgtcttagcgttcctgggggtcccagtgccagccccggcccccacccagctgccctggccctgcctggctcccagcccacttaggggtgagtgtgatggggggcccagtgttcctgtccttggagcccaggcacagcttggtcctgggtttctgggattgggacagggcaagttagtgtggggcaacagagtcccttcgtcctctggagcctggcgcctggttcagccctagaacccaacctgctggatgagactggctgggtcctacgagatgtccatcacagaggccctaggcaagcacagccttgctcctgctcaccctcccatgtgggcccatgtccgtctgtgtggcctggggtcagggcccctgtgactgccttggcctggcagccacatggactgccatcacctaggcccagtgtagccgtaggggtgccgcagcagcaggctctggtggctgggcagcacgtgggtgtggtagtgctccaccatgctgcccacactcacaaacaggacctcgccctccaggtagaacttagagtccttctcaaaaatgcgatagttcctcactttgttagaggtttcgtcccacacaaccaggaccttccccgacttggtagaggagttccggatgcagtagagtccatcctggggctctccccgggggcttgtagccttgaacaacctttccacttcgcaggactccgtggtgttgacgaagaccgagttgggcagtggcaccttctcatagtcctcgtccgagtcgtccccgccagtgtcagcctgtgagggttgccggggcttttcaaaggagaagctcctgaaactctgcccatcggggggtgatcgctggaggtgcgggagctgcggcttctctggcctgggcaggactgcgggccgcgccatggcctcaggcactggcagcttcagcgcaggaggccggggagccacggggggcacaaagagtccgggcatggctgcctcccttggggggtcccgccacccagcctcgctaccttatgaccgttatagtactgccgtcttttaagccgtgttttgacaacttgagtag

SEQ ID NO: 322796 - DNA, 1396 bp, Homo Sapiens
  misc_feature (62)..(62): n is a, c, g, or t
cgcgaaccccctgtgccctcggccgcctgcagcatgagcctgcacaggagcccccgacaccnccatggctccggggggccccaggggctgcggggctctggtcttagacgcagttatcagggacgcactcagcctcttcttcgagctcggggcaggggctcccgttgttggcgggctggacccggacgtagcgagtcctgctcttggtcccgagcctcccacagtggcctccgcacagtccccaggacgaccacagggagacctcgcagtccagcggcgtttctggaactgaggcgctgtctacaatctccattgtcccctgctgggcaggactggggcgggagggatgaaggccctggggctctgtcgcagccgcaccagtgtcaccctggcgatgggaggcagggccttcagccgcgggtagtagaaggagttggccgggtggctgggagaggaggacgttatctcggtcaccgtgtcctgcgggatggtggcgaagttgggggaggagaaggtgaagccgctgtccgtcccggcgtcgtaggggtacaggtccagcgccgcctgttcccgcgaacggtccccgtcgcacaggtccaggctgtccacgcccacgaaccagtcggggctgggcacgatgcgcaccacaaacgagaccagcgagtgcctgcgctgcacctccagctccgccgacgtctgcccggtgccgctggggacggcgggcgccgaaaacaccgcgtgcacgctctgcagcgcctcccccgccgcctcgatctccttcatcagcgcccaggcctcgccgcgctccgcaaagtcgcgcagcccgttactgacgtactggttcttcctccacatgctgtagtcggagctatgcgcggcccccagcagcgaagaccactgcgcaggggggcggaacagggggtactgcttggggaaggccgtctggctccacttgcccgtgaaggtgatgctgtatttggccggggctctggcggaacagatggattctcccccaagaggctggccggcggcgccgagagtggccaggaggagagcgcagagggccttgcccagggcggcggccgggctggggttttccatcacccggcaggagcagcgggagcgcggccggcagcggtcgggtcccagccagagcccggagctcctatttaagcccgaggccggcgccccgggccggccaatgaggctccagttcctcctgtcttcgatgctgcacggcctggcctccagcgagaggcagataggacgtgggagaaaggaggagaaggggctgcgggggcggcgggggctgccgctttcccaactcgccctgcccagcgaccttccccgggtcggatcaccctcttcccctggcagtgctgccgcacccctttct

SEQ ID NO: 322797 - DNA, 915 bp, Homo Sapiens
gaaggcgaacagactttggccgcgggcggtcttcaagggccggaagacgccacccagtctccttcggcctacccgctgctccaggaggaccacgtctcacctcaaagcaccccgccgctccccgcgccttctagtcgcgggcgctccattgccgcagggagccagtttttccccttgaggtccaagcactgggcagcaacggtggtccggtgctcgggcttggggggccctggcatgtgtctgccatatgtgtatgtaccaaacaccaggccactgccaggaatcgctgcccagcagtccctggtgaggtccaggttctgtctctatatgcataaagtgcttgggtgattgacaaaggctgggtgggtatctcggagggagaggctcgtggagactgggggacgtccgaggccgcaggctcttcctgggcacagtgcctgctgacctgccgtaagcaggagctcgctttggctttgagtcggcagtggtctcaggcccttgcttgtcctccggggctgccctggggctagagggtggtggcacccacgcctgctgagccaggcagctggaggggcagaaattctgtgatccccacctgtaaaagatgggagacaccccccaagctgtgtggctccagatgtgctggttctgccccgtgagctgcagggaggccggcaggctgactgtctgtggggcccagggcagggctcagcaccagcgatcagcgccatgggcttgtcccgaggagtccagccagcacacagagcccactctgcagggctcggcaggacggggggcccagccaggccagaaaggtcaggcacagatgccagtcagcagcgccgagagtctccgctcaatgcacagcttgcacttggtgacgttctcgatgtcggcctggtccgagagcatgtg

SEQ ID NO: 322798 - DNA, 820 bp, Homo Sapiens
ggatggccatggttttttctatacccaaggcattcttataacaagcaccccaaagcctgaacagtttggatcacaaagtcactttataacatccaggactacaaagccagatttgcttaaactttcccccaaattatgattttttatagatcacatctgaccagaaagggcttcacttaagatcttgattctccgggagctataattcatcttctttctccaataccacccacattcttaaaggttatttagcttttctccacaaggatacgtagaatggatctttttcccctccagaaataatttccccaggaaagaattgtaaaaccaacttaaaaacacaaaataaccttacgtttttccaccaacaatgatcagacctcccactcctctgacttgagcttcagagccctttgtgtatacttttcacacattcctcataccattaacacagctttccatcaccatcagccatccttcctcaacttttccttgcccaacatgaaagctagtggattgagagggaaggaagaagggaactgaaaaagtattacctttataaaaatagttttcaacctgttacttgatccttcaaagccaaattgggtagcatcatctgtacagaccccaacactaaattctcaagtgtctttcttttccatagccaggtctcaaaagctcaaatctaaacctactgatggagtagcaaaggcttcctaaaattgagcaatacagacctaggattgcatgggggaatatgacaagtcaagaccagttacattgttgcttaattcatcgataagaggccaagttctccacc

SEQ ID NO: 322799 - DNA, 327 bp, Homo Sapiens
  misc_feature (97)..(97): n is a, c, g, or t
ttaaaaaaattggatgtgaccttgttttgaatgttttgtattatacttgtttttgtgtgtgcataaattcattctgtaggatcttaagaaaaagagntcccagaatgttgcttctattattgtgcacaaccattgagaggtgttacaagaatgcagttaattttaacatgtgtgatgtgccatggtggaaaagtactatcggaataactctgcagtgacagaatttgaagtttggctagcatccatacttttctactgtaaatatttcactctcctctagctatccttgatgagcttctcactttaagaataaatgtgtttgatata

SEQ ID NO: 322800 - DNA, 905 bp, Homo Sapiens
ctggtataactattcttgttttatattttattatactggaacagctcgtgtcctctgtctcttgcctcggtgcctgggtggcttgccgcccacatctcccccctttttattaactagaatcgccatcgccatcattgcttgttgttgacttcggacttggtttcggactccttagaggcatctgcagactaaaaggagacaacataagcataccaatattaataatgccagtaacaacaatgatcctctgacgggtttgagccatttgaagggattaaaatcagggtaattgtttagttatgccttcaaaaatgtgtgagccagggaactgtgggataaatggggcttgtgaagcctccaaagatttgctctttaagttgtgaaatatccaaggttaagttatcatcccaggcttttaaatgtcttgagacattttcccagctatgttgatcttgattataagcataaggcgttatgcaataatcagaagtattccaatcacactgtaattgcatacggtgttgcaagttcataactctatctcccagccaggttacactttggcggagatcattaatctgattagctaatttttgatcaatttgcgcctgagaattccaaagtctggaggaatttttctggcatgcttcaacatagtgagcagtttgaacagaactgcggatggcaactccagcagttgctgctgttgcagtaaccgcaagtagtcctgcaaggactgcaataagagtaaaaataaatctctttgttcttttgaggatgtctttaagaacttcattgactatgtgaatagagggggaagactcccatggacgatgtagagaaactggtatccataccccctccctagcccttaccaagagaatacttgtagtgtgattaaaagt

SEQ ID NO: 322801 - DNA, 1467 bp, Homo Sapiens
  misc_feature (136)..(136): n is a, c, g, or t
acggaccagtgggacccccccaggggaaggcctcgggaggggctagggctacaccaggacgggctcccagtgcccaaggtccagaaacaggatctgtctgtcggtgccagttccgttttcaacggctacagccaanggtgtctggtttgtagcggccgaagatgggttttctcaggacatgggctgccttgggtgtccagcgaggcgtcagctcctgcccgtccagcagcacgaaggcctctgagcccacaagaagcacatctgcaccggcgttccctgggacatgcatcaggtagcgcactgctccagagctgtgggaaagcatcctgcgggtggtggcattgagcatgctctcccagtgcgggtcactcttgaacgggccgccgctcccggtcaccttctcgtagagacccttcacagagcagccgcagagggagcttgcgccagggaaaagaggatgtagtgggcacctgtcctggtggcgtgaagggaggaagccacttttccccgtccacaccaaggctgcctctgaggccaatctggtgcccggtgctgccggagtagaggtggccactaacctcctcccgctcctgggtgagaaccagcaggtctggggccccatcgccgtccacatcaggcacctgcagcagagggctcaggatggacgcattcccgctgaagctgctgctgtggttccacagggtttcccctgtgaacaagttgactgcaatgaaagaactgggtctgcccaccaggatgcaggcagaaggtgcctcactgcctcttggctggggcacagcacactccacgagggccacgtcttgggccacaggtctctcccagagcgtgctgccgttggcccccgacacagcaagctgcaaaggtgcagggagaggaaaagccttcgtccacacaggatcggctgaaattgttgctgctgttggtgtttttataaagaaaaagaacatcttggatcctgtccccgtttatatcatccacagccagaaagtcatagataacagcggcactgtagtctatcctccacattcgctgtgacgccggccggtctggacacgggatgacgaatgagacgacgaacaccacaaaaaggcagagaaacaatgaaagaaaaaaacgccgccgctcggcaccgggagagccgggactgtggaggcgcgcttttcacattatcctcattttttgatggatttcccagattttcctgcgattttctttcttcatttttcaaggggtggatttcggcctctaagtccttgtggtccaacatcacgggcacatcccaaagtttaactcctggtcactggtcgtgggagtgcccggaggacgtcctcgatgtggactcctgctggtgcatctggtcgtgagctgtggacggggaatctgtgccttcgcaagcccaggggacctgccgcccctcgtgccgaattcgccacccaggcctcgctt

SEQ ID NO: 322802 - DNA, 1209 bp, Homo Sapiens
cacagttatttaatgtggtttactatataaaaacatcagttacacttcaggcttcataatatttttcaaatttccacttttgatatggcttcactgggtcacaggcagctactttcaggatcttttgagaaaaatttccttccaagcataataattgctgattgttttcaaaaacaatgtgattcaccagttctggatgaaagactgatgttgatttatgcagccattttagccctttgtttctgttatcacaagggtgcagccttacggctcctttatcagggatgggggctatacaccattctccacatttaataagtcttaaccaggtgtaattaaattgttgaagctctttgctcccatcgcagtcttccagaatgactgtagtgttttcaatggaaatgcatttacccaaagccacattaataagcacaccactagctctcacaatgggagcccttaagtcaggaaagacattctccaagtaccatttgaaacttttgcacttcagtttctttcgcagctccctttgctgggtgaggttgccaacatctagcccttggtcgatgaggtggtctccgtggccatagaacagctccttatactcatccagccagacctcggcaacccgcaccaagttccgctccactgtcttcatccggtctttggggaaggaatatggattgtcatttctgaatatatggcccactcgggagcagggaatgatctcaatttcaccaccacacatccacaccttgaatgagagctccatattttccccaccccaaacatcaaggccagggtcgtatgttccaagtttcaaaaaagtaacttttgtcaatagaaaacaatccaccagccatgacagggcaccttattgtatcagtttctttaattctgttttttgcaatgacatctggaggaattgttctccaaccaaagttcatgggccacacaaagatgcctctttgaaagttatccactgtcatgtaactcatatccttatcattgatgacttcgattactggacaggccactttctttctacttaaataaactctttccagaagaggttccaaccaaccaacgttacattccacatgagaatctaaaaatgtcaacacatcacctgttgcattctgtgctcctgccagcctggcccttattaagccatgtctctcttgaggcgaagaatccgaactttggaaa

SEQ ID NO: 322803 - DNA, 658 bp, Homo Sapiens
ttgccgaggtctggctggatgagtataaggagctgttctatggccacggagaccacctcatcgaccaagggctagatgttggcaacctcacccagcaaagggagctgcgaaagaaactgaagtgcaaaagtttcaaatggtacttggagaatgtctttcctgacttaagggctcccattgtgagagctagtggtgtgcttcctttttcttcatccaagaaattctttaaaaatgtgaccattagttatcccgcccttttaggccaaattttttcagttcttcttgagagtggattataccatgctttctgtctggaaaatctcctgatagcaaaaacttactataatattcccccttgaaagtattcgggaaatccaggaaagctatgaaagacaagaaactagtcttaaaaaaatggttctgttttttacaaaattcaactgataaataagtatatgtgacctgtttttagataacgcactgtattataaaattgccatttttatgggtccaaatagaatggcagctactttaagtggctcaacctggtaacttatcagacattttggatttatatacactgttcaaataacaacatgtcaaatataactgtaaaataaatttacaatttttaatttcaaccgctgagcagaaaaaa

SEQ ID NO: 322804 - DNA, 1305 bp, Homo Sapiens
caaaacttcccaggcggccccccagggggggccacccgggacaggttccaccaggcgaggaggccgatggaaaaggcccttggcccggataaacggggatgaggtcccaacagggagttgggagggatggcggcagctgtgtgcggggaagtcccagagcacctccaggatgggtctggggggcccgttgcagtattcaaagagttcttcctggccctgggcagaactgaactccagcagcttctcccgctccagctcatggagggatagacagcccaggagttcgaagaaggagcggcgaggcacgctggcgatgtccaggtagtgggacacgaggtgccgcatggagcagggctggggcagcctcgtgggggaggagacatctggctcccgcggctgcagcatgaagagctggtcagggtccaggcccagcacctggcagaaccgctggacatgggcagccgagttggagggctgaatcagcaccacatcaccagcagcaaagctgatgccagagcccaagatgtcaaactcaatcagccgaacgtcctggaagtgggaggggccggtgactctctggttggagatcatgggtgctaggaagggcttcgactctgacgggggctcctgagagccggggtgagctacccgctgcccctcagagcccgtgctgggtgcctcttggaggaacagcagggtgaacttggagggcagggggactccgggagggatctcagtgaggcccggaggcggcgggtacagccccagaaccctgtcccacaagtttggcagccaggggtccacagcagggtcgggccccagctcatgctggtcatcgcccaggcacacgggcaggagggcgctgcccccaagctgcagtagccgtcggtgcagcttcttggccacgaagttgaacttggcgtatgaggagtccccgaggcccaggacggcaaagtccatctgacagagggcagtggagggcaggttcttccggaatataaacctccagaagttcttcatgttgtcaggggggtctccttggcctgtagttgcacaaacaaatatcaccaggggctcgttaatcagattcaccaccgggtaggagtccagggcctgcacccggcagccaagccgccggcgccgggcctcgcgacccagtctctccgacacatcctgagccgtgcctgtctggctgccgaagagcaccagaagctgcgggctcggcatcggggtgcgcccggtggtctggtctgagactaaaaactagaaggcagttcccgccggacgggttgcagggaccgctcc

SEQ ID NO: 322805 - DNA, 926 bp, Homo Sapiens
atttgggtagcccaggctttttcaggccagggccgcggggcataaatccaaggagttctcggtgggagcccatggttggggccaccacggggtggcaaaagggcccagggccttgggccccatggcagcccttccatagacgctggtggagtttcaaggaagcccctttcaccattgcagggaaaccccccaccaaggagcccagggctgggtctccccaggatccttggcagggtctcttcccctgagggccccctggtggcggactcccggaaatcaattaggtggctctcatttcgtcggatgtcatgtaccagcatcacgcccccaccgcccaggccagaactgtgtggagccacgatacccaaacacaaggctgctgccaccgctgcgtccacagaagatccctgtttactgagcacctcgatgcccagtgaagtgcagcgggcagcatcggtcaccacggcaccctgctggaagatctgggggtccccgaagtagatctgcatgaccagcgccacggtgacaccggtagcgaaggtgagacaggccgtgacgatgaccgtgagcccatcctggcggcaggagcactcggccgctgcggcggagaacgggtctttgcgcgtctcgcgtagcggcgacccgtcttggctgcccatctccgacgacgacgatggcagccgctgcagccgtgcagacttcaggaaggagtccgggtcggtgtcggggtctcccagaaaggcgtcctcgtccttgcggcccctcagcggggccgcgggcgccggctcgtcctcgggcagccgcgggaagctggtgatgctcatgtagtccactggcgagtaggcgcccagggcgctctcctggctggcctcgttctccgccgccatcctcgcccgcgccccccagcagcgcagcgcctgccggaa

SEQ ID NO: 322806 - DNA, 1738 bp, Homo Sapiens
  misc_feature (346)..(346): n is a, c, g, or t
tcccccctcccccttaaaatccattagccagttggaggatggccatttccaggcttagagagaccccaaaaatacttttgttcccactgagagccaaggttggaagttgcatcaggttactgcccccaagtgagcttcatctttggatggtgggctttggaggaacgagagaactggctcttggccactgtgaggggtacagctttgccactcaaatataccttattgtggcattcagggagccagggtccagagctgcagggctgcggtccctgctcactttccaccatagccatcacataacctgtcataaaggcatcaaaaccagcccggtgcaatccatccncaggcactgggttaggactggcttggctccctggcacttctgaggtagctctatcagctatttcaggccttgctgccttaatccccatctctaagtcatttttgttgccttgcttggagtgaggcaggttcctagtttcatcggcagccacctcctgctcggtttcttcaggcttgatgctatccccacagacctgcttcttgggaggaccatccttagtttccccagaggtttgtgttcccggtaggttcaataaagccctcttccgtttttccctacgtcgtcgccgtcgccggttttcttttgccgcagcttcatcagtgtcaatgataaggtcaatatcgtgagactgaggacactgtggtctcagggggcaccagccataagccgagaagttgtcacagatgctggtgggatgaggacgtggggttgctgggggcaggcagcagcggtaatcaatatggtccctcatgctggaaggatagttgcagaactccagggtaaggtgtgggctgccagctgcccgctgcttcccattttccgtttcacatttccggaaggcatattctaagtaggaggccacgaaacgggcatgaaactcagcagcatatttggtgtcataaatgcctgctgggaacatctcacacaggtcagcggtgaaggttcccagactctcagggaggtgtgcatagaagttctggtacaggaacaccaagtctataaggccattgtgtagcaccaggggccggcgggctcggattagctccaggaatagggtccgtactgactggctctggctctcatcacccttgtcattgcccttatggtaggggatgccttgggcatactgctggttgaagttgaagccatgctgtatcaggaactgcacagactttggttctatgacatactcctccatgcacagcagagtgagattgaacacttgagccagatagaaatgttcacccttgtctggctgccgcttgaagcaggcgaggcccagggaaaggatagaacgggtcctggcagcatgacacacggccttgtaacgttcctcaatgcactggttcagcaaactcttcctgtccccaagcccactcagctccgtgtccacagccacgaaattagctgtctttatggctagcaggagggatggccacatctccttgaagttgttgctttgcacatccactacgggaacctggactactagctcctccccagatgttgtgcttttgctgacaccacctctgggaagccgctcaccgtcggaagctgcgggagctgaaactgcgccatcgtcactgtcggcggccatgacaccgctcgtctcccgcctgagtcgtctgtgggtacgctggacttgcggtccgtctcctggcgcggttcccc

SEQ ID NO: 322807 - DNA, 1028 bp, Homo Sapiens
  misc_feature (978)..(978): n is a, c, g, or t
gggggcgacccgacggcgagaccccgccccatccccgactgcctgaaccgcgccaggagacggaccgcaagtccagcgtacccacagacgactcaggcgggagacgagcggtgtcatggtcgccgacagtgacgatggcgcagtttcagctcccgcagcttccgacggtggtgtcagcaaaagcacaacatctggggaggagctagtagtccaggttcccgtagtggatgtgcaaagcaacaacttcaaggagatgtggccatccctcctgctagccataaagacagctaatttcgtggctgtggacacggagctgagtgggcttggggacaggaagagtttgctgaaccagtgcattgaggaacgttacaaggccgtgtgtcatgctgccaggacccgttctatcctttccctgggcctcgcctgcttcaagcggcagccagacaagggtgaacattcctatctggctcaagtgttcaatctcactctgctgtgcatggaggagtatgtcatagaaccaaagtctgtgcagttcctgatacagcatggcttcaacttcaaccagcagtatgcccaaggcatcccctaccataagggcaatgacaagggtgatgagagccagagccagtcagtacggaccctattcctggagctaatccgagcccgccggccccctggtgctacacaatggccttatagacttgggtgttcctggtaccagaacttctatgcacacctccctgagagtctgggaaccttcaccgctgacctgtgtgagatgttccccagcagcatttatgacaccaaatatggctgcctgagtttcatgccccgttttcgtggccctcctaccttagaatatgcccttcccggaaaatgtggaacggggaaaaatggggaaaccagccggggcagcctgggcaacccccccacctttaacccctgggaggttcttggcaagttattctccttccaagncaatggaggggcaaacccttatttggaattaacccgccttggccttgcct

SEQ ID NO: 322808 - DNA, 843 bp, Homo Sapiens
ggagggttaaatgggtggggaaaagggggtggaggtggtccctttccatgctcatggggagacatagacatggacacgatgccaggcattgctgagaacacctcgcaggttccagattggggccacggtgtctggctgcaacattgtaaccatcatccacagccttaacaaacaatgttcagttccttttgtccagctggcacaggggctttcaactgccacagacgccatgcccaggctttcctggggcgctgttcctctccatccagcttagccacctgccaggttaggcccccatccagagacacatccacccggatcacagccctgccaccacgactccatgcatagcccttgatggtcacctcccctgattctacagtctctccatcccggggctctgtgatggcggactggacaggaagttcctgaatggatggagcagagtcaaaatctacagtctcccagtccacagatggagagaagcctttgtaatcccgccgttgccagtggctgtaactttcctctggctgcacactcactctgcccagccatttgacatggcgggcacccaccactccaggaaccaccacacgcacagggaagccgtggtcacgtggcagaggctgcccattcatctcatatgccagcaggacctcagcttcagggtccatggcccgagccagagggatggatgctccataggcagtcccagtagggtctgagtccagtccctcaaagcagacgtgggcctcagtttcacagagttggtggccagcctgggctaacacatcacagagccgtgccccagcccagcgtgcagtgctgatggctcctgttctc

SEQ ID NO: 322809 - DNA, 1015 bp, Homo Sapiens
  misc_feature (435)..(448): n is a, c, g, or t
ccctcgcctcccgtctttggcgggatattttggtgggggtgctcggtcttattgtaaggcgaagcaagccactccgctagtggcgggtaccaagttcttcctgtttgtttttaaacaaaataggatcccctatatccccctcaaagggttgaccgccccggggtggttatttccccggcccctcttgagttgtgttgggtgccctagtttcaaatttcggccccccctattttttcctggccccccaggggtttttaggaaggaggggcaccccccttcccctgtgcaaatgctgcagttccttagtcagtgtcagctgttttgtgtgagccagcgtgaggctccttttctgttctggagccagaggcagggcaaccagacaccttggaaggttcccctgaaccctgggcccaggcctcagaggtgattcaccgnnnnnnnnnnnnnnttgtggttggaggagcttggctcccgccgcgtctgggaggcagagactggctctagaatggatgaatgaatgatgagtgggcgagccccggctggcagggggcacattgtcactggatcagcgccacagctgggcagccctctccgccggtctcctctatgggggtggtgaacttctctctcctgcggcatcgtctccagaccaaaaagccagaaagcagccccagcacgaaggtcaggctcagagcgcccccaaggatgggccaaagcagccggaagggggcaggaggtgctgcagcgcagcccaggcagaagtcgctgtgcggtcgcgccctgcaagacgcgcagtccatgcacttgtccaggtccgcgctccaggagctgccgcgggagcagggggcggtgcctggcgcttgctccccggccacggagcgcagcaacgccagccagagccccagcacgaggagccgcagcaaccggcgcagcgagccccgagccatagtgcacgtcctgcgcccgccgctgtctgcgcccgccgccggccggcagggacccacggccgccgccc

SEQ ID NO: 322810 - DNA, 1471 bp, Homo Sapiens
  misc_feature (630)..(630): n is a, c, g, or t
cgtcgctgtctggttgcttgtttccttgtgcgtgttcttttcgttccccttttatgtttcgtgtttctgttgttttcggttgttctctgtatgcttcttgtttgggtgcgtacttgtccgtgtttctagttgcttcgcccgtgttctgtggtgcgtacgttgtttcccgtctgatatcggtcctgggagtgccggtcgctttcccttgtccggggccgctgtcttgtctgatcatcagtgcctcctcttgtctgtttcttgtggcttttattcctcctttgtcagcatcatgagtgcattcactggctagtgctgtgagaggtaggtcttggtttgtgctactctcaaggtttggtttgtggatcaggtacagggctctgtggtcaggaccctttggactcctcaagtctccgactcgtctgtctcttcagtggagccatcactctctccatccacttttcgggaatgatggagaggtctccagggagagccaacccggggaggggtccgggaaggcaggcaactggcctctggactggctgtgaccgagttgaccaggcctgggacctgggccagcagccgttccagctcttcatccattgctgggtcgtgcatcagatcccccttgtncagggcaaagctccggaggggcttggttgattccacggtgctttgagagaggccatgaggaatccatagaaggtcagtctctgaacattgctgagggcctctttgacaagtgctgggggtgggcagctgtacttgtgccgatcacacaggttttccagacactggtagaacagcgacgcctccacgccctccagcgtgccggccccgcccaaggcaggtcgttggcggtgctgcccactggacgacgtcggcacaatcactgtgttggggttcttgcctgacagcaggtcctcatagatggcagccacactgtccaggaattctgagtagtaaaactggatctggaaggcaaagaggaaatctgaaaaagacatcaagcagtccatggcatcgtccatgagcacaatcctggctgctttctgagtgagctccagcgggaaatcaggacacagtaattgcagcaaacagtgatattctttcatggtcagcaaatcgccatttttgcccacagttcggaagcatctccagaaggcccgtaaaaatgataccctattgtggggggtggcttggacgaagctgaattctcgaaagagaatgtgtgttccctggcatacactgttaaaatattcagtgaagaacctggcaattccatattggctaatatcttccctgttttctagcagctggcacactgcatcctccatgtaggtgaggacatgtcgctgagccagatactcgtagtccggtagggctaggcgctccggactcagcatcctttgaccggggtggcttcaaagctccagctctccggcttccggaacccaggttgccgtctctctcc

SEQ ID NO: 322811 - DNA, 990 bp, Homo Sapiens
  misc_feature (247)..(497): n is a, c, g, or t
ggggggagtaatactaggccgcacctactggggggtgtcccgcgcccagtttgtctccccctgtggtcctaaaaaaagttgggtctcatggaaaccccggctttggaccaaagttgcccaattacattaacctcttttgcccgcccccccgaacattaaaagctctggaatttttttggggtttgttgggtgcggggctataaggggttaatttatttgaaggaagtttccgttttgttggtccagnnnnnnnnnnnnnnnnnnnnnnnnnnnnnnnnnnnnnnnnnnnnnnnnnnnnnnnnnnnnnnnnnnnnnnnnnnnnnnnnnnnnnnnnnnnnnnnnnnnnnnnnnnnnnnnnnnnnnnnnnnnnnnnnnnnnnnnnnnnnnnnnnnnnnnnnnnnnnnnnnnnnnnnnnnnnnnnnnnnnnnnnnnnnnnnnnnnnnnnnnnnnnnnnnnnnnnnnnnnnnnnnnnnnnnnnnnnnnnnnnnnnnnnnnnncagccagtgtcctttttaaaggcccttagaaaagggggatgaggttacttcaggctgtgacccagttgctaattggcttctccttcctagtggctgcgagggcttggttgattccacggtgctttgagagagccatgaggaatccatagaaggtcagtctctgaacattgctgagggcctctttgacaagtgctgggggtgggcagctgtacttgtgccgatcacacaggttttccagacactggtagaacagcgacgcctccacgccctccagcgtgccggccccgcccaaggcaggtcgttggcggtgctgcccactggacgacgtcggcacaatcactgtgttggggttcttgcctgacagcaggtcctcatagatggcagccacactgtccaggaattctgagtagtaaaactggatctggaaggcaaagaggaaatctgaaaaagacatcaagccctcgtgccgaattcgccacccaggctcgctctt

SEQ ID NO: 322812 - DNA, 1412 bp, Homo Sapiens
  misc_feature (73)..(73): n is a, c, g, or t
  misc_feature (100)..(120): n is a, c, g, or t
  misc_feature (122)..(122): n is a, c, g, or t
  misc_feature (129)..(129): n is a, c, g, or t
  misc_feature (135)..(171): n is a, c, g, or t
  misc_feature (174)..(182): n is a, c, g, or t
  misc_feature (184)..(188): n is a, c, g, or t
  misc_feature (190)..(194): n is a, c, g, or t
  misc_feature (196)..(196): n is a, c, g, or t
  misc_feature (198)..(198): n is a, c, g, or t
  misc_feature (200)..(200): n is a, c, g, or t
  misc_feature (202)..(212): n is a, c, g, or t
  misc_feature (214)..(216): n is a, c, g, or t
  misc_feature (218)..(242): n is a, c, g, or t
  misc_feature (244)..(259): n is a, c, g, or t
  misc_feature (261)..(278): n is a, c, g, or t
  misc_feature (280)..(298): n is a, c, g, or t
  misc_feature (300)..(327): n is a, c, g, or t
  misc_feature (329)..(367): n is a, c, g, or t
gcctggcctcttcgggttcgcgttcttggtgtgttgtgctttctgcgcgtggcctcgccccctgcggccgcgngtggcggcgccgccccgcgcgcggtcnnnnnnnnnnnnnnnnnnnnncnccccccnttgcgnnnnnnnnnnnnnnnnnnnnnnnnnnnnnnnnnnnnngcnnnnnnnnncnnnnncnnnnncngncngnnnnnnnnnnntnnncnnnnnnnnnnnnnnnnnnnnnnnnncnnnnnnnnnnnnnnnncnnnnnnnnnnnnnnnnnngnnnnnnnnnnnnnnnnnnncnnnnnnnnnnnnnnnnnnnnnnnnnnnngnnnnnnnnnnnnnnnnnnnnnnnnnnnnnnnnnnnnnnngggagatcgggtcacagttcaggtcagcactgttgagttccaagaggacccgattcctcattttttccggatatgcacaggtgagccggtctttgccctgcactacctctgtttccttgagccaggtcaccatgtctgcccatgtggcagtcgcagaccccagggattgttgtccaggaaaaaccctaatgtggggtagaccttgcaactcaggcagggtgccattgtgaaggaccttgaggggcattgtcctccaggtggaggctttctagatgtgtcaggttgcggaaggacacgtaggtcaggctcaccagcgaattattacttaagtccaggtgcctgaggctgggcagttgggccagcacatcccgcggcaggtaaaggaagtggttgctggccagctccaagcggcggagcccctgcagtgcacggcccgccagcagggccgccaccaccatgccctcgaagctccggttctgccgctcatcttcagggggcacgatgtggttcaggatcagttccacaaggggactgggggccgagacgctggcattgctgcccgagaaagcgaagggactgaggtcggccagtgggttgtggctgaggtcgagctggcgcaggctgggcagatgctcgaaggcgcccgcgcgcacctcgtccaggcggctgccgctgaggttgagcgcggccagctccgccagcggcggccggcgggcgaaggcgccggcagggagcacggccagctggttgccggtaaggaagaggttgcgcacgtaggcgggcaggtccgtgggcacctcggtcagattgcggttaacgcacttgactgtgcgcgctgcctcggagcactcgcacagcgcggggcactggtccggcagcgggggctgggcggacacggcggaagccaggaacggcgccgaggaggagaaggaggatgccgaggaggtgggagaagacgaggagacccagcccaggagtaccagcgctagtcgcgccagccgcagacgcccgtccccggcggcggggacccgggagcaccccccag

SEQ ID NO: 322813 - DNA, 1038 bp, Homo Sapiens
ttggccttctgtcgggtgtattactgctttccttgtctgttgtgtgtccgtttcctctgtctgtgcttgcttgtgtcctctacatctgggtgtctcttagcttgggctctttggttctccggtgctcccatatgttttctcttgggctaggtgcgcatttttccggccctccctatccctggtctttcgggtccccatctgggctcacgttccgggctggcccgtgtgcaccgggcccccccttgcattgcttgtgccccagtccgaacctgggttctgcctcgtgttcggtccccgggcttcttcgcgcgcagcgttctggaagccctcgacggatgggcagagagctgggcttggacctccgcagcttgtcttggggcccccagacgaacttgcagcggggccggaagtgctcccaggcgaagtgcaccagctggcggcgctggtgtcggcagcgcacggcgaacatgaagtagtccagggcactctgccgcacccccggcagctcccgccgcaccagcgtctcctccaggaagaagcggaccagcggcgcctggaagtgctcgaggcccagctcacccagcgacttgaggatgcgtgtgatgcggaggttgttgtggctgcgccagttcaggttctggaagcgcttctggtagttctgtgctcggcccaccgtgcccgtgcctcggtcctccagccggatcccgtagaagcccagcatgagctcgtaggcccggacaagccgctcctggatctcctgggagcttttaaacacctcgacctccctgagcgtgaggggcttggcatgccagttcactcctggttctcgcagaggaaacagccactggatgtaggagtgattgtcctcaaggaggtcatagttgtccgtccagttctgaagaatgtcctcaatgaaacagccgttgggcaggaagcggatctcatttctgtagaaactcaggtttggcgtgtccccattgcagtctcgttccaccgacgcgtgggtcgacgatatccccggattcgcggaccgtacca

SEQ ID NO: 322814 - DNA, 1044 bp, Homo Sapiens
ggtactgggggcggggtggggctcaacgggtggatgggtgaagcacgggcggggtggatggagggaagatagtttggaactggccttgtggaggcggtgctacggggggagggtatgagcgtgggtcaatactggtgtggtggcgttggccatgcggtagcggccgggggcctgcacacatacaggggggggtggtattacgggggcgacccggtaacgacagggcagttggggggagtctcgatcggtgggggctcgtaataaaagggctcaaaagtgtgcagttgggcggggccgtccggttgcgtgcgaggggaggtacggggcgtgggcgtcggggcagagcgcgcagggggaaggggaaggcactatcgttacgggcacatttttcaggtagaggccgggaagcggggcactgattggcttcgggaaagttggtgcgcaggccctcgaacataggctttggcgaggcagcggtaggtgtccgcatcaccaggcctggcagcctctagccgtagccggtatgttctggatgccaccttctccatggcaatgtgtggtccctcataggcagggcccaggctgcccacaccctctgtgtccagctgggctaccaggcggccgggcccaggtgcccccgcaggtgccatctcccaacctacagagtatgcagcatgacggcctgctgggggaagtgcccctgacacattgcacagcagttccaagggctcccctgggccgatccgacgttcaccaggccccactgtcactgccagctggctggacagcgtctgcacatccacgtgggccaggacggcccttttctctgcaatctgggcccagctgccatcaggatcctgaatccactcagcggcagtgcagtggtaggtgcctgcgtcccctgcctgggcaccccctactaccatgcggtaccgatcggtccgttccttgcccagacgaagctcccctgcagccaatcgctcagcatagggagctccagcctccacggccaagtctgaccggattcccaccacttcctgcaga

SEQ ID NO: 322815 - DNA, 1318 bp, Homo Sapiens
  misc_feature (769)..(791): n is a, c, g, or t
agctgatacgtgaaatacatcaaggatgctatcattaaggctagtcggagcttgttcggtggtatctacgcttctgcttcatctgacgtcccgtcgctgatcttcttctttcgggggtaacaacacaaatcaaagaggctagtgaaaatcaaaaaagaagacccatcttgtgtaatccatgcgggctgcttgctgtttatctaccttatctcgcgggctcgcccctccctctcgccttggctgtcgctttaataagggggtaccacttggtcgcgtgtttcctgttccccccgggggggtttcgctcccctggggtttttcagcctaccactttccctttattggtgcaaccccagcccctgggtagaaaccatgtggtataaaagggaaggcacttcctggcacagcccttgaggccactggctccctggtgctcagagactgctgtccccccagagaaaccctgataaaaactgagaagcaaaaaggagagattaggtttcaggagagagaaactcaggaaggctggagcaggggcttgcagcttgggagctccccctgctgctatcaagtcagggctgcccagtttctgccctgccacctatcctctcacgcccaccaggcctggaccatgggcatctagtgacagcagctttaaggggctctgcccaggggtgcactggcctgagtggcccagaagcctcggcaggtgacagctaagaagacaaggctcttccccaccactctcagcgggaagatgctgaggggnnnnnnnnnnnnnnnnnnnnnnngtggaggggtgggctgagcctggtggtcaggaggcggcaatggcagtgccaccacccagcttaacaatcatctgctggcagtcgttgcaggagcgccggtcgcccaccttctccagggtgcgggcagcttcggccagcagcactgcccgctggcccggggaggagaggaaggagaggggcaggtggcggcaggccagcaggatggcggtggcccgctctcgctggccgggccaggcatccacctctccgtgcttggtgctctgcgtggtgcgccgccgcaggctgtgttccagcagctggtgggtgcgggtggggctggctcctgccatcaggcgcacggtggcttcatgcaggaacaccttgcggtatgctgggcggaagctgtgtgccagcctgcgcaggctgcccaggtcccgttggaagcccgccagttcagcgcctgacgcgtggtaggtctcccccacagcctggctggcactggcctgtttttgccagagcgctgtccgtagcgacagtagcaggtcaca

SEQ ID NO: 322816 - DNA, 1324 bp, Homo Sapiens
  misc_feature (35)..(35): n is a, c, g, or t
  misc_feature (42)..(42): n is a, c, g, or t
  misc_feature (66)..(66): n is a, c, g, or t
  misc_feature (176)..(176): n is a, c, g, or t
  misc_feature (192)..(192): n is a, c, g, or t
  misc_feature (209)..(210): n is a, c, g, or t
agggtggaggaaagaaactgagtgggctgcctgtncctggtncgggggatggatcaggcacccaanggttaggggaggggagccccatcacccatgtttagtaaaataataaaaccagtggttggacagagggaagaccccactgccctgggatgaggctgctctgaggcaagagngtgtacgtatcctacnctggcccaacacacgcnnacttcccccactgggctccttggcccgtgtcagcgaagggagcgcgggacggtgggggaggcggagcggtagcagcggtacccctccagtgccgctggcaggagcagcaggccgctcagggggtctttgcggcagcggcccatggcctccttgtagctcagccgttccttggagatggggtctgtcaaatccttctcgtagctggactcgtcctgcaggagctgggccagctcttcactgatcatcccggagaggagggcctgctggatggggatgcggcctgtcctcttggggtcgatgagccccccggtcaggtgctgcacctgcaggtgtgggagcacgctctcccggggcatccagcccttctggacggcctcgcccaccgagagcctcttcttggtgacggggtcctcgatgccggtgaaggccttctgggcgttaagcagcctctgtgtggaggtgttctcgatcaggcccctctccatcgccttgtgcacagagtagcgctcacggctgagcaggtccacgatgccccctgtggccgcctgggcctccagtagcttctgcccagtgatggggtccagcatgttcttggccacggccgtcttgatgctgcacttgttgtctgtggttgtgtcatagatcccggcgatagggaagctgtcatcaccgagcccgagagagaagctgggagagaagaaactggtgctctggggggccggggaggcgagcggggacttggagatgatagagccgatggagagtgaggagcttggcttggtctccccagctacaagcagcgcaaactcggagatggacaggtggccgtccttgtacagatggtactcctccttagagatgcgccggcagcggaggcggcctcgatggagtactgcttcccgctcttgcggtccaggagcacagagtcctccccacagggccccgaggtggtgacctcctcccagtcacactcgagctcctgcagctgcaagtactggcccctgtcgatgcgacgcgtgggtcgacgatatcccggaattccgggccgtaccagccccttgcttgttttttttaaaccccaccggggtttcaattgttgtacataatggccctt

SEQ ID NO: 322817 - DNA, 1149 bp, Homo Sapiens
acggttcttccccatggcccattcagggggccccactgggcttttcccctcccctttagtacccccatcagcagcagcataaaaatctaacctttcattttgctgaaagcccctgcagatgacagtttccttcctatcatgtttgcagagctccaaggctgggggcgatgttgaggccgaagccagccacaggtgcttcagctgtgcctttcctggagagcggggtggccgcccccaggcacatttccttggcacacgggcttgcataacagactcttgtaccgccatctctagcacaagaccatggccacatctccccaaccactcagcccgcacagcgtgcaaaggtggggagttcactttaatggcattcctccaacgacttattgtaaaagaaacaaggcatctcgtcctgggtcgcaacacccagcagcatccgtttagaccaccaagggtaggctgcgccgggtgcacagggatcccgctgcggctcggcgaaagccggagtcctgggatccagagcagcccggggagccctggagtctggaaaggacacagcagtgggggcggcggcggcaactccagctctgagcccgttggcaccccgcacggtggccccagccagctggaggcaggctcaggagcggctcctgtccttgtggttccccacgatcatcttgctgtacagcttctgctgctcctccttgaacgtgtccttcaccttctccctcttcaggcccccatcccacagcaggtccacaagtcctccctgcctggcaatggcagatttcaccctattcgcaaactggacagcatcttcatctgcctctctagtcatgggaggcaggtaccacacgctgcagacaatggcccagctggtcatcattcgcagcaggtacgtcaccatcccgtatttgctgctgttccagaaggcatcgccaaattgagggtcatacttgatagcaacagggtaaactgtggctccaatttcaaaacttccctttttgaacatcatcaccgatgtattattgatgcaggttccttctgggaagatgaggataggcagcttgcttttatcttgcacatgttcagtcagtctcttagccaccaggtggcgatccatcccgaaattccggaccggtccagcct

SEQ ID NO: 322818 - DNA, 1018 bp, Homo Sapiens
aaagcagagatccaaagggctgcctccatctgcctgccgcagcttgtggcccactcctcaatggctgcaaatgcctcctcagcatagcgataagtgacgaagccgtagttgtccccttggacacggaagtggatggtgcactcctcaatctctccaaaaacggagaacctctgtttcagctctgatcgagtcatgcggccaggtatctttccaatgaagaccacccttctttcttctattgcacgctccttttgtagcactctttgccctttggtaaatggtcatgtgaacgataagagctgtaccgccgcctcctgtcacttctccggcggggggatggggatcgtgagcggcttcgagaactggatgatgaggatgaggaagacgaagaggaagatgatgacgaagaagaggaagagcatcttcgagaacgtccagaggaactacagctggaccttcgccacctcttgtgtgggggggagagggacctggaccgagatcgggatgaggaagacgatgatgaggatgaggaagatgcttcgctagtccggttggacccagagctgacagaacggctgttgcggcctcggcggccctgccagccctggcttgaggggctggctgacctgcaggcttttcggtaacagcgcattgaccgctgcttggctgagggttcagggggagtcctagtgttcatgtcattccggcagggtgaggcctcaggggacagcaagctggatggggcaaggcagggtgctgagggatctgcctgctcactgctagtcctgtgatcaagcggctcccgggaggcagctatgcatgggggcggaggggcagctgggcccaaggacaagacaggtttgatggtgatgtcctgatggcgcttgacattccatcgggagcccacctctggaatgactagggcaggcatcttttttgggggggtcctgctccggacacaatagtcatggtcccccgacgcgtgggtcgacgatatcccgaacttccggaccgtacc

SEQ ID NO: 322819 - DNA, 1465 bp, Homo Sapiens
  misc_feature (582)..(582): n is a, c, g, or t
  misc_feature (948)..(948): n is a, c, g, or t
ttccaaaccccggggttgggaggccctttttcgtccgtttcctggggccaagccttgaccggagggagccagttgggtgagggttgccggtccccggggaagctgtccacagaaagctctgcaggtgtgaaagcccaaaagcagatgaggccaggaggctgatggtgaaggctgaaacttgagccggaaagcggagccaggaagttagtgctgggtctttcttgggaaatggactggaggttttttcccggttgccatagccctgatggagctatgggggggcttccccgagcagagagattgctgagcagaggttagcaaaagcaggacagccccaggatgtcggtggtactcaggagtggcggcagctggaccaggcaagaaaggaactggatgaccacaagagtcagctggcactgcagcaggaagaggaagcacttacggatgccataggtggcatgccgagcctgttcgataagccggatgatgctgatggtctcctcctggcgaaaggtcagggaacagggcaggctgttgagctgccctgacagctgcaggggagaaaggccatccgaggcctgnggccatgctgatgctggtggcgtagccaaaggtctcccaggagcaacgggatgggtacaggggatccagggcaatgctgatgtcgctctggaggaagaggcagctgttccgcaggttggcagagctgcccaggcagcaggtcacctccccgtactcttgcatgatctttatcatctcacacatggtctctggggtgcagtcggtgaaaaggggcactagcaggggcacgttgtcaatgttctgcaggtggggccgcacttggtggataccccggggcagcttggcccggttggagtcctccaggaagctggggatgtcgctgtccgtaggctggaagctgatgaggtccgagtggccctcctcctnccatgaggaggagcccttctgcatcatctcgggacacctgattcaggtcatcatgcagggagcctgcgtggctggggctggagggggggatctcggagccaggcatgtcaccattgggtgtgagggagatgtggcagttccagcctgtctccaggcccattttttctgcaaacaccttgcttttgagctcatcctccaaagagaagtagacaaagcggatgcaggcgttgacaagcccatcaatgaggcgcacgatgtccagccgggcctggtactgggaggacaccatgcccatgaagatctggccgctcagggcctgcatgcagtcttccttctccagcacctccccgatcccttcgtcagagctccagctgctgcggcgggcgttctgcttgatggggatggtgctgggcagctcgcacatggtgaagatgctgctttggccgggcacctgtaccagctcgatgcacttgccattgagctgagaggacagggcgcagttcatgggcttgtaggc

SEQ ID NO: 322820 - DNA, 1104 bp, Homo Sapiens
  misc_feature (1079)..(1079): n is a, c, g, or t
gcgcgggccagacgcgcccttaccgccgcgatggcgctgttggccggcgggctctccagagggctgggctcccacccggccgccgcaggccgggacgcggtcgtcttcgtgtggcttctgcttagcacctggtgcacagctcctgccagggccatccaggtgaccgtgtccaacccctaccacgtggtgatcctcttccagcctgtgaccctgccctgtacctaccagatgacctcgacccccacgcaacccatcgtcatctggaagtacaagtctttctgccgggaccgcatcgccgatgccttctccccggccagcgtcgacaaccagctcaatgcccagctggcagccgggaacccaggctacaacccctacgtcgagtgccaggacagcgtgcgcaccgtcagggtcgtggccaccaagcagggcaacgctgtgaccctgggagattactaccagggcccggaggattaccatcacccggaaatgctgacctgacctttgaccagacggcgtggggggacagtggtgtgtattactgctccgtggtctcagcccaggacctccaggggaacaatgaggcctacgcagagctcatcgtccttgtgtatgccgccggcaaagcagccacctcaggtgttcccagcatttatgcccccagcacctatgcccacctgtctcccgccaagaccccacccccaccagctatgattcccatgggccctgcctacaacgggtaccctggaggataccctggagacgttgacaggagtagctcagctggtggccaaggctcctatgtacccctgcttcgggacacggacagcagtgtggcctctgaagtccgcagtggctacaggattcaggccagccagcaggacgactccatgcgggtcctgtactacatggagaaggagctggccaacttcgacccttctcgacctggcccccccagtggccgtgtgggagcgggccatgaatgaagtcacctcccctcaccgaggacgactggggatctcgggccctcccgggggccctgcccttacccccgaatccggaatgaaagaattgggggtggnccacttcccccccgggaagtcccag

SEQ ID NO: 322821 - DNA, 1078 bp, Homo Sapiens
  misc_feature (270)..(304): n is a, c, g, or t
ccggttttgcggggggggaggttttcgcgcacgaggacgtggggggaaaaatttcggcggggcgggaggtggcgtatcggggcgcgccacaagaggagttgttatccgccgcaaggcgggcgacagcatgtcgggtgagagggactctttggggggccgcgataatttttttctcgtgcgcgcgcggtttatttgcgtggggaggggtcctggtgtgccctggtatttgggaacggggtttttgggacgggggtaaagtttctctccaannnnnnnnnnnnnnnnnnnnnnnnnnnnnnnnnnnttcgtggtccctcccagccccccgccctgcctgcttccctgggcggggctccctggtcccatcccctggggactccggggggagtggccaccccactcctcatcccggatcggggtgagggcagggccccgggaaggccgagatcgccagtcgtcctcgtggagggaggtgacttcactcatggcccgctccacacggccactgggggggccaggtcgagaagggtcgaagttggccagctccttctccatgtagtacaggacccgcatggagtcgtcctgctggctggcctgaatcctgtagccactgcggacagaggccacactgctgtccgtgtcccgaagcaggggtacataggagccttggccaccagctgagctactcctgtcaacgtctccagggtatcctccagggtacccgttgtaggcagggcccatgggaatcatagctggtgggggtggggtcttggcgggagacaggtgggcataggtgctgggggcataaatgctgggaacacctgaggtggctgctttgccggcggcatacagggcctcggggcagcagcacttgtctgggcagcaggggcacctgacgtagcagcagcaagtgtgcgggcagcactggcaccagcagatgcccaggaggaggaagatgaggaaggcagccaggcataccacaaccacgaagagccagtcaaggacgatgagctctgcgtaggcctcattgttcccctggaggtcctggagagcccgccggccaacagcgccatcgcgg

SEQ ID NO: 322822 - DNA, 924 bp, Homo Sapiens
  misc_feature (144)..(144): n is a, c, g, or t
ccttggtggtgttttagggtggggtgttcaaagaaccatttctttttaaaaaagttaaagtcatattttagggaggggaaaggaagggaacccatattgccctttcttttggaaagggaaaaaccccatctcgggatggattgnactttagacaggccttccccctctgccgaagaccacgaggcatttttcaagtaaggtataaagaactaaactctggcagacactgtggaagccccacgccttatctttagaaagtccattgtatgctcctcacacacggcagacggcttctgtgcgctgcaaagcactacatgctcacaaagaaattctaaatggctttcagaacacagtactatggctctaggggacgggtgcgggtggggactgaaaggtgaaatgatttagaggaagccatgttgtcactttttccatgagccacgtagtacagagaacgcggcactccataaggaccatttgtcctgcagtgtgggatgcattttaataaaatgattacactattttgtttcaattatatctttcccagtgctgaatctcttgcgtgacatggtcccaaggttcactaataaagcgttttctgtgaggaaggtagttttgctttagatgagaggcagccctgctgccctgactactggcacggaggcttagtaggtgtctttagcctgacagcagggaccctcatctgtaacttgggctgctggcttgggctgtcggagctggcgggcacctgggctgggttgggagcgcctggagtctggagcggggccgacgccgtggtcaccacctgctgctgaatgagtttctgctgaaccacctgggcagtcgcggtcactgcagggatcatctgcacctgctgcccggccgccgtcgcctgcgtgagcgccacagtctgtggagaagcct

SEQ ID NO: 322823 - DNA, 1506 bp, Homo Sapiens
  misc_feature (48)..(48): n is a, c, g, or t
  misc_feature (51)..(51): n is a, c, g, or t
  misc_feature (149)..(149): n is a, c, g, or t
tgccataactgatttttagtatacaaaaaacctaatataacctaattnccnggaccaaataatgtaaaataggccaaaatcaagccacagcacaaaggatactattggatatggacctttttgctttggtgaaaacttcaaagtaaggngacactgtcaatcaattccactaaaattgcatttattttcctgtcatagtaaaaaaaggaaaaacagtagcaaatactgggcttcgttttccccctcaacggcacgccttccacaacagcacaggtggttctctgcttcactggcagaaccacacaagcttatcctagagaaaatctgctgtcgtaagtccacaaggaagagttgactgggcccaccgctatagccaatacttccagaatcaccagcccaccttcgtcaaagggctgactgtggcagcaaggggtgtctgtcacattcgtcctggctcactgagcccaggcctcatcgtaccctcagctgtgacatctgtactaccattgcctctgcgtggtcctctgggcctcacgccagccatggcagagtgtcccaaaggttctcaggagctgtttaacacactatgtcaaataccagcttcccccgaaaactggagatgcgtcttgagtgcactgagttgggcatcagtcccagaagttttccattaaatgaaagcgaatcccattgcagggtagggcctgggggaggccactgttggctgctctttggaataacaatgcaatgactgatcatttcccttgaacacaggccaggaacgtgccttgtgtgtttaggtgggtgtcagaacatttctcttaaaagttaagttatattttaggagggaaggaaggaaccatattgcctttctttggaatggaaaacccatctcggatgattgactttagacaggccttcccctctgcgaagaccacgaggcatttttcagtaaggtataaagaactaaactctggcagacactgtggaagcccacgccttatctttagaaagtccattgtatgctcctcacacacggcagacggcttctgtggcgtgcaaagcactacatgctcacaaagaaattctaaatggctttcagaacacagtactatggctctaggggacgggtgcgggtggggactgaaaggtgaaatgatttagaggaagccatgttgtcactttttccatgagccacgtagtacagagaacgcggcactccataaggaccatttgtcctgcagtgtgggatgcattttaataaaatgattacactattttgtttcaattatatctttccccagtgctgaatctcttgcgtgacatggtcccaaggttcactaataaagcgttttctgtgaggaaggtagttttgctttagatgagaggcagccctgctgccctgactactggcacggaggcttagtaggtgtctttagcctgacagcagggaccctcatctgtaacttgggctgctggcttgggctgtcggagctggcgggcacctgg

SEQ ID NO: 322824 - DNA, 1240 bp, Homo Sapiens
  misc_feature (346)..(346): n is a, c, g, or t
cataaactgttgtcctgaaccatacggaagaggcacatcggaagacccttcaccaccatttcgctgatctctgagaaaataagcttctccttcatgatgctgacgtcccggctggtccggcgcaccgcagcactcaagcatgatctgctcagggttgtagctccgtatgccacccaggcgcccacttctggagcacgaagatgcccacgatgagggtgaaggagaccaggtcggcagtgacccacatgagaccagtactcgtccgggggcatgatccagaggggggaaggcacctgggacagggtgtgggagttgtcagaggtgacggatgggacctctcgcaccnaccacagcagggagaagagtccacggtgcgttgactgtgtagaggttccccactcaggttcccaggacgcgtagtcccctgagcttcctggcgggacacctgagtgtagcgccaggttcagccgctggatgtggcctctccgcaggctggcgactgcttccttggagcctgatgtctgttggaagccgggagccaccttccgcaccaggggcctctgcctgctaggcagccacatgacctggtgctgggggaagccggagtgcagcacggcctccagagtcacgttgataaaactgctgcggtaggggtgctcccggggcgggtcacgcaggttgagcagcagtgtggcattgcccttggccagctccaggagctctgccaggctgcagatggactggttctgggcctctctgtggtcggagggtgacagggagctggctgtccagaaggggtcagtcttcaggaaccactggccagcgttgagtctctgcagggtggtccagttaagcatggaggcaggcctgcgggccagctccgggaactcctcctccacgttggtggtgcgccgcagggtggtgtcatgcatgaggaagggcacgccgtccaggctgatggtaatgtcagcctggagcccgtacagcttctgctcgagggccttccggaaggacatgagcgtgtgctctggagccagcatgggggccccgcggtggccaatgagagcaggcttggggccgaggtctttcttctccatgatgcagggagaggagatggtgagaggggccaggtagagggcaaacaccacggtgaagaaggtacagagaatggtcacctgggaggaggtccgctctgcgcgggcgaactgtcctgcccctcgtgccgaaatcgccacccagg

SEQ ID NO: 322825 - DNA, 1469 bp, Homo Sapiens
  misc_feature (826)..(834): n is a, c, g, or t
  misc_feature (865)..(919): n is a, c, g, or t
  misc_feature (933)..(944): n is a, c, g, or t
  misc_feature (963)..(980): n is a, c, g, or t
  misc_feature (1008)..(1022): n is a, c, g, or t
  misc_feature (1056)..(1069): n is a, c, g, or t
  misc_feature (1128)..(1128): n is a, c, g, or t
  misc_feature (1154)..(1154): n is a, c, g, or t
  misc_feature (1166)..(1166): n is a, c, g, or t
  misc_feature (1201)..(1220): n is a, c, g, or t
  misc_feature (1256)..(1256): n is a, c, g, or t
  misc_feature (1416)..(1416): n is a, c, g, or t
ggctggaccggtccggacttcagggatgccgagagctaggctcattgtggagggggcgggcgtataggctgaggcaccgcccagagctcgctgagacagagactgagaacgcccccggccagattccccccggagagacccgggtagggacagggacagagagacgcctctacgggcagaggccctgggaggcaaagacccccaggagagatttacccaccccagacggaaagcgcggctcagagtcggacgaggggagactgtcagaggacaacgccccctaggtctcctgggagaccccgaagcgaccccgggggcagcccgggccgtgtccgggcgagggtgacctatccttggttgagagcgatggggacacaagccctgcagggcttcctctttctcctcttcctcccgctgctgcagccgcgtggggcctcggctgggagcctgcacagtccaggcctgtccgaatgcttccaggtgaatggggctgactaccgccggccaccagaaccgcactggcccgcgcggggcgggccgcccgtgcctcttctgggaccagacgcagcaacacagctacagcagcgccagcgacccccacggccgctgggggctgggcgcgcacaacttctgccgtaacccagacggtgacgtgcagccgtggtgctacgtggctgagacagaggagggcatctactgggcgctactgcgacatcccctcctgtcacatgccaggctacctgggatgctttgtggactcatggtgcacccccaggccctcagcgggcccaagaggaacctcccacaaaagttccccgggccccannnnnnnnnctaaacctttttttgcccccctttaaaaaannnnnnnnnnnnnnnnnnnnnnnnnnnnnnnnnnnnnnnnnnnnnnnnnnnnnnncgacccctctaatnnnnnnnnnnnncccccggtggggggggggnnnnnnnnnnnnnnnnnngggggagggagggtttgagtttattaannnnnnnnnnnnnnngagggggggagggggggctccttttatatatctnnnnnnnnnnnnnnaggattagtttctttcctgtcgcgcagcatagataaaagatatacacatgtagacgggntcccgagcaacaaacaaatataatanccctctccttcnctcgaaccggccgggcgcccggaccccgcgacctnnnnnnnnnnnnnnnnnnnnaatcgaagagccagcgcagcggcctcgcgccgggantagagaaagatgaagaaatcaaacaccacgcccccacccacatctttctcccctttgaatatacgagaagggaaagaagaacactccccacaaactactaacccgcacacgaacgaagacccaggggtggtggctgaacgtgctgtgcctgtaattactngaaaacaataaacccatgctataagaagatcgacaatctgaacaccaaaccaa

SEQ ID NO: 322826 - DNA, 1224 bp, Homo Sapiens
  misc_feature (310)..(310): n is a, c, g, or t
ctgagtatccattgtcctcccccctgtttccctgtcctgcccgctggccctgccatgggtctggacgataaaatactgggtagccttggggccgggtagaagctgtaagccatgggagaggcaggagaggtctagttgccaccccacgtggagttgtacgtgtgaagacactggctgaggaggcagggctgggtcggggccccagggtcagtggcagagctggcacttgaatccaggtctcctacctctggtgctttgtggggaactgggtggaggcaggatctgtggtagggtattgagggatgagggnagaaaaacgacctaattcaggttaggactggcaacggctccccaccctccctggggacagggattaataaaaattgacatcactgtaggaatatattttttaaaagcccacgttttgtgaaaagatgaattaaaaaacccaagacccagcattcgggattgaaagtgcccgtgatgggagttcaagtattgactgagctgggagggaaggggctagagcccccaatcagacatgggcaactagagtgtggggtgggggctcccagtttgtcccaaaccctctaggtcttgtctcgggtctggggggattcggggggttcagcagtggctcctaaagcagccaccggtgcctcctccatctccctgtcctcagacagtgtgggccccgggcagaacgtgtcccctcggcccgcccggccaagcacagccatccagcgtcgctgtagttcctctgtctcagggctgaagtaccagctgaggtggctctgggtgatcttgaagacatgccttctgtcaggccgctcccctgcctcgggcggtcccacctcgaagccaatgaggggcaggctgcgctgggctttcacatcctgaggggctccgtagatatacagcaccaagggttcattttcagggaccacgaaccatgccttgtgccatcctttgccacccttctccatgtagtgcaggaagctgcagatgacgctgttctctgcagccactgaggcctgtttctccaggatggacctccggcgctggggtgtatgctggctgcaggctggactgctcccaggcaccccgtgcaaggccacatagcaatcagtgcacacacggttggagcggttgttgtcatagacgaggcgggcccggaactcggagcacttcccacaaaccacatgcccgcaggccttcatcgca

SEQ ID NO: 322827 - DNA, 1700 bp, Homo Sapiens
atattgggggagagaaatgccccaggccccttagttccatggggcccagggagtttttcccttaggggaaaaccacggcttatggaccccaaggtttccacctttcgcgttacttggggggccccggcggggcccaaaacgaaaattgggttctagaaaaggcttctttcgaggggcccgagggcgggccgaccaatgttcccggctgctggggggccctttccgtttttggaatgagaaaacatttattccgtctccaaacagcatcccaggccgggcatctcccccacgattttataatacactcggcacagacagagtctgggagccatggggcacccctgccctccccaggcttcctaagtaacaactgcagaatatttacataaagctgggtgttgtcaggcaaagcccttccctgctgccaggggtgggagcaaggaggaagtgccatgagcaccagccccgccctcacaccacgggaggcagcccagaggccaccggcacagggtggtggcccccagatcatacagcagtgggcacaggggaagcaaacctgagtgaggacacaagagcctggtctggctccgctgcacagggcaggtgtgatggcccccacgagtctttggcagagaacgcagataatagcggctcccacggcctgacccgggccggggggaagctgaggcacttgtcagtagcacatgggcacctgctggcttctagccactgcaggcggggctgaggtcattaaaagcgaggaaaaaccttagcttaaaaaccttttcctaaaaagtggcctggaggagtgagcggctgactgaagccttctgggcacaggcacttggggtgtggctctgccagccccccgcccaggcttatgaggctccttagctgtgtgtcagctgcacaggatggaacaggtgaaagagaggggctggcagttccaggaggctcatgggaaagtccagggcagaggggagggccctctctgtcccccttcccacgttaaccgccgctcagtacacagggggcggctggtagccctcggtggtctccgcgttctgggtgaagggtggctgttggtagttgtccacagatgcacctgggtaggaggcgtaggcagtgttggggtccggagtggggtcaacgtaattctggatgaagtcgtccacgccagccttgtagcgctggtaggccagggaggccagcacaccccaggagaagatggaaaagaagctgaaggtgatggctgccctcacagagtcggcccccaccagcacgtccttcgggttggtgactgcccactggttggtgaggaagcagaaaccaacaaaccacaggaaggtccagagagctgagaagagcaggtcaccaatgaccaggtacttgcggtcagtggcgttgctgatctgggggaaatacgcgtcgaccaccaagaagaaggccgaggccaggaaggccagcaccccgatggcactgccatagcggcaggcatcctcgttgcggttgaacacgcagtacatctgcttagactcgtgggcattgctgtagccctcaccatagatgcaggagaacacgatcaaggcgaagaccaagcacacggcgcgcgccaccacctgcggctgcgtcaggaagcgccgcaggtcgaaggagccgcccgccttggccgcgccgtaggccccgctctccatgtcgcc

SEQ ID NO: 322828 - DNA, 410 bp, Homo Sapiens
  misc_feature (294)..(294): n is a, c, g, or t
  misc_feature (297)..(297): n is a, c, g, or t
  misc_feature (386)..(386): n is a, c, g, or t
  misc_feature (396)..(396): n is a, c, g, or t
tctgcttcctcaccaaccagtgggcagtcaccaacccgaagaccgtgctggtgggggccgactctgtgagggcagccatcaccttcagcttcttttccatcttctcctggggtgtgctggcctccctgggctaaccagcgctacaaggctggcgtggacgacttcatccagaattacgttgaccccactccggaccccaacactgcctacgcctcctacccaggtgcatctgtggacaactaccaacagccaccctttcacccagaacgtggagaccaccgagggcttaccagncgntcccctgtgtaattgaggcgggcggttaggttggggaagggggacagagaggggccttcccttttgcctgggattttcccatgagcttnttggaattgncagccctttttttg

SEQ ID NO: 322829 - DNA, 1448 bp, Homo Sapiens
  misc_feature (50)..(63): n is a, c, g, or t
ttttatggggcaaaaaaggggagccccctccgggtaagggggggttttgnnnnnnnnnnnnnnaggtcccgttccttgggccatggggcttcccccccattttttgaagccctggttttcaagagggggcccttaaaggggattcagacccagggggcttccaaggccgaatggttgaaatagattcgggacctggggcaggttcaagttgcgtgcgcagggcccttccccccggagagccatctgggcgctgagacgggcgtccatagtcatgctgaccagctggacctcaggctggtctgtgggaccagggcaatggtgacgttagcagtgccagagatgttggtgccagagggcttgatggtgcagccgcgtgggggccaggacccgcaagttcccagcttcaaatggggagtcaatcactgctgggctcagcaggacaatgctcccaaagtaggtggccctcagcagcatgtccaggtcgtggggcacctgttcccccaccagcaacagctgcagggcccccgcccggaagtagctctccatggcagagtcgaagaagaactcagagaaggccacatacaccatccgctcttcctcctgcagctggggctccactgcccggttggggaggctccagttcctctcagtcagggggaagaaggccccccggaagtccatgtccaggttgctggtggaagccacaggatccttcatgagggaatagtcaatgccaacaagctcgtccacagaactgcgcacaggcacggtgtccaggagggagttgagcaggaccgtccctgcgtggtagaggacagggcagatctgctggttgaggaggaagcgcatccctgaggtgatgaacgtggagagaaaatcatacaccttcttgaaggttcccccgaaggccgcgtgcattctggagacagaggcctggcaggagacattggacactttcatccgtccagcgggatcccgggagagctccagaccagtgcggatggacacaccctcagctgaggcgttgatgtagcccccatcatagaagaaccagtagagcagctgtctccggaagcgcagccccaaggaggcattggtgatttgaagcatcagctcctgctgtggctggaaatcgagctcggaagatgtcagttgcagctctgtgaccttcacctcagagatgttgtagtagaagtggccttctttgccccgcaggtccggaatggtgatagtctccagctcttgctccagaaagcgcagcccctcctgcttcaccagctccagcgccttggaggtgacgcggatcttgcagcctgggaactctgcatgtgcgcctgccagcagcgctaggaagagggccccgaagagggccatggcgagcgggctcagcggtggagctggggggcggcgcggtcacgtgggatggcaggcagctcaggggatccggg

SEQ ID NO: 322830 - DNA, 890 bp, Homo Sapiens
catggccaccggcctcatgatgtccctggtcaccgaggccatgaccatcgagggccgccacctcatgagcaccgtggccatgatggtcctggccacgggggagggggccaccgagggcacgatggaggccacagccatggaggagacatgtcaaaccgccctgtctgccgacatttcatgatgaagggcaactgccgctatgagaacaactgtgccttctaccacccgggtgtcaatgggccccccctgccctagggaccatttgcctgccctgttcacacaacccctgtggactgcagcctcgctctttccaccctgttatggcttctgtgaggcccattttcccttttccccagctgatgaggagccggccccctcagttcccacttgcttgggttcctgggggttttctgatcactggtgcgcattgatgtacatattttcctccagtctggggaggagagagactggaaacgttcctggactgctgaagaggagacccagttggcttcactttttgagaagattcgccctgtaccccaaacccctttccagtattacccttaatgcttgagaacctaaagctggttatcctggcgaacacccctacccttctattgcgggtccccacatgcacacagaactctgacacaggatcagctggcacttaaggaaatcatcccaggttaagttcattatttcctcatgggggtggggggagatgctggaaaggggtattgtatatcccactgcactgagagggctcaatcagctcggatttgagttctggaacacacatcaatcccagccctcccccagcgtggggctcaccattctttagtcctttctcaagtggggaccttcagcttttctgtgaaacacccagtctc

SEQ ID NO: 322831 - DNA, 1314 bp, Homo Sapiens
  misc_feature (123)..(189): n is a, c, g, or t
  misc_feature (243)..(315): n is a, c, g, or t
  misc_feature (362)..(400): n is a, c, g, or t
  misc_feature (409)..(426): n is a, c, g, or t
  misc_feature (1128)..(1174): n is a, c, g, or t
gggctccccttagaagaaccaggttttgggtattgtgccctcctggtggagcccagtttccctttgggaaaaggagttggtaagctctttgttccggcaaaaccaaccccccccttgttagcnnnnnnnnnnnnnnnnnnnnnnnnnnnnnnnnnnnnnnnnnnnnnnnnnnnnnnnnnnnnnnnnnnngatcacaaaaaaaagccccgctcatagggcgggttaaattccggggtactgcannnnnnnnnnnnnnnnnnnnnnnnnnnnnnnnnnnnnnnnnnnnnnnnnnnnnnnnnnnnnnnnnnnnnnnnnaccactttgtacaagaaagctgggtcaggaaacagctatgaccatgnnnnnnnnnnnnnnnnnnnnnnnnnnnnnnnnnnnnnnngcctcgagnnnnnnnnnnnnnnnnnngcaacaggctattttcttgaatgaatggattcataataagaacaggacttcaccagcttccaagggaccctccccacctctcggatatattctgaagcctaaatttcacctgcttatctaggatcctaggccaggccttctgccacaccaagccacaccaagctcagcagtactcacaggcctttaatctataactgcctggccacaccatcacttccccaggatggtggggagggatgaagatgtatagccaggtaggccacaccaactctgagtccaagagggaaggactggggtcaggctggggcttgggcaggggactcccggccccaggtgatgagggagttgctggcttgggcaagctcggcgatggacacccggccccgctgtcggatgaagttggccacggcggccagttcctctggggttatgtagatgaacttgccccggtcgtcaatcacacctgttatagtcccctcagccagcaggtcctggatgcgatttatggtgtcctgagtgcgtaggcccacctgggaagccaggtcttccaagagcacaaccttggactgcttgatgtagttgatgaactctgtcaggaagctctgggactgttcctcagtcatggtctctcctacgccttcctcctccaccacaaaggcctccttcagtttcaggtactcctcatgctcccgctgggcctgnnnnnnnnnnnnnnnnnnnnnnnnnnnnnnnnnnnnnnnnnnnnnnnggcgaagccgctcctcctccttcttccactcagcttcgcgctgggactcgagtcgtttccgctcctcacgttcagcctcctctgcctcacgctgggcctttcgcgcttgttctcccctcgtgccgaattcgccacccagg

SEQ ID NO: 322832 - DNA, 1128 bp, Homo Sapiens; identical to SEQ ID NO: 155044
  misc_feature (134)..(134): n is a, c, g, or t

SEQ ID NO: 322833 - DNA, 1526 bp, Homo Sapiens
  misc_feature (310)..(310): n is a, c, g, or t
  misc_feature (477)..(477): n is a, c, g, or t
atctttatttttttattaaaaaagaagtactttggtagctatttaaataagaggggggtgggaatgaatgtcgagatacggagcccctgcatcttttagttaattgtcagtggagtcagtggggtgctaagtgttctgaactgaagtaggtgcactaaggttccaagctccctgcaaggatctggacgggaggaaagcagaggccctgaagggaaaaaagcctgcttcccaatacttattttttattactgtacaaaaagcacactctccctctttttgtctctcccaccaacggcaccccccaaccccnaacccaagaggactatacatggagtgcagggacagagtgaccaggaggcctttgtccggcaccctgcccacaggctgagctcagccccaggccctttcaggcatctagacactcccatagcctgtcaggctggggcaaggagatcccaggtcacacatactccttgngaagagttggacttagggtaagagcggggtgcacggtacccagccttgctctcattcccaggacaggaacaggagagcagtgcacctcccaggatgactagggcagaccctgcccagccaattaaagatggcagggccaaaactcatacttaaatgttggtagggatcaaagggttataaaagtctgtgacaatctgatggccataccaggagcaagctaccaaggcggcaagacctgccacgatgaaaattatgcctccacccatggctatacgggccttcttcactttgtcgtctcccccacagcgcgtgcacttcatgcccatcgtggccacaaacatggccaggaagcccagcaccagggagaccaccattaggggctcgagtggcctgcaaggccgcggacagggcgagcaccgagtcgtacattttgcagctcatcatccccgtgctctgcgtgacgcagtccatccacagcccccttgtacatggcctgggccgtgatgatgttgtcacccgcataggagctcatctgccactgcgggatggcggtgcaggccaccagacccacccagcccagcagggccatggagaagcccagcaactgcaggcccgaattggccatttccgccctcagaaaacactgggggcgccgggcgggagaccctacagtaaaacaaacgacacttggggggcagccccacaaaagaaaacttgaggtggagttttccggtcacccaaagagacaaaaagggtttgggccaggtgaatgcaaatcttgtcaccaaactacacacaaatcgacccctccagtgaagcgatggcctcgcggcacagggagtaggatacgccgggagggtggttccagacaaaattggtggtccccgaaggccaggcggttccctccgggcgctctcggcgaccctaggcaaacaaaaggtggaggggccgtctgggcgcgtttctgagcgccggcaagtcccaaagtatcctgggctgtaggtccgaggctgcggtgcgcagcagaggtggctcggaggtgagccagc

SEQ ID NO: 322834 - DNA, 902 bp, Homo Sapiens
  misc_feature (209)..(209): n is a, c, g, or t
  misc_feature (227)..(227): n is a, c, g, or t
  misc_feature (267)..(267): n is a, c, g, or t
  misc_feature (489)..(489): n is a, c, g, or t
  misc_feature (538)..(809): n is a, c, g, or t
  misc_feature (818)..(832): n is a, c, g, or t
gtagttattcttggggggaatgtgggagaaaggcttactttccttgagatacttcttgtgactgggggacgttccccgaaggagctctgtggggcttctgttctctcaaattcctgccactaatccctgcctggcgatccccaaggtctggtttcctcaaaggctgccccatgggccttaataaaaattttaaatatactctcacacancacactatattctagagnaagaactattgtatccaaaatcctagatttgaataacttnattattttaaataatcagtaactaaaaccaagcaatccatcacacaaagaggggaaagggtaatattctgagttataaattttttaccctgtctgataaaaatagaagcctgaaagtttaaatttttcctggatttaaatttaaagataaatttgtttttcagtgaaatatcctcaatagcaattttaccaaagaggccttcttctgaaggccacctctganaataattagaggataaatgtcaatggcatgatattaagatattacttgnnnnnnnnnnnnnnnnnnnnnnnnnnnnnnnnnnnnnnnnnnnnnnnnnnnnnnnnnnnnnnnnnnnnnnnnnnnnnnnnnnnnnnnnnnnnnnnnnnnnnnnnnnnnnnnnnnnnnnnnnnnnnnnnnnnnnnnnnnnnnnnnnnnnnnnnnnnnnnnnnnnnnnnnnnnnnnnnnnnnnnnnnnnnnnnnnnnnnnnnnnnnnnnnnnnnnnnnnnnnnnnnnnnnnnnnnnnnnnnnnnnnnnnnnnnnnnnnnnnnnnnnnnnnnnnntccacctcnnnnnnnnnnnnnnngaaagatattattcaagaaaagaacttaggagccaggtgcagtggctcatgtctattatgccagtacttt

SEQ ID NO: 322835 - DNA, 1003 bp, Homo Sapiens
  misc_feature (34)..(34): n is a, c, g, or t
  misc_feature (49)..(49): n is a, c, g, or t
  misc_feature (61)..(61): n is a, c, g, or t
  misc_feature (89)..(89): n is a, c, g, or t
cctaagcctcccagcccaaaaaactgttgccagnaactctgccaaatgntaagagggggcnacatggaacctccagtggaacttagaanaacaagggaggaagcctggtgacccaagtcccacagtgttcttggaggagaagatgagggaagtggtttcaaggcaacacgtttttctgggctatatcattacaagagagcaggtgcaaaaggttactttggtttcctcaaagtagagaaagaaaatccagggaagaaacggtaaaaatcaaagcttcctgggagaaaattgtagcctagaaaagctcatcttttcccctgggggttcctgtattgcggcagagaggagggggtaggggaagggggtcctgtgtgagtgctgcaaggccatcgattgttcctgggagcttctccagaccttggctttcccccgtcacacgtttacccaaagaagaccagagtctggctccagggagccgaatgtgtaaaggacaggagtttacctgcccctcctcaaggtgtagggccccaagaacagcctctgaggtgtgtgcagtggggaagggttgggcgtaagagatgtcacctccagcatgggggtagcacgtggtcagatgcagagaggggtgctctctcggacactgcccagccttgccccacctagccgagtcacaattcggtatcagccaccacgtgttgtcttgctgaatggccgtttctggaggtggcctggccggtcccgttttcctgagcccctcggttcacactggcctttccctgagcctcaggggaggtcccaggtcctgagctatagccctggcctccaccgttttccgtgtaataagggtcttcgcccagcctttctcctgtggggctccagctgcggcgattcatcaggaaatagccagtgatgcccaagacagccagcagggctcccgaggtgaccagtgcaatcagggtcttttgggaatagctctggtggcttgcaacatcttgctcagtga

SEQ ID NO: 322836 - DNA, 1623 bp, Homo Sapiens
  misc_feature (116)..(116): n is a, c, g, or t
  misc_feature (235)..(235): n is a, c, g, or t
aaggtggaaaaaataggttcccaggggaaatgtggcaaccccagagggccggtaagttcccgctaccaaaactgtcccgcggcgtacagtggtgtatgatccacagttcccatccntcagatcccagacacagccatgtcaagtttcagtgctgatggccacacagctcagtgcagccccatgcccatacaggacctgcacaggctttggtgccaggcctactgacagaccaccntgatgcaggagccgccacaccatgcacgtggtgtcccgggagcctgagatgaggtagatgccacaggtgtccagtgcaaggcaggttactacatcaaggtggcagctgagctggctcaacagcttgccacggggtagtgcagtcacccgcaggctgccatcccagtggccaccgctgaatagcagctttccatccggggccactgccagtgcttgtccactcacaccactgcctggcacccacgggccactcagcagtcgctgcgtcttgtggctgcccatggtggggtctttgctgaagctgaagtagttgcttatgttgcggtcatagggcaaccagctgtgggtgcccagcagcccactggcactcacagtcaccaacaggtctggggaaccctgggtgatgaaggagtggggctgccggtgggggaccagggctagcaccaggggtacaccatcactgacaacctctgcgaagaatgccttgagttcgtccaggtgctggaagatgctaggtgagttagtgtccaggcgtgcaaggcgatgggctgcttcctcagctgagagccgagttggatgtggcttccttcagccagctgacagggagtctgcccaaaagttgctgataatgccctccagagccttccgttcccgctcatctgtcacatggtccaggtctacagccccctcataggtgcagtaatagaagacattgagggcctcctcggcggctggcccccgctgcttgtagccaaagatgaggtcgatccactcgtgtaggtgtgcagacacatactccgactccagagcctggcggtgctgctggatgaagtcctcaggagagctggcccacgggggtagcaccacatcgcctaccttctcgttggtcagctggagacagcccaggtcaaaaccgttctggttctccaggaagtcaggaaagtagaagaattccgggatgagctccttcacatcggcagggctctccaggcgtgcctgccaggctgccgccaccgagtggaactgccggtcggagcagtcaaagcggccactttgcagctggacgtgcagggaggtgaagggctccacgcggatgaggtagtgcatcacgcctgctgcattggagtagtgggtgccatagtggaacttgtcaatggtccctgctgggtcctcaaagctttcatacttctccctcacgagctgggcatgcttggggttcaccacaccgatgggcttagacaggtcccggaagacggctgggttgctgaggtccagggttggggacacgtagtcctgcaggacccaggggaactggccacccacccgagcaggggctgcatgagggccctgatggcctaccagcccaccctgccctgcccacaccctcaa

SEQ ID NO: 322837 - DNA, 1250 bp, Homo Sapiens
  misc_feature (219)..(219): n is a, c, g, or t
catttcacctctcattttcccggccccggggttgccgtgcgtcccgcgggatccacgcgttaccatggtgccctccttgcgggcccccctctcagccttccttcgcaagcctgggacggggcaacccagctggcccggatgatgcttgccactcggaggccccagacccagtgagcagacgctcgctcgcccatctccctagagtcccgctgtgcaggngacacccctgcccccagccccacggctctcagctgtccggttccagcgtccactccgacagccactgcaggcaggggccccgctgtgcctcagtctcagggggcttggttgggggtggaggaggccggccgggcccaggcaggagtgcggaggggctgcctggcctggggcccctatccttcggggtcagggtcgggggtggcccgtaaggcctgcacggggtggtccatcgactgcagcagtgtgtgggggctccatcaggcatccagggagggcaggaaggggtcaggcgtgcagacctccacacactcggtgtccgtggggatgcgcaggtagaaagcgtgcagcatcattctgaacggccggtcctcccggcccgagacttctccgtaggtcaggtcgcccaccacggggtggcccagggcactgcagtgcacgcgcagctggtgtgtccggcccgtgagcggcttcagcagcactttggagacaggatcgcctgcgtacagcccgtgttccagaaccacgagatctgtgaggcttggctttgggttctcacaacctgccacaccctgcgagccctcgatgcacatggtgtgggcccggccctccgtgctgttcctgccaatggcatggctgatggttacccggctctcctggatgtgcccccgcagctgcaggagagggagcaccgcacgcagttcacggggccgcccagtgctgccggggagcccaccaatgccaggtaagccttggccacgcgccgctccttgaagcacctgtccgcgctgccggcggctgccttgtttagcgccacgcacagcgccccgctggtggagaaatccagctggtggcagaacctgaacccgtagcaggtgtcagggtcggccagctcgggaaagcggtaccgcagctgcttctgcagggtcagagtctcccgccacgccttgctgtcaatgcgaacgtcccagtgcttgttgaccaccaggaagtcgcggctccggtacacgatggacaggttctccacgctgcct

SEQ ID NO: 322838 - DNA, 507 bp, Homo Sapiens
gggtcgccagcgcgcgggcgcgcggctggagccggcgccgggcacggcatcgggggcctggactgcacggcccggcagcaggccggttatggagcctggcagcgtggagaacctgtccatggtgtacgggatccgcgacttcctggtggtcaacaagcactgggacgttcgcattgttagcaaggcgtggcgggagactctgaccctgcagaagcagctgcggtaccgctttcccgagctggccgcccctgacacctgctacgggttcaggttctgccaccagctggatttctccaccagcggggcgctgtgcgtggccctaaacaaggcagccgccggcagcgcgtacaggtgcttcaaggagcggcgcgtgaccaaggcttacctggcattgctgcgggggcacatccaggagagccgggtgaccatcagccatgccattggcaggaacagcacggagggccgggcccacaccatgtgcatcgagggctcgcagggttgtgagaa

SEQ ID NO: 322839 - DNA, 923 bp, Homo Sapiens
agcggggagcccctctgtggggcctcgagggagccctgggtgaagctctctatatactgggccagcatctgcccctggtggctgttggctgcataggccttggctttctccagctgctccaccactttctggaggatgggcgcgtagtccccccgggtcacctggaaagggcttccccggaattcatagctcttcagcttggaagtcacctcagagtccagggaaggctctgagccaagcacagaagccagccgcacctcgtagtagggcttcccttctccatcgacctctttgaagagccgggtgttgtaggcactgaggttctgtgagtccagaaagtcctgggccaatttggcatcttccatggtacaattcccagagaaataggtggtgattccctccttccccagtccgaggtgtcgaagccttggctccagagagaacataagctccccgcaggtctgccagaggcccctgacttcttctgggtgctgctgagcagcctcactccctaggatcacccgttccagcttttccttgggcaagttgggaacaaacttggtgtcaccaaaggacttgtagttgcccatgttggagtaaacacccgcggcatagaccaggaacgcctggtactcctcctcggtaaggccttcagccagggcatgttggcgcagctggtcggggtcctgggcgcggaagaggcggctgagcagagcatagatgtagggggcctcaggggaggtctgaagcagcacagccaggcctccgtaccaggcggcacgggacaggtggtaggcatagaggcgctctgtgggtgacagcaggcggaaggcctcacggcagtccaggctagacacgccgatgtcattgggcaggatgtactgggtgtccgccatgggccctgctgcagcagctgctccgtt

SEQ ID NO: 322840 - DNA, 987 bp, Homo Sapiens
attcagaagaagagacgtacggtactcggccgaagaacctcgcatcggtgtgataggttgcgcaggtccggggtctatgttacagggtgttctcgggtgtatctacggtcgagacgggttggacgggctcattggtggacgcgggggggaacacatcgctatcgggggcaagagcaaggcggccccgatgtgtataccccggggaggcgggcaatctgtcacccgcttagtcgaggcacccgggggaaagtgggcacctggccataccccgggcacccggggtggcgaggcggtccaggggacgaggagtccacggtcggttctctggggccggagtccacgggatcgcaggttattacctgaataagtggggtgatttatcgttgttgccaggcccggtagaaatctgggagggtagggcaggtataggtaggtccggttcagactaggaatacatatcgcccatgggtccatccctgacatgggatcatcgggggagaatcgtcctcacctcgcgtacgctgcggtagcgcagccgcgtgatctggtgcaggcccgccaggcggcgcttgaggatctcggcgcacgtgacggttttggtggtggcccggccgcagccgctgaagacgatggcgcgcgtggctggctgcgccatgctggcggtggcgaaggccatcaggttccggatcttgctgccttccttgacccgcatgtgcaccgcgcccggcgccaggtctgcgaaggggccggagcccgggccgcctccctcggccccgcaccccgctggcgcctcttcggagcgcaccttacggaagttctccatgcgccgtcgtcgccgggaccgccggctttgccatggggcggcctcagccccggggctgcatggccgccggtcgcgccttgcaagggccagcaggggtaagggcgccggagcagcgcagacgccggcgggcgggctgggacggcgcgatctcggccccacttctc

SEQ ID NO: 322841 - DNA, 451 bp, Homo Sapiens
  misc_feature (268)..(268): n is a, c, g, or t
  misc_feature (278)..(278): n is a, c, g, or t
  misc_feature (338)..(338): n is a, c, g, or t
  misc_feature (353)..(353): n is a, c, g, or t
  misc_feature (365)..(365): n is a, c, g, or t
  misc_feature (399)..(399): n is a, c, g, or t
  misc_feature (415)..(415): n is a, c, g, or t
  misc_feature (420)..(420): n is a, c, g, or t
  misc_feature (438)..(438): n is a, c, g, or t
gacattgagaaggtgcagatccacttcgggggctccaccaaggccagcagccagataatccgcgagctgctgcacgaccagtccctgggttccccctgctacaaacgggtgacagatatggctgattacacctactcaactgtgccccggcgctgcggggagctcaacaccctcacctacccctaccaccgcagccgcctgcagcaccttccccggggcctgtatcctactgaagagatccagattgccatgaaggcatgatgaggtnggacatcttngggcctggggatggccacattttacaaggggacggatggacacaaggctgccagggattnctccgaaaagacagnttcagggacctnaaaggcggcaagtttccaggcaggcccaggggcnccacgtttcaacaggnccggncatttcttttaggcaggnaatttggcccagg

SEQ ID NO: 322842 - DNA, 1043 bp, Homo Sapiens
ttgttttgttttgagacagggtttcactctgtcactcaggctggagggcttctaggtcctctctgtactcaggatggagacccacctgagatgacaggaggaagtattgccgtggacctggtcctttctctggaagatccacctcagctgacagtggactatagacaggaatgctgacatcgtagccttgccggtaagtccacgtagaaaagccgccaccagccaacagggccctgtctctggggacatccagggctgtgttataatctgggggacctccaggcaacatgttgaacaacaggtgattcgtacctcgatcccacctagagagctgggccatcgcttgtgctgtctccttgatgcgcagtgtgttctggttaagcacatcgatggagggaacaaacagacaggcccggttgatgtcatcagtgtagtagtcactgtctgagatggccatgagcagttcattatactcccggggagatggtgttgcttgacagagacgcccaaagtcatcccacgtactttttcagagcatagatatacaccttgattttgttctttgggttgaagccacagcgatagacatcaaaacacgtgtcattctgcaactgagatccccccgctctgggatgggactggtcgctggcagcctaacaaccggcacatcacggatctgcgcttctctacattccagtcatttgaggactcgatagaatggggccaaaactgaaaccatccagtggcaatgaggcccaggaggacaatggagaagagggtgatatagtagattcggtgcttggtcttcattcttgggatgagggcaggaccccggatattatacttgaccgacgcacacataatgacacagacagcctcttcctcacactcctcggccacggctgcctcccgctcggccccgagcttggtcaccggctcatgccgcggggcgcgggccacctccgcccaggtcggatcggtccgaatcgccagccgccactgccagggccgagtctgggctggcgagcagcgagcgaggggcc

SEQ ID NO: 322843 - DNA, 1002 bp, Homo Sapiens
  misc_feature (103)..(122): n is a, c, g, or t
  misc_feature (237)..(245): n is a, c, g, or t
tggggtgcgtagctgggtagcagggtggcggaagcggggggaggggtggtgcggagatggctatcgccgtggcatcggaggggatggttcgcgcgccatttcnnnnnnnnnnnnnnnnnnnnccggcccagggcagttattatatccggggattgccccggaggcccctggcctcccggttgttgtcggtaggggatccaaaggtcggggagagagccccggggagggccaattctnnnnnnnnnggttcgcgtccagggggaccctcatcccacccgccgggggaaagggcccccccgtggtggagtttctctcctaggggccttgtcggttgtgtccggtgtgcgcatcccagcgtgcagcaggcccccctggggcccatgcttttttgccatcgcttgcaatatgggatatgtgattgtgtgatctccacccaaggtcagaggaatacagccagctgctacaattttctcataggcctcttgaattcgccggcagctgtcctgaaggttgtaaagattgacattcacatcgcctaggtctgcaaccatgagggactggaaggggagggcccccgtgctaggattgactgtccgaagcatcactgattcttcccggatgcggcgaggtccgaatctcgccccaggccggttggaggtcccagtatccaggggcaccccgatgaaggcagcgtccagcccctcgggggaggtctgcaccggcaggcgcatcatggagcagacgcccaccggccgggccacgaactcggggctggggggctggttccggggcgcatcggaagcctggcggctctggcggcgccccggatgaaagagccctgcggcaggacgcgcgcccacgccgggccccgggccccgggcgcacccggacgccagcagcctcagcattgccgcgcgcggccaagacctcaccgaccagaccgcccgcgaggccgccgcgatctggctggtcccgaacggcgaggcgagtgtgcacgcgcca

SEQ ID NO: 322844 - DNA, 951 bp, Homo Sapiens
ggggcccccccgggtgggattaatgccccccaggaggagggcccttggaattaaggaaaatggccggggaaaggtgtccgaggccaggtggcgtgggaccttgggttgctgtccctttcatggttcagctggggcgaaagcttggggaagttttcggttcccggatgccagcggggccatctccgcccatgcgcgcgggcaccacggacttgggccccggaaccgaagccagggggctggttctccaccactggccccgcatgcccacggtactgcctgtcagcttcttctcagcgctcaccacaaggatgagcacgcggagttcaggccagtgtgactcgggggccacttgccgagcgatgctgtccttcccgtcggcctgctctcccatctgccactccacaaagcccccatacaggctccggcaggcgctgcctgagccccggcgagccacttctgagaggtcactctccacgccgtagacacgggccagggtgtaggctaggcaggcatagcccgccgctgaggaggccaggcccgcagccgtggggaagttgttcaccgatgccacgtgcaccttgcagctgaggctggagggcagcgggtccccatcccgtgagttcctccgcttccgggccaggcagcggatctcccgcaggcaggcctgcagcctcggctgccccacatcctcctcccggccattcagccaaatccggtcctcggtgaagtccttgctgatgacggctgttgtggtggtttttaactggtcctggtgcagagtgacgctcagggaggagttgatgggcagaaccagctcttcatcgcgcttgccccagtacttgatgaccgcgatgttgaccggcgctgtacaagtgactgccgccagcggcttctccgaggccatggtcccaccgcgcagtgaccccagctccacagccacttacggcccgc

SEQ ID NO: 322845 - DNA, 870 bp, Homo Sapiens
ggggcccaggtggcgggcccctgaaagccagcatctcctgggatgcggacttgctgcaggaagggcaggcagctcgtagtggtgaaagaagtagatcatggaatgctggatgaagagccaggaggtgaccagggccaggctgctatactgcccattgaagcggtagtgataggcatagaaggcgaagtggtagagatagaagaaccgcagccaatgccgcttgctggtgctggtgtggcagcagatggcgtcatactggtccgcgagccacacgatgaggatgatgtagaaggcggtggtggtgtcgttgaagaactccgacatgatggcctccatcccgacgagggccaggatgacggtcagcaggggcgctgcggggaaggcgatggccatgttcatctccagcatctgcagcaggtccacgatgaagacgaagatctggtggtgtgagtaccgcagcagcatggacacgctcagcgtgaagatgaccatgatggcgaaggcggccaggtaggacgtccgcgccatccacatgctcacaaagcggtagtgctcgcccgacaccacattccgcaggaagcccttgttctcctcgttctcggccaggcccttcacgctggacatgaggatgtcatcgtagcccaggaactcatccagcagcaggcggctgaagcggtccccgaagcactggtcccgcgtggggtccagggtgaccaccatgacggggatgctcaggcgctggcgggtggcctgcgacaggcgaaggaagccatactctagtgagtactccacgatgtactcgtcctgcggccacactttggtgggcgtctcggggaaggggaactcctggctgtcattcagggcctctgg

SEQ ID NO: 322846 - DNA, 996 bp, Homo Sapiens
  misc_feature (27)..(27): n is a, c, g, or t
  misc_feature (68)..(70): n is a, c, g, or t
  misc_feature (74)..(75): n is a, c, g, or t
  misc_feature (84)..(84): n is a, c, g, or t
  misc_feature (87)..(87): n is a, c, g, or t
  misc_feature (91)..(91): n is a, c, g, or t
tctggtacgtgtttctcgcgcatgctntcccgctcttcctctctccggcgggggaccgtcgttcctgnnngggnnctttggggngangccncccccacccaggggcccccagcggggttggctggaccccccgctcccaggaggggagggcgctcaggcccggacaagaaaggaggcgtcctgtgatgatggccagcgggtttttgccattccaaccccaggtcaccaccgggcagcttgctgccactgaggctgcggcggccaccagggagctgggcgccgctgcccacaggcccgggactcccgctggccccaggcgagacggggcccagggcggggggctggccggcagagtcaggggctgtagccggggcgcccgagttgttgttcatgtcatcgggcagcgccgtgggggtcccggggcccagtggcggcgcctgaagcagcatctcctggatgcggacctgctgcaggatggcaggcagctcgtagtggtggaagaagtagatcatggaatgctggatgaagagccaggaggtgaccagggccaggctgctatactgcccattgaagcggtagtgataggcatagaaggcgaagtggtagagatagaagaaccgcagccaatgccgcttgctggtgctggtgtggcagcagatggcgtcatactggtccgcgagccacacgatgaggatgatgtagaaggcggtggtggtgtcgttgaagaactccgacatgatggcctccatcccgacgagggccaggatgacggtcagcaggggcgctgcggggaaggcgatggccatgttcatctccagcatctgcagcaggtccacgatgaagacgaagatctggtggtgtgagtaccgcagcagcatggacacgctcagcgtgaagatgaccatgatggcgaaggcggccaggtaggacgtccgcgccatcctcgtgccgaattcgccacccaggcctggtgcgggtgggggttagggcggggtt

SEQ ID NO: 322847 - DNA, 1258 bp, Homo Sapiens
  misc_feature (49)..(50): n is a, c, g, or t
  misc_feature (109)..(109): n is a, c, g, or t
ggggaagtccccgcctccactggcctgtccgttcttccccccaccaagnnccgtttcggggcattggagaattcccgcttccggtggaagcagctccagggagacgctngctgcgggctcttcgggctctggtgctgaagaacccggcccctgggagacttcccgcttcacccaagctgctgctcaagctgccggacctgcggacccctgaacaacatgcattccgagaagctgctgtccttccgggtggacgcccagtgacccgcccggccggccttctgccgctgcccccttgtacagaatcgaactctgcacttctctctccttcatcagcagcttgggccagaagtgcggaatgttgtgtttgcggtggttgacgtagtgctcgaacgccagcaggtacgcctcctgactcttctcgatcttgtccacacacagcaggcccgagcggtctgttgacattagcagcacagcctgcagcagagcccacttccgtgtcatccaggttaaaggcagagagtgactttgcccagtttcaaagatggcgtcggagactacgcccaggccgccattcttgagctgctcccgcttgacagccatctccccactcagcgtcagggtgtcgctctcagggtcgtagcggacagccgcccgcagggacatgatctccatgcagcaccccttcaggaggatgatctggtcttcgcaaggcagctcggagaacatgggcagttttttggcaaagtccaccacacgggtgatggccggggtgatgatcttggtaaactcgctgaaggcttccaggtccaccttgtctccgtccggcatggagacaatgggtgactggccaatgtcatcgggcaggaatttccgcctctgtttccaatggctgccctgggcattggtgctgcgatgggcctctgtggcaatgtggatcagatcccactcttcaggagtgggctctggtcgctgctgcagtgatcggatcatctcctccttccgccgccgctcccggttctgctcaatcagcttacgcttggccacccgcttcgagtcatctagaaccaagtccatggccatgcccacggcgatgcacttcttgaagcggcacagctggcactgattgcgggtgatcttgtcaatgacacagcagctgtcatatttgcaggaataggtgggatggaggttcttctggattgtgcggcgaaagaagcccgacgcgtgggtcgacgatatcccggaattccggaccggtaca

SEQ ID NO: 322848 - DNA, 710 bp, Homo Sapiens
  misc_feature (77)..(77): n is a, c, g, or t
atttagtcctaattatacacgatgtggacaggaggaagtgtagacattacatgcagccgggcctctccaccctacgntcagctttgttggcacatgaactcagagcatcagataagcctcagaaagccagggcatcattttcataggaccaggttgctcaatgtgaacttgccctcccagagcagcaggagaagggctcgcatggctgcccccgtcacctgtgcctgacaggatggggggggaggccagagagagaagcatcagacgccctccctccccataaggggcatgggggatggggacacttcctcccaggacacagggagcctggctgagctggctggctcatgccccatctggtctggaggtcagaggggagtgagacactctggtttgaaaggccttcctttccactttggggaaaacaggcagggagagaggtgagggtgccatgccaaaaaacacccccaaatccagatgcagactttggagccacatgtgggtttgaatctcaactctacctgagtgaccctgggcaagtcacttcacttccctgagactcaagtttcatcaagatgggaacaatgagcatctgcctcacaggcttgtcgtgaggattaagtgagaaggtgcgtgtaatattagcgatgactggatgatacaaaattaagaacaaggctgggcacgattgctcacgcctgtaatccccc

SEQ ID NO: 322849 - DNA, 444 bp, Homo Sapiens
  misc_feature (320)..(320): n is a, c, g, or t
  misc_feature (328)..(328): n is a, c, g, or t
  misc_feature (341)..(341): n is a, c, g, or t
  misc_feature (380)..(380): n is a, c, g, or t
  misc_feature (390)..(390): n is a, c, g, or t
  misc_feature (396)..(396): n is a, c, g, or t
  misc_feature (422)..(422): n is a, c, g, or t
  misc_feature (428)..(428): n is a, c, g, or t
agtcttctctaattttattacagggcatgttggggacaggggagggaagtgttagaggagtgacagggcagcccggggccctctcccaccctgagcctcgaggcctggtgggggacatgaactgcagaggcatcagataaggcctcagaaagcccaggccatcattttccatgggaccaggctggctcaatgtggaactggccctcccagagcagcaggagaagggctcgcatgggctgcccccgtcacctgtgcctgacaggatggggggggaggcagagagagagcatcagacgccctccctccccataaggggcatngggggatngggacaattcctnccagggcaaaaggagcctgggtttaacttggcttggttnatgccccatntggttnttggaagtcaaaaaggggaattaaanattttngtttttaaaaaggctt

SEQ ID NO: 322850 - DNA, 1025 bp, Homo Sapiens
cctaagtagcgaggcctgggtggcgaattcggcacgaggctcttgtacgacagaggtggtttgctcttccgttgccccgtggcttcagctcatctttggcaggaaggcgaggcttccgcccggcacaggggatgtccagctcgccgctgtccaagaaacgtcgcgtgtccgggcctgatccaaagccgggttctaactgctcccctgcccagtccgtgttgtccgaagtgccctcggtgccaaccaacggaatggccaagaacggcagtgaagcagacatagacgagggcctttactcccggcagctgtatgtgttgggccatgaggcaatgaagcggctccagacatccagtgtcctggtatcaggcctgcggggcctgggcgtggagatcgctaagaacatcatccttggtggggtcaaggctgttaccctacatgaccagggcactgcccagtgggctgatctttcctcccagttctacctgcgggaggaggacatcggtaaaaaccgggccgaggtatcacagccccgcctcgctgagctcaacagctatgtgcctgtcactgcctacactggacccctcgttgaggacttccttagtggtttccaggtggtggtgctcaccaacacccccctggaggaccagctgcgagtgggtgagttctgtcacaaccgtggcatcaagctggtggtggcagacacgcggggcctgttttgggcagctcttctgtgactttggagaggaatgatcctcacagattccaatggggagcaaccactcagtgctatgggttctatggttaccaaggaacacccccggggtggtaacctgccttggatgaggccccaccacgggttttgagagcgcgggacttttttctcctcttttaaaaaatacaggggcctgggttgaactcaacgggaaatccagccctaggggaaaccaaggcccgggggtcccttataccttttaaaccttttggggaaccttccaccttgtttcgcaattaactgcggtgggagg

SEQ ID NO: 322851 - DNA, 1201 bp, Homo Sapiens
  misc_feature (404)..(423): n is a, c, g, or t
cattaaaacatgctcatggggaaaatttattttacatatttaaaatagtacatttaaactgattagttacattacaggtacaacgatgagcactgtgacgccatcatattgcacatcctgacttcatccatatgggtttctttaaatagtgcaaaatactttatacaggaatgtgttcggaagggtcttgcaaccaaaataaggaaaagaagtatcttacaaattactatgaacatatattcaagtgacggggtgaagggaaatttttaaaaagttacaatctgtacagaggaattgccacagacaaccaaaaagttccctccctcctgggagaagcagcgggcctctgaccttcacaggtctggcatttgtgccaaggtaattttttgggtgtcaatcaaaannnnnnnnnnnnnnnnnnnncagttacttaatacaatataaatagaagtccagtccagtgagtcctgtggtgggtcaaatgtggcaacagaaggcacaccttttgtcacctagggtttcagtagggttcttaatgaatgtgggggagaaagggggaaaaatgaacagaaaattataaaccaaaaggaaagaaaaatcatcgccaccaccaactaaaaaactggatcactccagcccggatgccccatgttgcatatggtgccagcactcaaacactggttctgtggtactgttgagaataagcagtagtaattccctaccatgtgtttgcatttttgtgttcttttgtttgtttctgaatatttttaatcctcatactccgctcccggggaagccaacgaggcacttacttgatgctcccgtcactactttctgctgctgtggctttggtgaggggcgccaggatgctgcctgggacccagccctcggcggcgggggaatggtcgctggcaggctggtacaccagacacatgttctgctggttgacggcgaggacctggaccacctcaccttggctcacacagatttcattctccttcagtgcatagtaatctttgatcacggccatggacgaggtcccattgcagcctcccaggtcgttcttgctggcttcgaacttgtccccaggctggtggtattcaaaccctggactgccattggaggtagatatcttcaggggaggcagaggtgggttatagctggagccctttgggggcttctctgagcccgcaggaacaga

SEQ ID NO: 322852 - DNA, 1008 bp, Homo Sapiens
gtacaggtctggaatttacgggatatcgtcgacccacgcgttcgcttcttgctgcctcacggttgctgttgcagacccaggagtctctgaaggcttccgcggctttggggccggttgtgagatgccaggcagaggccgctgcccggactgcggctccacggagctggtggaagactcgcactattcgcagagccagctggtgtgctccgactgcggctgcgtggtcaccgagggggtccttaccactaccttcagcgacgagggcaatctccgagaggtaacatattcccgaagcacaggggaaaacgaacaagttagtcgcagccagcaacgaggtctccggcgagtgagagacctttgtcgagttctgcagttgccaccaacatttgaggataccgcggttgcctactaccaacaggcatatcggcactctggcatccgagcggccaggctgcaaaagaaggaggtgttggttgggtgctgcgtcttaatcacctgccgacagcataactggcccctaacaatgggggccatctgcacgctgttgtatgcagatttggatgtgttttctagcacttacatgcagatagtgaagctcctgggactggatgtgccatctctgtgcttggcagaactggtgaagacctattgcagcagcttcaaactgttccaagcttcaccttctgtgccaggcaaatacgtgggagacaaagagaagatgctgtctcgaacaatgcagttggtggagctggcaaatgagacgtggctggtgaccgggaggcatcgcttggcccgtcatcactggctggcgactttccttgggcttggcaattcgcctgcaagccctgcaaaatccgggcttttccatgtttcccccttggcgcgaggttttgttaattgggggcaaaagggtggaaccctgggccccttaccccgggggggttcccttcccgccccctgggaaggaaagggctggccttgggccttggtggcctgtgcctagccggg

SEQ ID NO: 322853 - DNA, 1868 bp, Homo Sapiens
ttactacaaccaaagagattcaacatttattttatcataaaagttaagcaaataaaactatatacaagatccatgcaaggaatccagttacacacaagacacatttaaaacctggttaaaacacaatctccacgatagcagggaataaaaccagtaagaccaagtatctttagtgagaaacataatcgtgtttatattttggatgctgcttgaatccaattctctccccaacaatgaggcactggatcacccactcttgtgacaccacaggcagctgcaatgcttcagcacacttcagcaccgaggctgggcatgaggggtccgtcaccaccacatcaaatacccctaaagcaatatctttgttatgggcacttgaatggtgctgcttcacagaggctgcaccaccagtcatgaggatctcagaccagagctccaggaagttctgctgttgttctgataccaagagtacccttcagattctggaaaaggattttcacggggttgccagtccagaattctttgctcctcaaaggctgtacccagctggcaacagataattacggtagttctggagctggttggcatggcaactatcatggacccagacatgagacacacaaggaatcccactggcaaggcacaggaagtacttccgggttcgacaatgctgatccgcaattagaagacactggtaagctgtgttacactgggcttcattgaaatcttcaaggatatagccagctcctgctcgaagctgggattctgtatactgcttgttgaaaggaggaatttccaaaaattcctcctcttcttcactgcttcctgtaggaccatctggcagtttggagcggctggccaacttgtcactggttgtggccatggtaaggagaaatgcgtagcccagaaacaaggtcttgttgagaggcaaaggccctctctgctcttccagggcagagggttcaccggtgttgtctccactctcacaggggctcacaaactctcctgcccctactgcaccaggttttactgtggcagacttgcgacctcgcttggcaggggaccgttcctcttcagaagtgataagttttcttttgcctgagagaactcccatggaggcacgaggactttctgtgatctttcgggtaggggttgtgctgctgctactggaggcagtaggggtggctggggagctgacgttactgcgccgtttccgcttcccttccaccaaattgtctaagctgatatctgctgcctttgtaagaggtgttactgcttcataggggccaagcccatactgctctctcagtctgtttccttgctccaaggacaggatgacagccattcgcttataccactttctttggccttctttttcaatgctgtagtacagttccccagactccttcctatgtcctttcaccactcctgcactgaaatactcatcctccgagagggccgtcacttcagtgtccagcgggatggggtcacataacagaatgtctttgcccaacacatcacattcgtacccatcatcaaagagcaatttatacttcccagctccgacatctcgtgtgattttcccagagtaaaagtagccattggatgaccacttggctacaacacggagccctacaaagctatttcctggagaggaggcatctaagccatcagaagggccagcagcagcctggaaaggaatttctggagagtcactacgacgcaaagcaccagcacccacatctgttcgtctggtggagtctggcactcggggcacgacacggctgaaggatttatcatctggtgacaagttaggtgaaatgtccggacgcgtgggtcgacgatatcccgagaattgcggaccgtaccag

SEQ ID NO: 322854 - DNA, 374 bp, Homo Sapiens
aatatagaatttttggaaattcctcctttcaacaagcagtatacagaatcccagcttcgagcaggagctggctatatccttgaagatttcaatgaagcccaggtgaggagtttctttgtgtaacctaatatagtggcaatgataagagccaacttgctgtgttgagaagaggcctgggaggggttggggaacctggataaagtagccagagatttcaggaactgagaaactgccaaaatgtttttgcatgaaatagaatttttgttgtgtatagggaagagaaggtaggaccttgggttagttaatggctatggttctgttgctgggacaaaagaagattgatgtttatgtttagtagtagaaacccctattag

SEQ ID NO: 322855 - DNA, 1014 bp, Homo Sapiens
caatcatcatcggtttaatgaccacgtggcatgactctctggctatgtacatatatacacatattcacatatataatatgtaaataacttttgtgtcatttacacacccaaaaagtgtgcaagatgtgagaggctggcagccacattattactatcgagaaagaacatttcaaaagccgagttctcctaacacacacgttctctgctcgcgcctcctagctccgcatggtggggcaacttggcctcgcaggcacagcccgttttcccgctgctctctaatcctccagcagcagctccagctcctccagcggcaggcgcacccggagctccttctcagtcatcaggtccaggatctcctgcatctcatcggggaaatactccacggcgtccaggtacaacacctttgcccaagggcaattctgaagtgctttgtagaatacacctttgcttctttctttatttcctaaggaaaccagaaagttcaaatacatcctccacagcaaggggcactggctgccactggtcctgcgcatggcattttcaaacagggcttggatccgatgcattaagccggtctcaggaattgtggcgtggatctctctaccgtctaacctctggacagtttccaccagtctcttcctcagtttctcagcttcaattgcaaacaaccaaggctccaagggtttggcagacctggtgattgtgtcaaaaaatctcctggttttgctggcactgtgggacttattctgaatctgtacataggacctccaaagaacctggttgcctggatacaactttaaagcctgtgagagtgcctctcgcagaggggccagcgggtaaacactcactttcatgtggaatctcagcaggctcgtgtgcatcagtgtgatggcttcgagaacactggtccaactctgggagctggcactgtccccctcgccagagccttctgggaaaacagaactgttcagttttgcaaacacctgttcgtatatctgcacagcagcatcaatc

SEQ ID NO: 322856 - DNA, 1026 bp, Homo Sapiens
ccttagtgagatgcgagtcaggcagtgtgctggcttgcttccgggagtcgccggcgttcctccccatccgcgcgcccgttgatatgaatattggaatgcactgagttattagttgtatgcgcttgtgtactcagtaagttgccttttggtgtgcactctacgcacacctgcgttgtgtggtgttacctgcgtgcggggtgggcgtgccggggtaatatgaggctgcgcgtgtttacgttacgggggcggtgtggggggtgcgatgtgagtgttggtctcgtgggcaaaacagggtcaggggagctcccacgattctaccaattatggaaggtcgggcgacacagccccgttggaccggccattcggtgggattggtcgcggagacatctttcccatgggaagctcgaatggccagatttttcacaaatatctgccggccctttttggcctccccaggagcaggcctccacagtccaccaaaggaacctgcgaagcttcctccgaagttgccacgctccatctcgatggcacggtcaaagctggcaccgccaccgccacccatggccaggcccatgcgctcaatgccagcgcccagggccgggcccatggcggggcccatgcgctcgaggctgttggcacccatgcgctccaggcccatgcgctcgaggcttgtttgcgcccatgcgcttccaggcccatccgctccagattgtttgcgcccatgcgcttccaggccggtggccatgcgatccatcacggggcccatgcgctccaggccagctcccattcctgcgggcaccatgcgctccatgctcaggcccatgcgctcgattgcagggcccatgcgctccacgccagagcccatgcgctcaatggtctggcccacacggtcgatgggagcggccatgcgctcaaggccgaagcccatgccggcacccatgcgctccacgccagagccaatgcgctccatggtctggcccatgcgctcaatgctggaggccatgtggtcgaggcccagcgatcgca

SEQ ID NO: 322857 - DNA, 905 bp, Homo Sapiens
cgccagaaaggatgaaggtcccccgaaagggaggtcgtattgtttgcaggaaggaggtggtcccggggggtgatgacctgtgcacatggcttgagctttccttgttgccaggcactcgtggcatttcttgctcaccaggtagatgagctccacgaggttgagcaggatgcagatggcagctgtggccaccatgaagagggtgaaaatgttcttctctgagggcttggagatgaagcagtccactatatttgggacatggatctgcgtggcacttgaccacaggagggaggatatatttggggtagaatgagtggaacacatagagaaaggcgatgtccacgctcgctttgaacactaggctgcagacatatgtccaccagagcccaccccgcttcttgccggggttcaggtagaggcgcccactgttctccccatgggcttctcggtgcctcttctcctgaacctcccggtaggccacgtgcatgaccacgagcagtgaggggcatgtcaccaggataagctgcagggcccagaggcgcacatgggacacagggaagaactcatcaaagcagacgttggagcagccgggctggcgagtattgcagtcgaagtccttgtggtcatcactccacacacgctcggccgtcaccaggtacaccagcacgcggaagatgaagaccagagacagccagatgcgcccaaaggctgtggagtacttgttgaccccactcaggagtccctcaaagatactccagttcatggtggacccacgcgtcagctgctactgagtgactactcctcagggctctcctggctcccagcagccggcaataggactcagcaagcagctcgaatttcatatccagaagcggggaaggttttcggggaagcccgttgaagcctgt

SEQ ID NO: 322858 - DNA, 1386 bp, Homo Sapiens
  misc_feature (171)..(171): n is a, c, g, or t
  misc_feature (177)..(177): n is a, c, g, or t
  misc_feature (570)..(570): n is a, c, g, or t
ttttttcagaaacccttccggggtgtgggaaccccggccccatttcccccggggagtttcattcaggctgggattccgattccagaggctgaatgtttatttccaaagttgaagtataaagttggtccaccttttggtgtaaaaaactgagcttcccgaagctgggcttcngatgcnccagggtgaacaaagggcggagggcttcactggagggaaacacttccagcacgatcagttgggccaccttggcatggccttggtctataaaaaactcgggagtgtcctgagttaggatcttcacgatctgggtagatcccaggttattctgcagccttttcatgtgatcagcccgatgcttgacttcagccgatgggcactctcaggaggcacagagtccaacaggaccatgaattcttctggagagagcacagcagccactgcagctttcaccacgtcctgactcacgatgaggctgaacgggatgttgtccagggtgggcattgtcagggaagctgcagagttattgaaccacttggtcacctttccctgtgagtccaacaacttggcccncaggtagagctgaatggtgtcacccttgatggcaggatacagaaggtcaaaactccagacgggtcaatgctgagggaaatgggcaccttcaccagctgcaggaggtctgcatacatgccattgaaggaagcctcgatcacgggacacagctggtttttcactagattgggcagggatggcactaggaggttcatgacctgcttagctaaggcgttcaccaggaaggagagcttatgcagcagttggatgcgcaggctcccatggctggtggcacagtcactgaggaccaggcgggtggggccacttgcactggtgtccatgcggatggtggcttgggcctcagtcgtcatgtggaactccacgatggtcttgaccaggggcgtgttgaatccagccaccatgtccagggggatcttgactagcagctcctggtcattggccgagggcttcacctgcagctggaggatgttagctgtgatgaccttcagccagatgacgtgcttcaggacggtgttcaccaggctgcccagcacagggatgcctccggctggcttttcccgcatggcactgagcagcggcagctgctgcaggatgctggtggcgttgtggtccttcagctcctgtgtcagcttttctttgatgacttttgggccgaggatgagaactgcagtgggactgagggtggcttggatcaaggtggctgccagcaaaccacagagaagggtgaaggtccacgggccggccatcttcccaggtgtcagagggcagcaagtgcaggatgccagacctgggcacgctggagtcctcggcccgctc

SEQ ID NO: 322859 - DNA, 1085 bp, Homo Sapiens
  misc_feature (817)..(817): n is a, c, g, or t
aagacagttcattcatacctagagaaattccttaccgagcagatgatggaaaggagggaggatgtatggcttccactcatctcctatagaaattcattagtcactgggggtgaagatgatagaatgtctgtgaacagtggaagtagcagcagcaaaacctcatcagtaaggaataagaaaggacgacctccacttcataaaaaacgagtagaagatgagagtctggataacacatggctaaacaggactgacaccatgattcagactcctggccccctgccagcaccacaactcacatccactgtactgcgggagaacagtcggcccatgggagaccagattcaagaacctgagtctgaacatggttctgaaccagactttttacacaatcctcagatgcagatctcttggttaggccagccgaagttagaagacttaaatcggaaggacagaacaggaatgaactacatgaaagtgagaactggagtgaggcatgctgttcggggtctaatggaggaagatgctgagcccatctttgaagatgtgatgatgtcatcccgaagccagttagaagatatgaatgaagaatttgaggacaccatggttattgatctgcctccatcaagaaatcggcgagagagagctgagctaaggccagacttctttgactctgcagctatcatagaagatgattcaggatttggaatgcctatgttctgaagtctgaagaaaatttacaaatctggaactctattatttagagctagaggcctatatactgtgatagcttgtatggggaaaaacactttttgatgtngatctgattttgttttttaatcaaatgattaaggtcaatccctttttgcagtgacagaagaggagcatgtaaattacccaaggggaatgttcggtgaatgtcaactcagaaagactgacctgaaaatcatttgtgtcctactattggacttatcccaatacagatgtttgtgtttttctgggagggaggaagaaattttaaattttttaaacagctgtcaagataaacactgttatacacctgttttatgaaaactcaacattgaggt

SEQ ID NO: 322860 - DNA, 1666 bp, Homo Sapiens
  misc_feature (672)..(672): n is a, c, g, or t
  misc_feature (891)..(921): n is a, c, g, or t
  misc_feature (1131)..(1131): n is a, c, g, or t
  misc_feature (1637)..(1637): n is a, c, g, or t
cctgggtggcgaattcggcacgaggggttttggacacagagaccagagagatcgtgtctgatgtcattgatggcaatgagcagctctcagtggtccggtacagcccagatgggttgtacctgggcattggttcccatgacaacgtgatctacatctatagtgtttccagtgatggtgccaaatccagccgctttggccgctgtatgggtcactccagcttcatcactcatcttgactggtccaaggatgggaatttcatcatgtccaattctggggactatgagattctttactgggacgtggctggaggctgcaagcagctgaagaatcgctatgagagccgagaccgggaatgggctacctacacctgtgtgctgggctttcacgtctacggcgtctggccggacggctccgatgggaccgacatcaactccctgtgccgctcccacaacgagcgcgtggtggcggtggccgacgacttctgcaaagtgcatctcttccagtacccgtgcgctcgtgccaaggcgccgagccgcatgtacgggggccacggcagccacgtgaccagcgtccgattcacgcacgacgactcgcacctcgtctcgctgggcggcaaggacgccagcatcttccagtggcgagtgctgggcgctggggggcgcggggccggcngcccgccacgccctctcgaacccccttcctgtcccccgccttcctccctcgacgtttgatcgctgccctggcgggaccgactggaccggcggcgtggacccaccccgcccatgcccttccctgttcccatccctaccaactaggacgaggaatcgataccctggaccggcatccgcgtaccctgcctaataatttattcctgctgcatagccgcgtcgnnnnnnnnnnnnnnnnnnnnnnnnnnnnnnntatgtcttcttacttacacccgctccgcctgcgccccattacccctactatcttatgccgagttgatcttgccctaccctccatttttaccccacctcttccagacggagatccccgcacctcactcttgatgactatactcacccccccgcgccaccatccgtctaaacacacgacccgcacgccgccttgaagaaattacctgggagntctctcctcacacgccccttattttatacctggcgccagacactcacctgtagataatagttgctatccccaccacttacgtcacacctacataccgccctaagaagagtcgcgcgcctcacccgtctcatctgacaaacaatacatactgttacgccaccgcactcactaatattacccaacccctccacccactctcctgtcgctctcgatatattcccctccctgcgcgaccaatgtgatcatacggactgccaacctgatccatctctccatcaactgagatcgcgacgccagatagaagtacacgccatatcttcacattcacggcgcccacgcccaccttccaccgcgcctgtcgcatctcagctatatacacgctaccggtgcaaaagcgccgtgcttgcatatagaccgcttgctcactatccgctgacgactcgacttcaatactgctacctccatacacacgatcactcacctctgagctaccccacacaccatcnccatctgttctgcacgcacctacgccatc

SEQ ID NO: 322861 - DNA, 845 bp, Homo Sapiens
  misc_feature (37)..(37): n is a, c, g, or t
  misc_feature (123)..(123): n is a, c, g, or t
  misc_feature (264)..(264): n is a, c, g, or t
agtaaaagatcctggcttttaaaaattgctttgatgnctgtggcagtatcattaccaaaaccaattttttcagccttcaaaagcaggctgatgcaccttttttcagagattctgtttgtctgnattaacagtctgctgccttggtgggcctttggtcttggtcactttcggtcattcgatggttttaatgaattctactgctgctgtgaacttgcatccacccaataggactccctctccagacagacagctagcataaaagcntactgatatactgcacagtagacagcaaacagggtggatttgcctttatcaacacaaacacccaacacaggaacaaagtcatccgctccagggacagagtcctcattggccaggctcaggaggttcataatcgtagagcacattctcaggatgcactgcactttgtcccggggggttttataagcacttattgtcctgatttctgattgtgcagatggccatggtgcttctcgaagataaacctctggtatctgaaggagctctgtgatttgcagtcactactttagacaatctctggatatgttcatgaagaccctgttcgcgaagtatgtccccatcttgattagggtagaaggcgagcttgaaaatccggttcatcacgcttcgctcaatggccagctgtgcatcttgaagctgttcttcactcgcgttttgccatatgacatcctgggccattgcaccataaagaaactgcagaaaatcttctacctgagcagttttatcgtcagctgcggtgagtttctgaaagtcttgaatgaattccctgatcttcttttctttgctctcaagcagtaatctca

SEQ ID NO: 322862 - DNA, 1166 bp, Homo Sapiens
ccttttgagggcggccacagatgaagcctgaccccagtcccctggcctcagccagctgggcagccctggaggctgacagggagggccaggttagaaagtgatttcatgtgtccacagggcaccctgtcacacccatacccggtgacatgtgaactgaatgctctcagggcagcccctcagaagccttcccagcagatccggggaccccgttctggtttttctgactcactgcctcatcaccttccttccaggtccccaaaacccctgcatcatgatgggggccaggtgctacctggtttccccaaggccctttcagacttttccccgttggtttcggtgtggcacatgacacaatctctcccgtccctggaggccagctcccccggtggccaacctcaggcctcccatggcatctcagggctcctccagccagactggcgccatccaattaacctgatggtggctgagcagctcagctctgtgccagcccctgcaggaggcagatcatgttgtccaggccccagaggtagccgtcctcacggttgccctcagcccagggcagcctgtggctgagcgtctggtggtcgggcaaggccaccgtcttgccgaagtctatcatccagaccttggccaggccggtgtggtcgtgcacgaagaggagggagctgcctaccacctcgtgggtcttgaagaagggggagatctccagagcttcacgaagttcttctaggcatgccacgtacttttgcaggatgacgtggtctccatccacgaagtcctccagcacttttgtcacctgctccagtgcctgcgtcttcttgaagttggtgttacaggtcccatctgccttcttgatgccctcgatccggaagcccagggtagaggtggagctcatggtttccctccactgcatgtagcggggcttggtgactgcaccctgggcatgctcctcaggggtaggggccccagggtccacagccaccatcttctcatacatgtccttccggggacggggacgttcccgtgccttcactagctcctcttccagataggtcctgctgcccatcttgcagtccataatggaggggccctcaaagtcagccaggaggtcttccatctggttgaaggtctggccatcccctcgtgccgaattcgccacccaggcc

SEQ ID NO: 322863 - DNA, 1207 bp, Homo Sapiens
ggggctggtagcccggcagccgcaggtggggccacgagcgctggctgagggaccgagccggagagccccggagcccccgtaacccgcgcggggagcgcccaggatgccgcgcggggactcggagcaggtgcgctactgcgcgcgcttctcctacctctggctcaagttttcacttatcatctattccaccgtgttctggctgattggggccctggtcctgtctgtgggcatctatgcagaggttgagcggcagaaatataaaacccttgaaagtgccttcctggctccagccatcatcctcatcctcctgggcgtcgtcatgttcatggtctccttcattggtgtgctggcgtccctccgtgacaacctgtaccttctccaagcattcatgtacatccttgggatctgcctcatcatggagctcattggtggcgtggtggccttgaccttccggaaccagaccattgacttcctgaacgacaacattcgaagaggaattgagaactactatgatgatctggacttcaaaaacatcatggactttgttcagaaaaagttcaagtgctgtggcggggaggactaccgagattggagcaagaatcagtaccacgactgcagtgcccctggacccctggcctgtggggtgccctacacctgctgcatcaggaacacgacagaagttgtcaacaccatgtgtggctacaaaactatcgacaaggagcgtttcagtgtgcaggatgtcatctacgtgcggggctgcaccaacgccgtgatcatctggttcatggacaactacaccatcatggcgggcatcctccctgggcatcctgcttccccagttcctgggggtgctgcttgaccctgctgtacatcaccccgggtgggaggacatcctcctggaagccctctgtcacctgatgggctcctggggcccggtgccaagcccagcgtggaggcggcaggcacgggatgctgcttgtgctaccccaattagggcccagcctgccatggcagctccaacaaggaccgtctgggatagcacctctcagtcaacatcgtgggggctggacagggctgcgggcccctctgcccacactcagtactgaccaaagcccgggcctgtgtgtgcccttgtgtgtaggtccccagggcctctggcctccccaggggagcagaagcctggggccctccccgaaagaggcttttc

SEQ ID NO: 322864 - DNA, 1014 bp, Homo Sapiens
  misc_feature (831)..(883): n is a, c, g, or t
catggccaggtggttgtcttattgcaccatactccttgcttcctgatgctgggcaatgaggcagatagcactgggtgtgagaatgatcaaggatctggaccccaaagaatagactggatggaaagacaaactgcacaggcagatgtttgcctcataatagtcgtaagtggagtcctggaatttggacaagtgctgttgggatatagtcaacttattctttgagtaatgtgactaaaggaaaaaactttgactttgcccaggcatgaaattcttcctaatgtcagaacagagtgcaacccagtcacactgtggccagtaaaatactattgcctcatattgtcctctgcaagcttcttgctgatcagagttcctcctacttacaacccagggtgtgaacatgttctccattttcaagctggaagaagtgagcagtgttggagtgaggacctgtaaggcaggcccattcagagctatggtgcttgctggtgcctgccaccttcaagttctggacctgggcatgacatcctttcttttaatgatgccatggcaacttagagattgcatttttattaaagcatttcctaccagcaaagcaaatgttgggaaagtatttactttttcggtttcaaagtgatagaaaagtgtggcttgggcattgaaagaggtaaaattctctagatttattagtcctaattcaatcctacttttcgaacaccaaaaatgatgcgcatcaatgtattttatcttattttctcaatctcctctctctttcctccacccataataagagaatgttcctactcacacttcagctgggtcacatccatcccnnnnnnnnnnnnnnnnnnnnnnnnnnnnnnnnnnnnnnnnnnnnnnnnnnnnnacatatattttattgagtacctactgtgtgcccaggggctggtgggaacaatgggtggacttaatctcctgcccctcctaaaaattggattgtcctagggaggaagaaacagcattttttaaaaaaataac

SEQ ID NO: 322865 - DNA, 1091 bp, Homo Sapiens
  misc_feature (84)..(84): n is a, c, g, or t
aacgtagtgcattatgctagaacaaggttaggcatctttaagttaacccggttagccactgagtatttccccacccttccggancttatctctcggaaaagggtcctggagtggactctttctcctctcacagggcccactcaagagttccaactgctgagggctgtcctttggcatcgtggggagctccacatcaacctcaggcaggtcaggctcctcctcggactccgggtctatcaactgggattctgtagaggtggcagaggcctgacccagaggcctgacagtcagtccatgcatggtatagccaccgccacttgtcctgggcgctgcctcagtatcgctatcactttcatcatcataattataatcccacactttcttccgactgtttgagctcaggagtttcagactgtagtgcattatgactgcacctgtgaatagccactgcattccagcccttagcgagaccttgcctcaagactttggggaggctatttcttaagcatatataaccaatccatttcagtgtcactatggtgcttgtcaagaccaatgctatcaaaaacacagtaattattcctcctattttggcagattctgctgattctgattcctggccaggtggaaggagggtgcattttaagggagactttattactgcttgctcatcactgtgctctaaataaacagatacacagtagttcgtgtttggaattaacttgtcaatgatataggtgaaatttccactcatgtttccttttatttcgggtttatgcttcttaaccattccctctggctgttcttcaatgacgagagataaatcaaactgtaattcttcctcaacaatagatggaaatttcaccatcacattaatgtggttggtaaaaccaacaatctcaaactctggtggttcaaaagacatgtctatggccagccagaaattgtgtgagcaactgaacaacgttgtgttcccgctgaatccttctaggacggtgacataggcctcgtgtgtgcttctccactcatctgtgaggtcacaaaatgatcttgtggtatttgcacagttcttaaccaccttcaaatcttct

SEQ ID NO: 322866 - DNA, 388 bp, Homo Sapiens
  misc_feature (320)..(320): n is a, c, g, or t
agtaaaccagaagatttgaaggtggttaagaactgtgcaaataccacaagatcattttgtgacctcacagatgagtggagaagcacacacgaggcctatgtcaccgtcctagaaggattcagcgggaacacaacgttgttcagttgctcacacaatttctggctggccatagacatgtcttttgaaccaccagagtttgagattgttggttttaccaaccacatttaatgtgatgggtgaaatttccatctattgttgagggaaggaattacagttttgatttatctcttcgtcattggaaggaacagttcagaggggantttgtttaaggaaggcattaaaccccggaaattaaaaggggaaacatggagtggggaaattttccacc

SEQ ID NO: 322867 - DNA, 1048 bp, Homo Sapiens
ataaatgacgagtaacaccatgtgtgccgcagaggtcgctcttggtgaatgtctccggcgccgcaatcaagatgttcgctcgaggtacacgcagctctaggtgaagcgctctcagactacaaaatccgcgttttatctagccagaggaagtctgtgtttgggggcgtaaaactgtagatctcgtaccagaaatatcacgcaggtctcgcctcaggtgaatcccacccgtgggaaccaacagggatttaaacggcccgccaacccagtcagttcttcccaggtgtcgccgtttgtttcaggcactgaatccaattcccaatgtactgaggaacaacatgccggtcaaagacagacttttcgctgctcttgggacttgaagcttccagcgctgcgtggtgcatattctaccttgttcagcacgttggctcgactgcgggagcgggctagtacatcgtgtgcatttgcaaaaggctggtgatccccaatatcatcatcactctgtatcaactgtgcatgtccaaagaggcgcctcttcagtatgggctcaaccagagtaagatataccatgtacagaagtagaaggcccaaaatggagagataaattataatggtaaccttgattgtgacagagcttctttcttcatatttgcattcacagcgtagacagtatgcttctacatcaggcccccgcacaggcatgggctccacgacatgaaggcaatcacaatctttctgagatatgttcttattataaatatgcccagaattttctttatagggagggcagatacatttacatctgacatcctcgaaattcttgggcggcgtctgacagctgcgccagcagcagcacggaaagcgccaggcacgacaggctgagcaaggagccaagccgaagaaggcctccccacagggtcgccaatcgctgggggcccagcggtcccacagcccggagcccccgcgaccggctcccggctcgggctcaggctcaggctcaggctcaggcacaggcttgggacccggctggggatcctccgcccgcacttcc

SEQ ID NO: 322868 - DNA, 1318 bp, Homo Sapiens
tgcagagaacatgctttattgaggagtagatatagaagagcacattctaccacatgtggggaagggtttagcttctgtaaaaggcctttatcccttaagaaaacccctagtgaagttgctttttgataaattttaacagtgacactgaaactggaggggagctgccactgaacatgcttaaaattagctcccccaacccacagtgaatataagtagtgtacagagatgccaagagaaaggcacaaatgaccggagtcagggattgtggtgagggctccacatgaagacagcatgttggaggagaccaagttgggaagggtgacatgtcatacatcaaaagttgccccaagatagcaggttataatgggctagagagaaattagagggaacatctcttccttcacttgaacaacaccaaaaatagaagaccagagaatagaaggatggtgacaaatcccaaaaaggaaatggaggaggagttcgtggaagggcagaagcactttattcctagagggaagggtgaggcactgttgaaaagagaagcaaggctttggcagggggtggccattctgccttgctgagtcatggggtgagatacggaagtcactttcaatcattttctagttctcgcagggctctcagacaaaatcagtgcaaggtatatggaagtacagatgtactgtatcagactagtggaggtgaaaaggtttctgcagtataattaaccagttaatatgcagcatgaaagggaaaagtggacattactttggcacctgcaaacgtaaaaagtgggagtaaagagagaaggaaatatttactagtgagtactttacggtgaggcaaaaagtagtatccgttccctttcaccaagacactgcccactgcccactgcccacaggtgaactcaaatcaaacccagaaccaccaccccttcattcttctctccatctcattcagatcaattatatgctattaccatgactagtccctgggaaactcttcaaaagtatttggctctggttagcccaatacagatcaaaaagaggtctcttaatcaaaatgaagaaatttaaagcaagatggaacccaaagtgaatggaccccctgccaatccacacacactcacaagtgccaccttttccctgcccctccatagatcacacatataaggagtaactggaaaggtcctggtggtggcagccatatttggaggtctggtgaccaggtggcaagcactagtaccacgcttagaagacacaacacaacgtcatggggcgagaggacatgaggagagaaccagtgatggacaggtacagta

SEQ ID NO: 322869 - DNA, 901 bp, Homo Sapiens
gggtggttcgcttaatgttttggcaggaccacagggggagcagaaggactttggaaggggaattccggccaggtagtgctaggggaagagtgtcttctccatcaggaaggacgggaggtagttcactgcccagccgcgggcacacagccccccaggcagcacccagcccagccaggcatcctgagggaggtcatggacatttcttcgccgtcggagcaggtgccacaaggacagcagggcgtagatggccagagcgaggctgcccgaaacccagatcactatgtttccaagtaggtggatctgagcgctggtcctggggtgcagccagtaggcaatattggtgtccagggtgacccactccaggtgggctggagctgtacttgtgttccgagtcatcacttctcagcgccagcatcctccactgcagctccgagaatctcgccatgaagctgaggttcctgctgacgtccacctgcgcaggtgagtgcagctcccgttcccgctccctctgctcctggctcgcgccgtatcggtgctcctccacgttccacaccgtgctcccgtggtagccccgggacagcttctccccgacgatctccagttgccgatacccccagtcagggaggtgagccccgctcagctttaagacagcggaagtgttcacgtgcacaaagcggacctctgagaggatggtcattcccagacgtctgtgtcagatcctctgttcacaatttccagtctcacagaggttctgggcgggcatggagatgttatagtcaatgtagcaggagacctcgtgtgaatgggggctcaggggggctgcaacatcatgtcgtgttcagggagcgggtggtcatgccgtggaccagctgcaccatgtccccgtgcctcacaggtctcg

SEQ ID NO: 322870 - DNA, 967 bp, Homo Sapiens
ggcttaggggtttacgcttggccctcccgggctgtcgggtccaaggcaatggcccccgggcccatcagggcccaaaaggttacccaggggggggcccggaacttgggccccattttgcccactccccttgagggtaccgattcgggttaatcctgcccatgctgggccctggtgggtccggagtctgatggaggtgagtcacctccaatggctagcccatagtttggctgcttctcccgggtccagcgaaggaccgcagggctcacatcaaaagtttcccaccgtgtcacatttgtggttggaccagtctcgtgtccagtagtcgtgtgatgaggtgcccaggcaccacttctgctgggggcttcataacctcataaatgtttatacggtggaagcccctttcccaatcagggccctggtccacctgctcccggaagagccgaagctctgcagaggagatcgcctcgttctcagggatgctgctgaggttaaagaggaaacgaaaagcagagttttcactggtccctgggatgttctccagatgttcttcgtggtggaagctcctcacggtgttggcccggctggccgggcgctcaggatactcaagaccagtgctgtggatctgctcttcctcctcctccccagactgaagccggtaaagatcccgcatgtagtccggaatgacggcactcttgctaggctgcgggcggcggcgcagcccaaacatctgcagaagtgtcgcctcgaagtcccgcaggagctcatggctctgccctgagcggcgtcctcccgcgtggccctgaatctcggcgacttttttcttccccgtctcaggtatcaaactagcatggctcgcgcctcctagcaggacttggcataataaaacgaccatcagcattcggttaccaggaatcatggtgtctcgccacccaggcctcgctaccttataaccgttagagttactgcc

SEQ ID NO: 322871 - DNA, 1521 bp, Homo Sapiens
  misc_feature (76)..(116): n is a, c, g, or t
aaaaataaaagttcccaagcttttaaggaaagccagtctttgtaagttttgtggggtgaagtggaatggggaaccnnnnnnnnnnnnnnnnnnnnnnnnnnnnnnnnnnnnnnnnnaatatccggtctatcctccaagggattgcctgattctcaagggggcaccccacatcccctttttattagcatctcctgataatttttcagtaccacccttattcattactcatccaggtacagcatggagatggcactcagttcagtgggcacacaacagggttttggggatactggaattgacagaattgaccagggtctgcacaatggcatggttggttgagttgaggtggtcagccagtggaaaggggcagtccccatggcagtagaaggcctggtagcctggtggggccacaatccagtcattccagcccacatcgctgaagtccacatagagcgagtggcgccggcagttcttattcttcttcctggcccgctgtgagtgatgcttagggctacgcttggccctccggcgtcgggtcaaggcatggccccggccatcatggccaaaggtgaccaggaggggccggagctgggcccaattcccactcccttgaggtaacgatcggctaatcctgacatgctggccctggtgggtccgagtctgatggaggtgagtcacctcaatggctagcccatagtttggctgcttctcccgggtccagcgaaggaccgcagggctcacatcaaaagtttcccaccgtgtcacattgtggtggaccagtctcgtgtccagtagtcgtgtgatgaggtgcccaggcaccacttctgctgggggcttcataacctcataaatgtttatacggtggaagcccctttcccaatcagggccctggtccacctgctcccggaagagccgaagctctgcagaggagatcgcctcgttctcagggatgctgctgaggttaaagaggaaacgaaaagcagagttttcactggtccctgggatgttctccagatgttcttcgtggtggaagctcctcacggtgttggcccggctggccgggcgctcaggatactcaagaccagtgctgtggatctgctcttcctcctcctccccagactgaagccggtaaagatcccgcatgtagtccggaatgacggcactcttgctaggctgcgggcggcggcgcagcccaaacatctgcagaagtgtcgcctcgaagtcccgcaggagctcatggctctgccctgagcggcgtcctcccgcgtggccctgaatctcggcgacttttttcttccccgtctcaggtatcaaactagcatggctcgcgcctcctagcaggatgacagaaaacaaggcatataataacagtccatgattcttgacagccaatcttgaacaaacttgctggaaaggctcagggaagctgcagcagtgcgttgctcgggatggcactacggaatggcctcgtgccgaattcgccacccagcctcgctacctaacaccgttagagtactgcct

SEQ ID NO: 322872 - DNA, 642 bp, Homo Sapiens
  misc_feature (101)..(129): n is a, c, g, or t
  misc_feature (160)..(228): n is a, c, g, or t
aatacgtagttataaatatattttgtcaaaatatatgatcaatatggtcaaaacatttgcacgtaaagtcataaataaggtcaaggtgaatgtttagggannnnnnnnnnnnnnnnnnnnnnnnnnnnnaaataaaagtccagctataaggaagcagtcnnnnnnnnnnnnnnnnnnnnnnnnnnnnnnnnnnnnnnnnnnnnnnnnnnnnnnnnnnnnnnnnnnnnnatatctgtctatcctcaaggactgcctgatctcagcggcacccacatccctctactaccatctcctgataatttttcagtaccaccttatcatactcatccaggtacagcatggagatggcactcagttcagtgggcacacaacaggctttggggatactggaattgacagaattgaccagggtctgcacaatggcatggttggttgagttgaggtggtcagccagtggaaaggggcagtccccatggcagtagaaggcctggtagcctggtggggccacaatccagtcattccagcccacatcgctgaagtccacatagagcgagtggcgccggcagttcttattcttcttcctggcccgctgtgagtgatgcttagggctacgcttggccctccggcgtcgggtcaaggcat

SEQ ID NO: 322873 - DNA, 1478 bp, Homo Sapiens
  misc_feature (1190)..(1190): n is a, c, g, or t
gctggccctacggctggcgacagagcgaggacccccgtgcctggaagaccttcattgacaccgtgcgctgcactacggctgcccacctggccctgctcgtgcccaagaacatcgccttctaccccagcaaccacgagcgctacctggagggccacatcgacgtgtggtggatcgtgcacgatggtggcatgctcatgcttctgcccttcctgctgcgccagcataaggtgtggaggaagtgccggatgcgtatcttcaccgtggcccaggtggatgacaacagcatccagatgaagaaggacctgcagatgttcttgtatcacttgcgcatcagcgccgaggtggaggtggtggagatggttgaaaacgacatatctgctttcacctacgagaggacactaatgatggagcagaggtcgcagatgctgaagcagatgcagctgtccaagaacgagcaggagcgagaggcccagctgatccacgacaggaacaccgcgtcccacaccgcggcggcagccaggacccaagcgccgcctacgccagacaaggtgcagatgacctggaccagggagaagctgatcgctgagaagtacaggagcagagacaccagcctatccggtttcaaagacctcttcagcatgaagccggaccagtccaacgtcaggcggatgcacacggctgtgaagctcaatggcgtcgtcctcaacaagtcccaggatgcgcagctggtcctgctcaacatgccaggtcctcccaaaaaccggcagggagacgagaactacatggagtttcttgaagtcctgaccgaggggctgaacagagtcctcctggtcaggggtggcggccgggaggtgatcaccatctactcctaatgcccaacagcatcacggcactctgggacaggcacggaggacggcgtgggcagcctgggcctgggcttggcccagggaaacagacggcagacacacctgtcccccagtgatgccgcccaagctgcccatggggcttcctacggaagtttctaggcccgtcacctagggctctcctgttcagccttaacaggctcagcaaatcagggcgtgggctggacgatttccttgcatctgagggcagacgctgctaccggattgacctgtacgtggccagatcttctcgcaggtcacaagaagccagtgagcccttgccttggntttctgggagttctttttccttggctggatttacccggatggttaggttgcatttctacccccatccagaaaattcttggaagagcccccggaactgaagctgtcccctgatgaggaaggtgaaacgtccagccctggccatggctcccgctcagggccccgggcccctgccaagtcactctggttccttggaatgggcttttgggggttcctggaaccctccaagggcaattggaaactgggaaggaacttcgtgtcccattggcccgtgtgtccaaccctctcgga

SEQ ID NO: 322874 - DNA, 1617 bp, Homo Sapiens
  misc_feature (941)..(941): n is a, c, g, or t
  misc_feature (1085)..(1106): n is a, c, g, or t
  misc_feature (1239)..(1249): n is a, c, g, or t
  misc_feature (1414)..(1414): n is a, c, g, or t
ttaaattttcagtagttttattgaaaaatgcctcttttgtttcagaaataaataatataaggcagtgaaattcacaatctgcagttaaaatataaaagcagcaattctatgttcatagtcttgcaaatgttttccaactacttttgataactaagaaatattatattctgaaaaaagttcatactaaatatacaacacaaacatgcaattccctctctgcagaataatctgcaatttggtataaatgttagtgtgtctaaaacaaggaggtttaaggcaatatggaactgtatcccgttgatgcactaacttcatctacatggcttaaggtttgtggttgttaaagagatgtatacgagcattctatgccccggcgtataacagagatagaagaggaagataagtaattgcaatggagttgacgtttccctcctttttggttttaggaggggaattatttgaatcgtggtgtaattgaattgaaaataagtatagcaaaagataaactgcccgctcgaaatacacagcagctctgggttccaggacttaactgcttaacctaagagtttcactgaggctgcccgctgtgctaactaaaggcacacggcatgttctctctttgcagcttttgttaacaaagtattttgcaagcatttcaagggcagaggcaaaaatgtctacagactgggtgcttggagctaggctttcttgcagaaaacaaggttctctacaatcagaaagggtactcctggatgagcaacgctggaagaaacacctcagaaaagacgtacactgctctatctgacctgtaaatgagaatttcaacacctcccccaagcctcgcggcgcggcgcgtgatctctggttcactgcccgggtccgtggggcagggcgcgccgccagcgccgttggggctcaggaggctcctctgcaggctcgtnctgcgccgtagtcctcgtattccgctgtccgctcgggctccaccggcacgatgaagggctcgcgctcaggcaggtaggccccgccctcgggcacgtaaggctctgtccgattcaacattacaattatggcatgatttggaaggnnnnnnnnnnnnnnnnnnnnnngcaaaagctaaatcatcacccgcggtgatggcactccagtcttaatctcataactataaatagataagttacaatgtcccaattatttccagataatttggtgataatcaaataatgaaatggcactttcttnnnnnnnnnnnccttcaaaaatccagcagtaaacacaatcattgcacaaatcacttgggaagggtccagagactgggccaaagaactgtaaacgcagtaactaagtaggattttcgcaaatccccaagtaactgtttatgccttcaaactcctcaattcaaagaacaacttggaanagatgaggaggtgaggggaagtttcattggctcctagaaactgaactcggggggtgaaaagcaactatcaccaggtaatatacagtacatgacatcttctgtggctgtacctcacacaaactgagttacagctggtgggtgaggaacaccagtgactacagcaaaacaggaagaaaaggtgattttaaactttggctcgtgcc

SEQ ID NO: 322875 - DNA, 414 bp, Homo Sapiens
  misc_feature (293)..(293): n is a, c, g, or t
  misc_feature (393)..(393): n is a, c, g, or t
  misc_feature (395)..(395): n is a, c, g, or t
aactgaaggctgcccccgctgtgccctaaactaaaaggcaacacggcatgttcctcctcctttgcaagcttttgttaaaacaaaattattttgcaaagcatttcaaagggcaaaaggcaaaaaaatgtcctaacaaaactgccgtgcttggagctaggcttccctgcaagaaacaaggttctcctacaatcagaaaagggtactccctggatgagcaacgctggaagaaacacctcagaaaagacgtacactgctctatctgacctgtaaatgagaatttcaacacctccccncaacctccggccggcgcgtgatctctggttcactgcccgggtccgtggggcagggccgccgccagcgccggtggggctcaggaggctcctctgcaggtcntntctgcgccgtagtcctcgt

SEQ ID NO: 322876 - DNA, 355 bp, Homo Sapiens
  misc_feature (221)..(221): n is a, c, g, or t
  misc_feature (270)..(270): n is a, c, g, or t
  misc_feature (292)..(292): n is a, c, g, or t
  misc_feature (310)..(310): n is a, c, g, or t
  misc_feature (330)..(330): n is a, c, g, or t
gattttcagtagttttattgaaaaatgcctcttttgtttcagaaataaataatataaggcagtgaaattcacaatctgcagttaaaatataaaagcagcaattctatgttcatagtcttgcaaatgttttccaactacttttgataactaaggaaatattatattctgaaaaaagttcatactaaatatacaacacaaacatgcaattccctctctgcagnataatctgcaatttggggataaatgttaggtgtgtcctaaaaccagggngggtttaagggcaatatggggncctgtatccccgttggangccccttaccttccatcctncaggggccttaaggggttgtggggg

SEQ ID NO: 322877 - DNA, 836 bp, Homo Sapiens
  misc_feature (78)..(78): n is a, c, g, or t
taattgtagaaaaatagggctttttttacatcccatttaaaatagtcctgaaaaacattttttgcaactaaatcaaancgagctgatatcagaaaagcaattgccacctttccacctggagtaatgtgtgcatttttaatgctatgattatatgcttctttagggtgacacagtttctcttctggcttctataacacctgcattaatcttccttttttgctgttaaacaaaacttgctggcattatgcatcccatccactgggggtgggctgggaacaaacaggtttcgatggttcttcacaaggagacaaacaatctgaattatcttttacaaacagtgaaaatgacaagatgtttgtctctcagtatgcattttaaaacaacataaatagaatacacttcttttaacaaagcctggccttggtggctttctagcttgcagtctaagtaacgtttggtttgcagaagggattccctgggagacggctgtgtggggcaacctcacttactggttgtgtgttctccatgggaaaagcaccagatggggaagcccaggatcagatgtaagctgcaagcttctttctctcttcaaactgcttgtccactgccagagacagggcctggaggaacccctctatggtgacggtgggggcctggacatacagcgcatgagccagaaaggggagttttctcaggacccggccgctgaggccctcgctcttccttgaaatgtcattcaaaagaaggctcaattttgacacgttgttttcaatgaagccaatcatctctagctctcggagggtcagcagctgctggcgagggtatatgatctgaca

SEQ ID NO: 322878 - DNA, 840 bp, Homo Sapiens
ggggacacggggaagagacagagaggagggtaaagtgagaatcctgcccgcaccacaggtctggactgctaaccttgaatcctggtttcttaaattctgcctccgcttctgactgaggaccactggattttgaggaaactttggtcttgtggtggtgaggaggtgatgttctggaaggaaggtacctagactttgtggtccctgccaggaagtggagagtggaaatgtggaatgcctcacactcctcaactagaattcccgtactgattagtcaacagtggaaaatctgaagagatgcaagcaggaaaaagaaattaaaccaggcctgaggagcgatgcgacaggcatgatggaggtcgagtcctcctactcggacttcatctcctgtgaccggacaggccgtcggaatgcggtccctgacatccagggagactcagaggctgtgagcgtgaggaagctggctggagacatgggcgagctggcactcgagggggcagaaggacaggtggagggaagcgccccagacaaggaagctggcaaccagccccagagcagcgatgggaccacctcgtcttgaatctgaccttgtccaagaaggctggacgagagaccttctgtcccctcccagagggggaaccctggcactggcccagcagcctcttctctgagctccatgtcccagataaaccaggccagactgagaaggctccccagaggcctctgtggcctccactccgggaaagccctctgccgcaaccacaggcttcacattcccagcagcttcgcaccgtgcccaggtacactttcaagacactgtaaccacaagatgtatttatccga

SEQ ID NO: 322879 - DNA, 989 bp, Homo Sapiens
  misc_feature (828)..(885): n is a, c, g, or t
taggaagcgaggcctgggtggcgaattcggcacgagggggaggcgctgcggaccggcggcccaggcacggagaggcggcgagaccgcagaattcccgtactgattagtcaacagtggaaaatctgaagagatgcaagcaggaaaaagaaattaaaccaggcctgaggagcgatgcgacaggcatgatggaggtcgagtcctcctactcggacttcatctcctgtgaccggacaggccgtcggaatgcggtccctgacatccagggagactcagaggctgtgagcgtgaggaagctggctggagacatgggcgagctggcactcgagggggcagaaggacaggtggagggaagcgccccagacaaggaagctggcaaccagccccagagcagcgatgggaccacctcgtcttgaatctgaccttgtccaagaaggctggacgagagaccttctgtcccctcccagagggggaaccctggcactggcccagcagcctcttctctgagctccatgtcccagataaaccaggccagactgagaaggctccccagaggcctctgtggcctccactccgggaaagccctctgcccacacccacaggcttcacattcccaccaccttcgcaccgtgcccaggtacactttcaagacactgtaaccacaagatgttatttattgagctggcgccgggacttgggcggggcctgccctacagtgagcagcccacacaggaacgctcctctcgcgagcggcccgggcagggaccctgtcccaacaccaacacctccctctccagcccaatctttctgggtccagacctggcttgtccnnnnnnnnnnnnnnnnnnnnnnnnnnnnnnnnnnnnnnnnnnnnnnnnnnnnnnnnnnccagcagatattgggagaaaagcctggtcaattcaaatttcacattttttttaaaggcccatttttaagcttaaaacttggtcaattgggggccattcctcttg

SEQ ID NO: 322880 - DNA, 934 bp, Homo Sapiens
  misc_feature (108)..(116): n is a, c, g, or t
gactgagaggtgtttgcccacaggtctgaaagcggatagggaaggttaccgagcaggatagagcgttgtggacccaggacgggaggaaaataatgggatgcagaagcnnnnnnnnnaggtagggcgggaatctgcccgcgaaagttagaaaacccttcgggggaagtgtaattatccgggggtggccttgagggaggcaagctgggccggcgcgggagatggataaagtgcatcgtcttaccggagggtgcgttcgggggaggatgtagtcccccggcgggaagacttggaacgtgagctgggtcagcatggccgtgacgaagttggggtcagcgttggcgaacagcggcatggaggccgccagcttccggcagttgaagctgacgatctcctcccgcaggggcccgttgagctcgcccaggatgctgtcgtcgtcaaccatcttggagtggtaacgggcctcatagtagtcggggatcttgcagcgcaagtcacagaacagcgcgcggacgggcatgcagggacccagggggctcccccagcgtgatgttcttctcccatcggatttcagacaggaaggtctgggctggcttttgggcaccgatgtgcagcaggtagtcataaacgtccagcgccaacttctcgcgggcctggctgtcggagggcacggccgaacccttgccccccttggcgtacatgctgctccacgccgccgccgccggggcccacacctgtcaggcggcgccgcgggccgcgcttgccgtcgccatagctaccccgcgccccgggcctcaccgccccgagccccaggcgggcacggcaggcatcgtccgcgcgggggagctccagacggccgcggcggcggcggcagcggcggctccagctccggccccggccgcagggtggctttttttcctccctttcctccgcgcgg

SEQ ID NO: 322881 - DNA, 1481 bp, Homo Sapiens
  misc_feature (1298)..(1298): n is a, c, g, or t
  misc_feature (1395)..(1395): n is a, c, g, or t
  misc_feature (1419)..(1427): n is a, c, g, or t
gcagcgccagttcggcgcgctcctgcagccgggcgtcaacaagttctcgctgcggatgttcggcagccagaaggccgtggagcgcgagcaggagcgcgtcaagtcggcgggggcctggatcatccacccgtacagcgacttcaggttctactgggacttcaccatgctgctgttcatggtgggaaacctcatcatcatcccagtgggcatcaccttcttcaaggatgagaccactgccccgtggatcgtgttcaacgtggtctcggacaccttcttcctcatggacctggtgttgaacttccgcaccggcattgtgatcgaggacaacacggagatcatcctggaccccgagaagatcaagaagaagtatctgcgcacgtggttcgtggtggacttcgtgtcctccatccccgtggactacatcttccttatcgtggagaagggcattgactccgaggtctacaagacggcacgcgccctgcgcatcgtgcgcttcaccaagatcctcagcctcctgcggctgctgcgcctctcacgcctgatccgctacatccatcagtgggaggagatcttccacatgacctatgacctggccagcgcggtgatgaggatctgcaatctcatcagcatgatgctgctgctctgccactgggagggctgcctgcagttcctggtgcccatgctgcaggacttcccgcggcactgctggggtgtccattcatggcatgggtgaaccactcgtggagtgaactgtacttccttcgcactctttaaggccatgagccacatgctgtgcatcgggtacggccggcaggcgcccgagagcatgacggacatctggctgaccatgctcagcatgattgtgggtgccacctgctacgccatgttcatcggccacgccactgccctcatccagtcgctggactcctcgcggcgccagtaccaggagaagtacaagcaggtggagcagtacatgtccttccacaagctgccagctgacttccgccagaagatccacgactactatgagcaccgttaccagggcaagatgtttgacgaggacagcatcctgggcgagctcaacgggcccctgcgggaggagatcgtcaacttcaactgccggaagctggtggcctccatgccgctgttcgccaacgctgaccccaacttcgtcacggccatgctgaccaagctcaagttcgaggtcttccagccgggtgactacatcatccgcgaaggcacccatcgggaagaagatgtacttcatccagcacggcgtggtcagcgtgctcactaanggcaacaagagataaaaacctgtccgatggctcctaacttcgggggagatctgccctgctccacccggggcccgccgcacggcgaaccgtgcggggncgaaaacctaatggcccgccctcnnnnnnnnngactgggagggtgggacaacctttccaacgaaagggtccttggaaggaaagtac

SEQ ID NO: 322882 - DNA, 1534 bp, Homo Sapiens
tttttcagacaaaatatatatatttcttttaaatctttacaataaatcaagatgtagaagcttacatagggcacatttttgtttatttaggtactcaattccagctcccttggatgcaaataaccctggtgacagtgtgtacaaagtcttctctttgctttttataattttaaaagcaaataacacatttaactgtatttaagtctgtgcaaataatccttcagaagaaatatccaagattctgtttgcagaggtcattttgtctctcaaagatgattaaatgagtttgtcttcagataaagtgctccctgtccagcagaactcaaaaggccttcaagctgttcagtaagtgtagttcagataagactccgtcatacgaattccagcttcccgtgcccactgtacatgccccagtgaacaagcgagaggatcttatcgttgctgaggtctgcttgtctcattttatcacaggtcagacagcagttctcgtgcccactgaccgggaccatggattccaagtctaactttggaacctgcccctttttggaatggtgtccgtgaaagctgtagtgcaaacgggagagcatctgttgccgctgatcctgcagcctcttattttcacttcgaagcatcctcagggccaacataataagcaacactaaaatcagccctccagcaatgggcacggcaatgaccgctgcccggaaccacaactctttggaagaagtcagctcctgcaccttggtgataaggtttctgctaccatcatgctgatacctgtttccttgtcctgaggcctcacccctgggaggagagagaacatcgtgcagccctctgtaattgcacatgtcttcatgacagcattccaatgtgggtatggtggtgccagagtggtttcgggcctgtttggcttggcagatgtctgtcgtgcttgcaagagagtccaggcagccctgggtgagtggggaatttgagttttgaggatcaagaagtttagagaagcaggcggtgagctcagatttgcacatataagcaggtgggtccacagtgggcagcttcacagtagcatcgaatttcacctttggtgagcagcacggccatggcgcagagctccagctgcagccagatgaagatgtagcgggagtggcgatccattggcgccccgcacgggccgcggcgcccccgccggcttccggagccccggctcggcggcagcctacgacccccggagcgcgcagggcatgggccctgcccggagcggcgggcgccgtcagcggcggggctgggtttcgggccgctgccggagcatggagcgcggctacagggcgcgcccaggagcccagaaaagtttcccggtcccccgtcggcggccactggctcccttgccccgctcgactctagggacgcacgctagccccgggtcgggagtgggctcccggccttcagtccccgctagcggccgttctcagcgaagagagtagggtctccacagcacgcaagggtatccgccgcagctcccgcccgcgccagcccc

SEQ ID NO: 322883 - DNA, 394 bp, Homo Sapiens
ggtccatttttggtcctcctccaaaagaatggattaaaatgaagtttgtccttccagcataaaagtgctccctgtcccagcagaactcaaaaaggccttcaagctgttccagtaagtgtagttcagaataaagctccgtcatacgaattcccagcttcccgtgcccactgtacatgccccagtgaacaagcgagaggatcttatcgttgctgaggtctgcttgtctcattttatcacaggtcagacagcagttctcgtgcccactgaccggcaccatgcattccaagtctaactttgcaacctgcccctttttggaatggtgtccgtgaaagctgtagtgcaaacgggagagcatctgttgccgctgatcctgcagcctcttatttctcacttc

SEQ ID NO: 322884 - DNA, 1043 bp, Homo Sapiens
  misc_feature (38)..(38): n is a, c, g, or t
  misc_feature (568)..(568): n is a, c, g, or t
  misc_feature (573)..(574): n is a, c, g, or t
  misc_feature (576)..(576): n is a, c, g, or t
  misc_feature (580)..(597): n is a, c, g, or t
aagaaagacgtccaggtttcagtttcagcgtgctaggncctaggtgtatggtcgaaaatatatagactggtgtgaccgctagggtcaagcaggcgtggcttcatctcgtcatctgttcgtgtcggtcgatcgggctagcgccttcactcgcgtggcggctgggagactgatgggtgagtctcggtgtgattgttggcgaccctgattctggcgcggtgatctgttagggcgtagagggaagtcatttgccgggatggggcactgggagtcgagttccgctttcgtacagtgtcggatggggcgagacgcagagagaggtgtggacggtccctttgcccccgcgtgctcgtggctatgtctgctcgcttgcgctggatcccccaaatctcccatggtcgcccatgggacaggtcgggatacggttagtttgttgtagcggagcaatgggtaggatcggtgctgagcgtgcgcggagcattcttgcggatgctggtgccgcacctgtgagggggcagtcttccgctggcgtcgttggggatcagcgaggtcctggggtcagtccccttancgttnncntttnnnnnnnnnnnnnnnnnnagagccctgcagtccctgcagccgtagctgctcctgcttgagccagcgaagacgaccacgacggaaggcagggtcctcctccatgagccgtgacacccgctcccagcttgacagtggcggcgaggggggccgggctgacggcatgcggtcactgggggctgcctcctctgctgcctctgatccttcaggcggggcccaggggacctcaccaccttcttcattctcatcctcatgatcctgggccagggggatgaccctctccatgcggagcatgcggtcccgcagggcctgcagctcccggtccttgctgctgttctgcagcttcacctcctgcagaatccccgtcagcttgtcgatgtgggcccggaggtcctccacctccgcccctcgggctccctcctcactgccaccaccactgccagctccacctccttcctcctcgccta

SEQ ID NO: 322885 - DNA, 711 bp, Homo Sapiens
tttttggggaggttgatcaaaaacctttattctggtcctcatcattcaggaagccacttatgcagaacactttcttcatctctgctctaagcagcagcagctgcatccaggcttgatatggaagacagacagaaatagtggaagaccttgcagagaagagctaattgatgagatctctgcttatcccggcataggtgaaggcagaacaggaagagtgtgtgtaagtgcaaagactccgttcttcaaagctgaggcctgtgcagaggggtgaactgaaggcttcagatgaaggctcacaaaactgccccgctcggcaatcaatctaaagtaccttccagaaaagcaaattcatccacagcttctattgcattatccaagtctctcctctgaagggttttcctttttccctgctgagcgcaacagtaggcatcttttgcaatggtctccacaaacagttccgcggctcgtgccagaatgaagatggcttcctgtcccgctagcgtcacgtcgggatctgccttcaccaaggccttcactcgcgccagaggcaacctcgagagacgagccccaggcacactcgttggggcctggggctgcgaggccgctgcctccccagcaggtacctcctcctctcggggcgtcccgcttcctgccgccgccgccgccgccatcccggccttgagcgtgctgcgcgcggccgccgactgtccc

SEQ ID NO: 322886 - DNA, 1148 bp, Homo Sapiens
  misc_feature (106)..(106): n is a, c, g, or t
aaattatccggtcttttttccaaacattcgccctttcggaagtttgctgctttcatttaggaaggaaccattcccccatgggttatagcggcattcagtaccaganataatgtgtgattctgccacaaactgagcctggctgctcccatgaatgtagctcacttgtccattgtgtgggttcttatgagcatatggaggtccacggatatggttccacatctggccagaagtcatagcaaagactatacacagagacaccatggcccaaccagtcttgttatagatgaactccaagttgttccttcttaaataaagcaaacttccaacaagggacactaacagggccaaaggcaatggtaccagagtagttgggtggtctgaaaacccgaatatgaacatccgttctgtcagcaatccactttgctagttgctcagctgcaaatccaattctttggaggtcaaaagtatcagctctcttaggtctgccttttggaggaaaatgcatgaatgtaggagcagagttcatgttgagctgctgaaaaacgtctgtcccctcatcatagtccaccatactgaagaagagcttgttacaaaaagcagatgaatagcgccaggagttcgccagtatttgatattcttcattagcttgcctgcacacagaacactgccgctgaggctgaagagcagtgaacataacaatcatggaatagtttcgaggtggtgcctttataaattttcggaatttatcaccattcattcggaagattgagcgtctggaactccattccatcagctgctttactttttcagctaaaagattctcctttttcttctgtcctcccccgagctggatgcagagcagcagcagcaggagaaggaagggaaagctcccggtgggcaggtaccgcagccgccgccccgcttgcctacggcgtgaaggagcgccccgggcccccatcgcggcagggcagtgtctcctccacgcgcggtagccgtgcgcgcccagctcctaccgcgcaccacgcctgcccggccagcctccgggagcccgctggctgggccctccgggatggcagcggctttgcgagggacccgggccgcggccgaggacgcagaggaggagactgacagagcatccggttcaccgg

SEQ ID NO: 322887 - DNA, 1340 bp, Homo Sapiens
taggctcacgcctgaccaccggggtttttcaggcagtgcaaaaatgtttattctgctttcttccttggtgggtgggtcatcaggctgctttggctacgaagctcaggctctgtgacctgggcggcccgagcagtacagagcaccatggctgcccttggcctcaggagcagcaaggcacagaggtgagtcctgcatcgggtggcacggcgtgggcgtgtgagcaccggaagggaagaggcaggcgcttgccatgcctggggcacggggcctcttcagggacagagcagctccagtgtctactgagagggcacagactgacccaaacacgcattccacagccagttccttgggatattcacagcacatgcagccagtagacagctgcaacaccattaaggacacctttgagcggccacgggttcagcttcagagcaggccccacccattctgcttggggagacccttgctccaggcttcctcacaggacctggtcaaaggaaccaagtcacaccccccatgctagaggatccccctgtagctccgggaagggctgcgaagctggactgtctcaggttcccgttgaggcccagtaccctgagttccatgactccttgggggacagagcacaggagggaaaaggggaatggacttctacaggatggggtgggggacggcctgtcccggggacacctggttctttctacgcgatggccgctctggcctggggagaagctggcaaggagagggcaccgggtaaggatgggtgctgcatgacccagctctgcccaaggtggccagggagaccactatgaaggctgcctggtgtgagcgggacctggtggggtgcagagtgaggccctgtgtggggactcagggaggatgctgggcgggagagaggcccagggtgtcccctcacccatgcaggtccctgggtgtgatcatggaggactggtaaaggctgctgctgcccagtggcgaccatcaccagggtcaggagtgggggagtcagtgcagagacccagggaagggcccacttcccaggacgtttagtgtcagcaggcggagtctctccacaggctctggctggcgtgcctctacgcctcactctggtaccgcagccgggagaaccggtccctgatggcttggtcactgtctggcccaccctcacccaggcggaccaccctgctgcttgggacaaggtcccgcaccttgtgcttgatcacagagaccaggccgggtgcctctgagtctgccgggcctgtcagaaggatgtaggcggcgtggcggcttggctcaaacaggacggcgtcaaaggcgacaatgtgggtagagacattggc

SEQ ID NO: 322888 - DNA, 1353 bp, Homo Sapiens
  misc_feature (1214)..(1214): n is a, c, g, or t
tgggtggcgaattcggcacgaggaacctgcctgcacgcagcctgggtcccagggtctggaggtcgtgcccccaaaaccacagccgaggcctaccacgcgggcatgtgcagccgggaacggcggcgggtacagcgagccttcatgcagggccagttgcgggtggtggtggccacggtggcctttgggatggggctggaccggccagatgtgcgggctgtgctgcatctggggctgcccccaagcttcgagagctacgtgcaggccgtgggccgggccgggcgtgacgggcagcctgcccactgccacctcttcctgcagccccagggcgaagacctgcgagagctgcgcagacatgtgcacgccgacagcacggacttcctggctgtgaagaggctggtacagcgcgtgttcccagcctgcacctgcacctgcaccaggccgccctcggagcaagaaggggccgtgggtggggagaggcctgtgccccaagtacccccctcaagaggctgagcagcttagccaccaagcagccccaggacccagaagggtctgcatgggccatgagcgggcactcccaatacagcttaccgtacagggtttggacatgccggaggaggccatcgagacttttgctgtgctacctggagctgcacccacaccactgggtggagctgctggcgaccacctataccccttggcgtctgaactgccctgggggcccctgcccagctccaggccctggcccacaggtgtccccctttggctgtgtgcttggcccagcagctgcctgaggacccagggcaaggcagcagctccgtggagtttgacatggtcaagctggtggactccatgggctgggagctggcctctgtgcggcaggctctctgccagctgcagtgggaccacgagcccaggacaggtgtgcggcgtgggacaggggtgcttgtggagttcagtgagctggccttccaccttcgcagcccgggggacctgaccgctgaggagaaggaccagatatgtgacttcctctatggccgtgtgcaggcccgggagcgccaggccctggcccgtctgcgcagaaccttccaggcctttcacagcgtagccttccccagctgcgggccctgcctggagcagcaggatgaggagcgcagcaccaggctcaaggacctgctcggccgctactttgaggaagaggaagggcaggagccggnaggcatggaggacgcacagggccccgagccagggcaggccagactccagggattggggaggacccaggtccgcttgcgacatcccgccagttccctgtccctggaggcccagaaggaagaagttctctccagccagggg

SEQ ID NO: 322889 - DNA, 451 bp, Homo Sapiens
gtcttattcttttaaaaggatggagaaactcctaatttcttgatttccttccttgtgaaggttccccatgacattaaggaatgccttacccacatcctcagtgcggccgttggataagcggaaagaattggaatggctcccagcttgcttgtatttcttaaacctaatgagaaaatgatcacagtgaagaatggagcacagaggtgggagaggcaaatcacacctctgtattcctgctcatcaattcagcctttctaaatcgcctttaaaaataatcgggcttttttagagacaggtcatgcacaccctgaggcagcagcatgctgggtgtgaccgagtacctcgggatactcctgtttacccttggcacactggaatccaaccagggaaccccaacagtatattcaggctcatgtggctcactgcagagcacagccacaccaggtagaga

SEQ ID NO: 322890 - DNA, 1423 bp, Homo Sapiens
tggtaccggtccggaatttcgggatatcgtcgacccacgcgtcgcagaaactgggcctgactgaggatcagttcatcaggacccccaccggggacgagtttgtgaagacctcagtgcggaaggggctgctgccccagatcctggagaacctgctcagtgcccggaagagggccaaggcctgagctggccaaggagacagaccccctccggcgccaggtcctggatggacggcagctggcgctgaaggtgagcgccaactccgtatacggcttcactggcgcccaggtgggcaagttgccgtgcctggagatctcacagagcgtcacggggttcggacgtcagatgatcgagaaaaccaagcagctggtggagtctaagtacacagtggagaatggctacagcaccagtgccaaggtggtgtatggtgacactgactccgtcatgtgccgattcggcgtgtcctcggtggctgaggcgatggccctggggcgggagggcgcggactgggtgtcaggtcacttcccgtcgcccatccggctggagtttgagaaggtctacttcccatacctgcttatcagcaagaagcgctacgcgggcctgctcttctcctcccggcccgacgcccacgaccgcatggactgcaagggcctggaggccgtgcgcagggacaactgccccctcgtggccaacctggtcactgcctcactgcgccgcctgctcatcgaccgagaccctgagggcgcggtggctcacgcacaggacgtcatctcggacctgctgtgcaaccgcatcgatatctcccagctggtcatcaccaaggagctgacccgcgtggcctccgactatgccggcaagcaggcccacgtggagctggccgagaggatgaggaagcgggaccccgggagtgcgcccagcctgggcgaccgcgtcccctacgtgatcatcagtgcccgccaaagggtgtggccgcctacatgaagtcggaggacccgctgttcgtgctggagcacagcctgcccattgacacgcagtactacctggagcagcagctggccaagcccctcctgcgcatcttcgagcccatcctgggcgagggccgtgccgaggctgtgctactgcggggggaccacacgcgctgcaagacggtgctcacggggcaaggtgggcggcctcctggccttcgccaaacgccgcaactgctgcattggctgccgcacagtgctcagccaccagggtatcccatctgaatgcccctggaggagcgcttctcgcgcctctggacgcagtgccagcgctgccagggcagccttgcacgaagacgtcatctgcaccagccggggactgccccatcttctacatgcgcaagaaagtgcggaaaagaacctggaagaccaggagccagctcctgcgggcgctttccgaa

SEQ ID NO: 322891 - DNA, 1636 bp, Homo Sapiens
  misc_feature (114)..(128): n is a, c, g, or t
cgtttggttttcttgtgttgttgtgttggacaaagaaaaaaagggtagtaccaaaagcctccctgcaaggcaatttccaaaaggacatttccacaggtttccttcgtcttccgnnnnnnnnnnnnnnngctgttacacagaagagactagttaagtgtaccattgaagactattatgcatcacgtgcctacgttcatcaggccttaagccctcaaagaacaacagcatcaggggctctgcgagagccgccacctgagcctcaccgcttagttcataaaacagccctgtgtcctttctacaaagccaggtcgtgttttctacccacagttcaggactccagcgtagacagcaaacacaaaacttgtttcctttttgaaacaaaacagtcttagtagaagcaaaacaaacaaccacaatctaaaccagccgcgaggaactctttcctagctggaaaggagaatgtgtcgccagcgattcggagtgaaaaggatgggaagatgcctgtgccacacccttgaatgtggtccacagattcaccagctccaaggcagcatctctttccaaagcacctgcaagctaggaggctgtgtggggcaacaaagtcactcctgatacagagaatccccccccgcccgccgccatccaaatggcgtccatgcacagcttggcccctccgcttctcaactgtggctcatgtggctttgttagagtcttgggggtgaaaggtgtgagagacaggagggagcgtggctcaagtggggccattcagtcgggcggccgggtgtcgggggcccttctcctgggacttcatcatacctgcggtgggggagtcaaaggctctatcgaggggggagggacgtttttgtctgggaggttgatcctaaagtctttgaggtgaagcttttcagatttaatccttcgaactttcagtggtttcagtcgtttggccaacttagagttctgcctgtcaggggggttcccagggctggcctccacgtcagccctggtggatgtgggggtggtctcgtcgagccccgtcagtgactcataggacgggagagagatgctcaacctcgggttctgctcctctccccttgcttctgagtagtttgtgttcatcacttcctcgtagctgggaacatagtaccttgaggcagcctcctcatcctcctcttcttcctcctggctgtcttcctcctgggcgtgaggcccagcgcctgtcgggtgctggacatgggccaggtcctcgccctgccgctgcttcctcttatccctgatactcaggcagatagaaagcagcagcagcatcaccccggccccgaccagcacgtaggccacagagaaggtcttgctcttgaggatgccgccacccacctcggtcttgttgctgccctgagctgttggcttctcggccgcgctgaagccgggtaccaggttccacatggccatgatcaccccaaggaccagcatccccaggccgatggcggtcagcgcatagtgcgagccattggccttggactgggccatcatgtcagtgggaggagggcgaggcccagttccaagaaagaaaataaatatatacaaggcagcagtcacaacaaaaaccccttaaatgcgctccacaaaatctctcgcc

SEQ ID NO: 322892 - DNA, 900 bp, Homo Sapiens
cccccacgggggccctttgttttctttagaaggtgggaattcacctctcccctcgggtatgaaactcttgcccaagggcagggtgggacctcagggtcatgcgggggcatacatgtaatgtgggacctcaggcgtcctgtggtcaagccgggccacatactcccacacagacctgcacggcacctggcccctgcgttccgccttctcctcattacagcagccccagctcaatgcgctcatagtcagagtcgagcaggcaaggtccggaaacggcgggacagagtggtggtagccgaggatcttgaggtagaactggctgaactcaaactccatggggaactgcaggtggacgtggtgtacgcagtccaggaactgcaggaagacgggtgtgaagccgctgctctgcccggccagggtgtgagctccacggtggctgaagcgatggccgaaggacagccactccttctccaccagcaggcgaaagccctccagcgtgcggtagaaggggtctcgagagcaggctgcaccaaggataccacctgggtggtgatgtcccagccatcctccaggcccaccagcacggaggagcctgaatccaggagctccaccaccagcacagacacctgcagcagcttgtggatctggatcagccactctgagtcctccagtgagcgcaggaaggaggctgggctgggctcagcagcggggcagcctgggacacatgctttcagcagcttcttgaagctagccttcacctgccgtgcctcgaatacctcaatgggcaccagctcccactgctgcagggggtctgaccgcacacccttgagctgggctttgtcccgcaaggatatagagggctgctcgctgcggacgcaggaagcccgggtcgggagggccccc

SEQ ID NO: 322893 - DNA, 990 bp, Homo Sapiens; identical to SEQ ID NO: 150906

SEQ ID NO: 322894 - DNA, 910 bp, Homo Sapiens
  misc_feature (547)..(567): n is a, c, g, or t
  misc_feature (590)..(728): n is a, c, g, or t
  misc_feature (747)..(826): n is a, c, g, or t
  misc_feature (860)..(861): n is a, c, g, or t
tgaattatagaaactggtttatttctggcagaaagctgcagtgccacctggagttccaaattttaccattctttgtaaacagttggatggattatgataaagaagatgctaccaatgaaatagaaaaccaacgagatgagaagactgtgatcctcatgtactcagaggcacttccctcctaagtcaaagaccatcctcactgactatgtgccaacgcctcgtttcaggcttgtgactcaacaaagggcttttccattgatagaagcagtttgggatttgtagttgcgacttcttcgatagttacctgcacgtccattgctggcaactgacttgtcattaaaacctggctctttggttaagggagctacgctgtggtttattcttaagttacgtggataaactaacctctaacagaaatatactttggttaattttgaaatgtgtcatttttaaacaatcttaaaagtaatacagaattgtgatttattaattttaaaacattcagaacttgttgaaagaaaaattatatctgaatcaagattcatgnnnnnnnnnnnnnnnnnnnnngatacagagtctcactctgtcannnnnnnnnnnnnnnnnnnnnnnnnnnnnnnnnnnnnnnnnnnnnnnnnnnnnnnnnnnnnnnnnnnnnnnnnnnnnnnnnnnnnnnnnnnnnnnnnnnnnnnnnnnnnnnnnnnnnnnnnnnnnnnnnnnnnnnnnnnttttagtaagagacagagnnnnnnnnnnnnnnnnnnnnnnnnnnnnnnnnnnnnnnnnnnnnnnnnnnnnnnnnnnnnnnnnnnnnnnnnnnnnnnnncaagttacaggggcgtgagccactgcacctgggnnctcatggtttttttaaataaattgccctttttataattttacccctttt

SEQ ID NO: 322895 - DNA, 1368 bp, Homo Sapiens
  misc_feature (199)..(200): n is a, c, g, or t
  misc_feature (203)..(219): n is a, c, g, or t
  misc_feature (236)..(237): n is a, c, g, or t
  misc_feature (240)..(240): n is a, c, g, or t
  misc_feature (244)..(337): n is a, c, g, or t
  misc_feature (582)..(582): n is a, c, g, or t
  misc_feature (624)..(624): n is a, c, g, or t
aactgcaagggtttagggcccaaatttaatttccagggcccctcttgtactgccttgtgataaaaaaccccttatttgtccctcggggggcccttctgggttttattatgcaagacttggtttccctccccgcgtttttctattgcccaaaatacaagcgttttccctgtgccctggtggtcctgggggccccccaacnntcnnnnnnnnnnnnnnnnngggtccgggggcgctannganatgnnnnnnnnnnnnnnnnnnnnnnnnnnnnnnnnnnnnnnnnnnnnnnnnnnnnnnnnnnnnnnnnnnnnnnnnnnnnnnnnnnnnnnnnnnnnnncaagaggtaataggtgtttattaaaaactttttcacccagaggcagttaacatttataacttaaaacccagcccactacaaaaagggatgggagcaataaaaactgtgcaacattgaccaaaggacccagacagacgaggcccgggaagggcagcccaggggactggggtctctcctctcccggaggcccagagcagctgcattgtggaagccgggatgcccccagccccctggcggggcccttnttgcaccggcctttccggttggggcagggacccccgaaaggnccatcagtagtagtgtgtgctcatcgcgcagcctggacgctcagccactcactctccgccattgctgagggtgcaccccccgggggctggatgtgagcgccagttgcccgctcccgcggtctccctccagtgtgctctggatttccttcaggactctctcatcactgagcagagcgcgctccatcaccaggccgggctgcttctcctcgccatcactctgagtccctgagttcctggctcggctcggggccttcttggggcccgcaccgttaccagggcggtggttcttggtttctgctgaatccaccagacaccggggctccaccagccacttggtggagagagagaagcgctcaaactccgagggtgagatcaggtagaagccttggccatatttggtgaagacgcaggaggcgatgccactgacgtcctcccggcggatgcagctgtagcgcacctggggcttgagcaggggcagcgagaccacctggatgtcgcccaggttggtaaggactgccaggtggtgctccccgtagtcctcggctcgacgactgccgaagtgggccacgctgacccgccgcactcttgagccctccagggccgtcagcttcaacttcagcttggcactcaccttgggcagcgtgaacaccttgaactgctcctctgatacgacgagcagctggtggcttccctgcatgtcagggctcttcgacagatcctcgtgccgaattcgccacccaggcc

SEQ ID NO: 322896 - DNA, 1648 bp, Homo Sapiens
  misc_feature (36)..(36): n is a, c, g, or t
  misc_feature (48)..(48): n is a, c, g, or t
  misc_feature (68)..(68): n is a, c, g, or t
  misc_feature (197)..(197): n is a, c, g, or t
ctgcctcaagtcaagtcaaactccccaggaactccntggcctcggtgnaagggttgaacaccctgggncccaggtccccatgtgggcagtgcgaagcccaactggcaccctttctggctctggaagtggtggcgacaggaccctggcccgcagggtgggagggggcacagtcacgcccgggcccccagctcgctgantgcgctgtcgcaggtgaaaggcaaattcaaacatggtggccgcgaggctctggtggatgaggtaccggggcaggcggcccttgagatctgtattaagaatccagacaaaggtgcaaacacgggggttactggccgacttgagcacgatgaagcccccagggccattctctccccggacatatttgtgcgtcgggggcttggcactgtgtgaggtggcgatccctgatgacaagtatcggtccctgcgccgctcaatgcgccggacattcacgaagtcccttggggagaccacgccgcccggcagcccctgcagacacgtcataggagatgagggtgttgtcttccactcgctgcaggatctggcaggcagtcactgtcttgttccacagcaccatcttctcgggctgcaggatcacctcctggtacacgagctccgcaggacagggcaggaaggtcttcaggataaacgtcttgccgtgaaagggaacttcaatggtgtacacggtgtccccatattcattattcttctcaaactttccagttctctttcctgggccaagatctggtccacccactgccgttggcctccttccccctggcggatgtactcccgctcctgagcagagaaacttttcttccccagcaacttcttcatctgattcattgtcagaccctgcaaaggattctgggggtgaatagaactgtccctcggacagagcaccggagaacagcaggggtccacgggcaacagcaacctgggcggcaagataccatcgctcctcttcagcttcctggggtaggactttgaagtcaaggaaccaggtctccaaccaggcgaggacaaaagagacgatggggagcaggtagccaaatgcccctttgctgagcagctcagagaggatgaccttgacaatgaggaatgcactggacaccagcgtcgtgaccgcaatcacccaccagtgccggagctgcagcacggcatagcctaggagcagtccagagaagcggaagaaggccaggacaaagatgtcgaagaaggaagttttaaagttgtactggatgatctcctgctccaagttcttacggatgcctgtgttggtattcagttcgatgatccagagcagggagatgaagagcaggtcgaaggtgacgaagagacagaaggtgcggcggacatcagagatggcccttcgcttctcaggcggcggaaggaggtgcgaggagaggctctggctgtgggacagtgaggagcccagggaggccacggcaggcaggctgcgctccaagtctcgggtcagctccctgggcagcttgctcatcctggtgggcccccacctcagggcggggagggcgcggcctcagcagcagggctgctccatgtcagccacggccccggctcttcccgccccaaccgcagtccggctccgcggcctcagtagcgcctcagagcg

SEQ ID NO: 322897 - DNA, 1275 bp, Homo Sapiens
  misc_feature (149)..(149): n is a, c, g, or t
  misc_feature (154)..(154): n is a, c, g, or t
  misc_feature (156)..(177): n is a, c, g, or t
  misc_feature (179)..(186): n is a, c, g, or t
  misc_feature (188)..(236): n is a, c, g, or t
  misc_feature (238)..(243): n is a, c, g, or t
  misc_feature (271)..(271): n is a, c, g, or t
gtggggggaatccccagcccttttgtttttggcccgggttttctttttggggaaaacagtttaggcccccttttccctttccccctatggggccccggggcccaaaagaaatgtttttgaaaaatttttttagggcccgaggccgcccnacaantnnnnnnnnnnnnnnnnnnnnnntnnnnnnnntnnnnnnnnnnnnnnnnnnnnnnnnnnnnnnnnnnnnnnnnnnnnnnnnntnnnnnnttaaataatcattttaatgtgtaaatcntgaatatatcatgttagaagatgaagtcgatgtatttagcattatctgtcttgggatatttgacgtgtagatgactaaaaatacacttgtggtcgtttcttcactttgtattttagtgacccgtacccgcacctctttgcggcctttggtggttttcacagatttcatgctttgcgatcttcgaagccctttgtgtgttaacatctcattatctgaatatggcccctctgcttcttcatctgttttctcatctccgtctttcaagtggaattccataacctgctgattcactggggggctggtttacttttcttttttgcttctggtagaggttggtatggtctttgtcccacaggctcatcaccttggatagttgttaaatcatgcatactgaagcttcttaaacgttcagttattgctccttggctctttactgctgcagtaacagcagcagtagctgcaaggtttaaaccttgccgtccaaagtttaccatggtttcatagcctcgttcctttgcttgtacaatataatcatcaatctccctttcctttgaagaaagaagtggatgaaggaattttctatatattaaacttgctcctttggtatagggagaaagcagccatatgacaaaagcaatcttcagctcatagtacaggggaaaccaagcaactgtttgatcggctactgtttcaatcacagtatagagagcaaaaacaatccagtacatcatccatcgaacatattccttcacgttttttgttttcacagctttgtatgaataatatgcaggataaagcattccaaacaccagcaccacggctctggagatcatccaggacaccatcttcacgggggcttgggccccacgtccggggcgggtgggcgcagggcgctgcggaccaggccgccaacggcaggccgcgcgcttcgccggctcctcgcgctccccggggccgcgctggcgccctcaggagccgggcccggtgtgtgcgcgcggcggcct

SEQ ID NO: 322898 - DNA, 920 bp, Homo Sapiens
aagtggacgtggccgcggggagttcaaattttcatgggagtgttggagcccgcagtcattctggaggctgtagtcgtgggagcaatggaggcccacagttgtactgggaggctgcagtcgtgggagcactggaggccacagtcatactggaggccgcagtcgtaatggaggccgcagtcgtactggaggccacagccgtgggagcaatggaggtcacaccatcagctgcacctcctgaagttgctggttcactcacatctgtcctgcttgtgtcctctgttgtgacttccatagagttgaggtgggctgccgaagtccctttggtcaatgtgacaggagaagctgctgccatggttacatcctcagacgttttattatcaactgtttccacagatgcattcctcttgactaatcccttccacattttgttagggacaaagttgcgtggatcgttggatgccgcatggctttcagataaggacaaggagaaaatccaaatgagcacaagagctgtccacatcttgtgggtgatctgggagcaaggctgggcggtccccgaggctcccagccagccagctcctcaggctgctaatggttccctcctgcttggccaagggatcagaggctgctgctaaggggatgctcccagcctggaccatcttcctccttggagagctgtgggcttgacactgtgtcgctgggcgaagtctggctttgcagggggtgaaagccacgtggtggggcactcccgggccatgccatcctttgtggcacatgtgagacgaaggtagactctccactctagtaacagacgcatccgggcgcagcaggcccccggcggcctggtggccctcggacagtaggaaggagcctgaggcccggcgcggggacgtggccggcagcgcaacccaggcagctcc

SEQ ID NO: 322899 - DNA, 1369 bp, Homo Sapiens
accccggggccaccagggaccggtgttttttcccggggggttttagaaggggcccttttccccataaagggcaaaaatttccgttgggggggaaaagcggttttttctcattcaagggcgggtttttccaagaagaatgctcacaaggtccccctttcccccctttttggaaagggggctttttgtattttccaaaccggccctccagggcaccaggtttccccataggaagggcttctccgctaggagccaaacctccggtggtatcaaaagtaggcaggccccattggaggacatagccgtaaccgttgtccaccaatcttctggacaaagttcacaatttctggcacatactcactaacccgggttaagacatctggagggagaccattcagagcttccatgtctctgtggaagtccccctcccagaacttgggcagcttggagaagatggaattgtcagtgacatcacagccaagtgtagaatccagccagtcagagagcaaatccttggcttcttccagcaacacctccacacagctgttgacttcctctccccgtgagtctggactgcacagctttctcaagtggctctgtggcaagctgcactgcgtgctgaatccgttcgagcatctgctttttatcgggatccgtggtctcatttaattttactgaaaatggcttcagggcggcctgaacatcctccaaggagctgtgccgcttcaggcctcttctcccgatactgctcgaacaggtggttctgccgggccctcttgatgatcttgtcatcaatatccgtaatgttcatgcaataaaagacatcaaatttgaagtaatccttcaacactcttctcaagatatcaaaagagatgtaggacctggcgtgccccatgtgagatgcgtcatagacggttggcccacagcaataccacgtcacctttttcccatcttgaggtatgaacacttccttgttcctggtgaggctgttgtaaaggtggagtctgcatggctgggtcccagcaggaggggaccactggggctgcacacgccggcctttgcttgcttggagcctgcagggctggcctttgccacaggggctacccaggagcgcttctatgtgcctgaaccaccgagccacgtggaagagctgggggtcagcgggcggggccgagagctgcctgaacgcgtccacgtctgcctgggacagtgagtacccctggacatagctacgcgtgctgaggtgctcgttcagggcttgtgccctggctgcctcgtcactaatgctcagaatggacctgtagtcaggagcctgctgcccggaggaatctgccatggctgggaatcccggacccgcagctgcggctacaga

SEQ ID NO: 322900 - DNA, 1431 bp, Homo Sapiens
  misc_feature (920)..(980): n is a, c, g, or t
  misc_feature (982)..(982): n is a, c, g, or t
  misc_feature (985)..(988): n is a, c, g, or t
  misc_feature (991)..(994): n is a, c, g, or t
  misc_feature (996)..(1000): n is a, c, g, or t
  misc_feature (1002)..(1010): n is a, c, g, or t
  misc_feature (1014)..(1016): n is a, c, g, or t
  misc_feature (1019)..(1035): n is a, c, g, or t
  misc_feature (1039)..(1039): n is a, c, g, or t
  misc_feature (1042)..(1042): n is a, c, g, or t
  misc_feature (1220)..(1220): n is a, c, g, or t
  misc_feature (1329)..(1329): n is a, c, g, or t
gctgggtggcgaattcggcacgagggctctttgtggatgactggctgagccaagggagacgccagagcatcctctgaagcagattaagtttttgctgggcaggaaagaagaggaggcagtgctggttgggggtgaatggtctccttccctggatggcctcgacccccaggctgacccgcaggtgctggtgcgtaccgccatccgctgtgcgcaggcccagactggcattgatttgagcggctgtaccaagtggtggcgctttgccgagtttcagtacctgcagccgggacccccccggcggcttcagacagtggtggtgtacctgccggatgtctggaccatcatgcctactttggaggagtgggaggccctgtgccagcagaaagctgcagaggcagctcccccaacccaggaggcacaaggggaaacggagcctactgaacaggcacctgatgccttggagcaagcagcagacacttctagacggaacgcagaaactccagaggccaccacacagcaggaaacggacactgatctcccagaggcccctccaccccccctagaacctgctgtcatcgcacgccctggctgtgtaaaccctgtcccctccatgggattgtggaggatcggaggccaaaggaaaggatctcttttgaggtgatggtgctggccgagctgtttctggagatgctccagagggattttggctatagagtttataagatgctactgagccttccctgaaaaggtcgtggtccccacctgaacctgagaaggaggaggcgggccaaggaagaagccaccaaggagggagaagccctcaaagaggaggtggtcaaggagcccaaggatgaggcacagaatgagggccggctaagagtcaaggcccctgagagatgcttgcacatctcgggagagcnnnnnnnnnnnnnnnnnnnnnnnnnnnnnnnnnnnnnnnnnnnnnnnnnnnnnnnnnnnnncnttnnnnggnnnngnnnnnannnnnnnnnaaannnaannnnnnnnnnnnnnnnngggnccnaaaagggcttttcttgggaggggaaaccctggttgtgttgggaagaattggggggcccccgcgggggaaacccccaaccaaaaacctagggtggggggctcctcccctcccaaggggggggaatgcacatcgtgttgaggcaaaaggagaaggggaagtgttattttgtcttcgggcnagaggcacacacacacatgcggctcggggggaggttacctcctagcggagggggggcgggctccccccttctccttgttttttctctcccctccacaaacccccctttnaaaaaaagaggaaaaggggggggcgccccttttctccctcctcccacttcttaaaaggagagaacaccctgccgccacaacgagggggagaagcggggggga

SEQ ID NO: 322901 - DNA, 501 bp, Homo Sapiens
acagctatagaaaagttcaaaaggtaactactatatttggaagtattattcacacatagtgtcttgcatagagtagaccttcaataaaatatatgtgttaacgaagattatactttcaaatgaaagtaatatttgcttgtttgtttttaaacagatagccatcacaactcaatgtaactgcatgcactttcttgtcgtcatttggaaccaggcttctatcaactactatactagtcgaggggctttagacctttcctctgaggagggctggcatctcttcaggtttaacagagaagaactcctggacatggcatgggaagaatgaaagaggctttgtaacaactcatcccaacacagcctccaacatttggactgtcacctgagtctaacagcagtttgactttgttgtacaatacagcaagtgatcatcacattcttgtttgagcagatcttttattttgaaacagattttgtagctctagtcaactttccattatccaa

SEQ ID NO: 322902 - DNA, 1537 bp, Homo Sapiens
  misc_feature (159)..(159): n is a, c, g, or t
tccccttaaataattttattggggagggaaaaggcaaaaacctgcaaaaaacattagtcttttgggcattccccattttggtttcagccagtataattaaaacccttatatttgttttaaaagataaacagtttgaaggaaatttaataaatcttgttngggctctgcaaaggagcccctatatcaaagcatttaactggagctgttgagttcctgctggtagaatattactcccagcctatttattagcttgtcttccggtggcccaatacatgcttttttccctctacactgaatgaaagtacaaaaagaaaaccatttcttttctctttttcccccagcatcatgcaaggcaaggcaacaccacaaatacaataactgaatttactttgattatactttagtttcttacacttaaaattattttgtattataatacttccttggttatctaaaatcaacattgttgattttaaacggttataaagccagactttaagaagcatttaaaacaattcatgaactctgtatgaaaggaaataattgcctccagcttattcttttgcatttgaagtaaaagaatttccagtatcatcagtttactagaaaataagacttagggggtccatataatttattcacatctttttatacatcgtaaacaaggataggatacttctgacagtagcctataaagattttttaaaattttatccttcagtatagaataagtgtcaagggagcactttaagcatgattctggtaggtctgttaggagtctattttccagaaaaattttgtaggaaattgttctgattttaaataaactaaattcatagatttgtgttgacagaatatgatttgtgaggtaaagtcactgtattatctccggtctaaagcacaatgtagcatgtgcaaaagaaactaaagagacatgtatttcaaactccaggcagaaaggcagaatataagagtgcatagagaagagagtgcttttcaggtcagatagtgaaggaagacacaatagttacctaaatcaataagctgtaagcaacatataaatatgcaatgccatttcactgaatgtgaacaggatcaattagaaattgtactgtgatatccacatatttttgagaaaaattcccaagccaggcgaatgtggattggaataaagacataggcagtgtataccaccatagcaataatggttagtaagatggtgttaaacatagatcgctcccagggctctaaaacagcacagcagctaatgatttggtattgatagtagagccaggagaaatattccttcacacgcctcaaatccatggttggctccttcaagctgcagtaagtttgtcctaagaaagtccaggtctggttcttcagccttgctccttcgcgaaatgatcctgtgtgggttagttctcctctctgggttgctgtttcctcatctcccagttgggtgtatctccctgcggcttaggtgagcgccgaggctttggctcctccccagctgctgcgagcttcccactgcccc

SEQ ID NO: 322903 - DNA, 779 bp, Homo Sapiens
  misc_feature (74)..(74): n is a, c, g, or t
  misc_feature (369)..(369): n is a, c, g, or t
tcaggggctttccctgccagggtagaaggaccccggccattccccacaaaagggtggacagggcttggctgagnctgggcgggtaacaccctgggggccacagggtggggtagaggcgggaaggctctccctggatgcaccatgggtcagataagtcattttgccccagatcatcccactggaagaagtccctggtccccctaggatctcgcggacctcctctttacaacgatgctggtgctcagggtacagggccatgcagtagagaaaccaggagataccactggtggtggtgtcatggccttcaaacatgaatgtgtccacttcagcccggaggtctgcatctgacagtttgatgtcatcttcatncccgggcacccagggagaatgtccaggaagtccaggtgcttccggttctggatcttcttccgcactttctcatcctgcagggctgccttccgctccctgatgacctggtctgtatggtcatgggccacctggcaggcccgcaggaagcggcggccatgtggggtgagccagtagatgaagtcattatggtactggaaggacacaaggcgctgctgcatcaacagagtgagatcgctgactgcaaggtagtagctgctgtccctgctgtggcccaggccggtgtctcctcttccaaaggtgcacttcatgagtgtgttcagcgccatgtgacccacatcgcagaagatgtcaaaggacttaccctcccgagctttctcttcccacttgtccagcatgatacgtgtagactc

SEQ ID NO: 322904 - DNA, 1175 bp, Homo Sapiens
  misc_feature (1144)..(1144): n is a, c, g, or t
tttaacattggtaggaatttgtattttttgcctttgttcagaatacatgacattggtaaatatgccacatgcctttggtggaagtacaactgttgttattactctatacaagtatgagatcagggttaggaaaaaaagacaaagaggtgatgacagacacacagtggaaaccccacatcgtctcatggcaaaccgaagaacgggatgtgggaagctcagcttcatttgactgcaaagtcccagggttttgttgcacatttgctcatgcacatgggtggtgggaggaaagggggatagcaaagacacacagaagagggtacagggtgggtgagaaagaaagtagaagggctaatacccccaaagaacaaggccaactacacctggtgagcctcagagggacagaaacccagggaatgattcctgtgatagggctgggagagccaagaggacggattcgctcccaggcttgggacacatcgaggacagtggtggttcttctccagcggtgaccccctgcattaggccaaggaggagcccagaggaagagtggagaccttcgaggggggccgttgggagggtactgactgctttcttccagctcttcaagtcccgcccttgggcaggacgaagggaatgtgggaaacaagggcgaagggaaaggaaggatggttttgagcaatgaaatgctgctgcatggaaagtgggcatccagaccctgcccagcatggcctcagcctcttcctgttcgtggaccgagggaagaaggaataaagggccatgggcattcttcgctctgctcccagcctgccctcctccccttgcacctgggcttatcccacattaatagcccatcctgaagctcagcaattgccccgaagataggctgagcagatccccatcctcaggttccactgtctatacacacaaaccatgcaaagaggaggaagagaaaggaggcaaagtagaattcagacaggaaagggtggttcaaaggggaatatactacaggaagaacagagaggcggctctcaaggagagggccccatgacagcacagcaatacacaagcacacctgacacaggctggcacgcctcccccaaggtggggctggtgggtctacatgacttctctgcatcctgaggantcggccgggccccaggaagaaccacttgcct

SEQ ID NO: 322905 - DNA, 1237 bp, Homo Sapiens
gtgtttgcctctacctctaagtgcggaaaggataagaccaagtctgtttcttccaccatcttcttccactgtgaccctctggtggaggacgggatccccgagttcagtcacgagactgccgactgccagtacctcttctcttggtacacctcagccgtgtgtcctctgggggtgggctttgacagcgagaatcccggggacgacgggcagatgcacaaggggctgtcagaacggagccaggcagtcggcgcggtgctcagcctgctgctggtggcgctcacctgctgcctgctggccctgttgctctacaagaaggagaggagggaaacagtgataagtaagctgaccacttgctgtaggagaagttccaacgtgtcctacaaatactcaaaggtgaataaggaagaagagacagatgagaatgaaacagagtggctgatggaagagatccagctgcctcctccacggcagggaaaggaagggcaggagaacggccatattaccaccaagtcagtgaaagccctcagctccctgcatggggatgaccaggacagtgaggatgaggttctgaccatcccagaggtgaaagttcactcgggcaggggagctggggcagagagctcccacccagtgagaaacgcacagagcaatgcccttcaggagcgtgaggacgataggggtgggggctggtcagggggtgaagaaggcgaaggaaagggaagtccagcttctgcacagcagaaagacagtgagctccaccaagctggtgtccttccatgacgacagcgacgaggacctcttacacatctgactccgcagtgccctgcaggggagcacggagccgcgggacagccaagcacctccaaccaaataagacttccactcgatgatgcttctataattttgcctttaacagaaactttcaaaagggaagagtttttgtgatgggggagagggtgaaggaggtcaggccccactccttcctgattgtttacagtcattggaataaggcatggctcagatcggccacagggcggtaccttgtgcccagggttttgccccaagtcctcatttaaaagcataaggccggacgcatctcaaaacagagggctgcattcgaagaaacccttgctgctttagtcccgatagggtatttgaccccgatatattttagcattttaattctctccccctatttattgactttgacaattactcaggttttgaggaaaaaggg

SEQ ID NO: 322906 - DNA, 1197 bp, Homo Sapiens
  misc_feature (101)..(101): n is a, c, g, or t
  misc_feature (305)..(305): n is a, c, g, or t
  misc_feature (317)..(317): n is a, c, g, or t
  misc_feature (518)..(541): n is a, c, g, or t
cagcacaaaatttccccagggaaagtctttcttcccaggcccttggcgcccagcatggaaggaggagcttcgggaggacagggttggggcctcccgggttntgacaccacccccatttcctttccttagcaccatggggtagggacaggcagctttgaacagaggaaacaaaactccaacttccctccaaactcctatgcaggcaggtccatctagtctggtacttctggcccaagggttttctgctccttccaaacctttgagctttctcaggacgtgagcttagctgagacttctccaagagngggctggagccnctggtctctgaggcacagtgggcctgggaaacaggcaagagtctggttccaaagtttttcccagcccaggcctctgccttggcaagcaggaagcagggccaggtgagagccggtgagacccaggctcagaggggccgggtggtgtggttatagaccaggtgctccgtgtcctcggtagtggagacagtggagctggcaggnnnnnnnnnnnnnnnnnnnnnnnntccgtggaagtcctttctctggttcttgaagaagcagtaacccaagatggctaccaccaccacaatgcagatgaccaggaacactgcgacagccatctccacagagcctgtgctgggaatggggatttcccgcctcaggccaaacacatccttcttggagatgccgcgacaagactcgaggcactgctgctcttcctcaaagttgttcttgttgccataacaaccaccataggtaaagcgggcgcagtgttcgctgaaggggttgtagtaccagcgcgggatgctctccttgcagagtcctgtgtctggcaggtccacgcagtgccctttgtcactggggaaatggatgcgctggagctcgtcaaagccactcgtgtatttttcacaggcagcctcgtcggaggcgtcggggcagttgggggtgtcgtcacactccaggaaactgtcgatgcagcagccattgctgcagcggaactgggtgggctgacaggtgccagagcacactggatggcgcctttccatggaggggccctgggggaaagtcgcctgagccccagagctgcctctcaaaggcccaccttgcacaccccgacaggctagaatgcactcttcttcccgaaggtagttgttcttgttgcccaagcagcctccataaa

SEQ ID NO: 322907 - DNA, 1543 bp, Homo Sapiens
gtttggtgttgtgtgctgtggtgtccgtggaagtccttgcctctggttcttgaagaagcagtaacccaagaatggcgtaccaccaaccactatgcagatgaccaggaacacctgcgacatgccatctccacagagcctgtgctgggaatggggatttcccgcctcaggcctaacacatccttcttggagatgccgctgacaagatctcgaggcactgctgctcttcctcaaagttgttcttgttgccataacaaccaccataggtaaagcgggcgcagtgttcgtctgaaggggtttgtagtaccagcgcgggatgctctccttgcagagtcctgtgtctggcaggtccacgcagtgccctttgtcactggggaaatggatgcgctggagctcgtcaaagccactcgtgtatttttcacaggcagcctcgtcggaggcgtcggggcagttgggggtgtcgtcacactccaggaaactgtcgatgcagcagccattgctgcagcggaactgggtgggctgacaggtgccagagcacactggatggcgcctttccatggaggggccttgcacacccccgacagggctagaatgcactcttcttcccgaaggtagttgttcttgttgcccaagcagcctccataaacgaaactcttgcagatctgctccgtggggtcatagtaccagcgtgggaaagagccccggcagcgacccaccttgttggatgcgaggcagtagtcttctgtctgcttggtggacagcacagtgactgtgacgttggccgtgtcctctgggtggtctgagctagtcactgtcagctggaacaggtaggtgccttccttgagtccccacagttccacctggtttgggtctttcctctcttcccgtgacttccgtgtcaccccgcagtaggcgccaatctgtgttttccacatccttcagcaccaggggttcctggggttgtaccttcaagtctatgcctgcccaggccttggggatcccagaccctccaaagccctgggtccgcagctggcggtaggagcggtacacttccctcgtgaggtagttgatgaagccctccctgggcgcgaacttgcacacgaagttctgctcgtagaggcagttgatgaggaagcaggcggcgatggcgtcctccccgcggtcgggctgcagctccactagcgccaagttgcagttctgggtggtgcagcaggcgcgcacgcagtcccagccccggcgcacggtgggggactccaggaaggtagctccgttgctgaccgaggcgttggtgtccagcacgaagccaggcaccccggcggtaaagctgttcaggcagtcggctcccgcgggcagcccagggggcgcgggcggtggcccggcctgggtgccctggaggccgagcgtgcacagaagccacaaggcgacggcagggatgccggccggggcgaggcgggcgcgggccatcgtcctcgcaggggccatcgccttcctccccaggggggtcaccttcagagcgcgggcctctgggttccgagggtgctggtga

SEQ ID NO: 322908 - DNA, 827 bp, Homo Sapiens
  misc_feature (90)..(101): n is a, c, g, or t
  misc_feature (797)..(797): n is a, c, g, or t
  misc_feature (809)..(809): n is a, c, g, or t
tcctcatcaaatcctcacctaagctttcagtgtatccagatccacatcttcactcaagccaggagagggaaagaggaaaggggggcaggnnnnnnnnnnnncccaacaacttagcggaaacttctcagagaatgctccaaaactcagcagtgcttctggtgctggtgatcagtgcttctgcaacccatgaggcggagcagaatgactctgtgagccccaggaaatcccgagtggcggctcaaaactcagctgaagtggttcgttgcctcaacagtgctctacaggtcggctgcggggcttttgcatgcctggaaaactccacctgtgacacagatgggatgtatgacatctgtaaatccttcttgtacagcgctgctaaatttgacactcagggaaaagcattcgtcaaagagagcttaaaatgcatcgccaacggggtcacctccaaggtcttcctcgccattcggaggtgctccactttccaaaggatgattgctgaggtgcaggaagagtgctacagcaagctgaatgtgtgcagcatcgccaagcggaaccctgaagccatcactgaggtcgtccagctgcccaatcacttctccaacagatactataacagacttgtccgaagcctgctggaatgtgatgaagacacagtcagcacaatcagagacagccttgatggagaaaattgggcctaacatggccagcctcttccacatcctgcagacagaccactgtgcccaaacacacccacgagctgacttcaacagggagacgcaccaatgagccgcagaaangctgaaagtccntcctcagggaaccctccg

SEQ ID NO: 322909 - DNA, 880 bp, Homo Sapiens
  misc_feature (374)..(374): n is a, c, g, or t
  misc_feature (785)..(796): n is a, c, g, or t
  misc_feature (863)..(863): n is a, c, g, or t
tctaggggctctctggctacgggctgcagggacgactgaatggagccctacagagccaggagggagacaggcagcagggttgggggtgggatgtatagggttttctctgaatccgccctggatttgtcagacttgagggctatggttctgaaaatcagtctgaagagggagcttttctgtgtattctcttaggtagagaagtcaagaagtgaagaggtagagtcttaagaggaaaggaagagggacagcatcaaacaagccaggtcttaccttagatcagcttctggaaagtatagagagcgctttgaagccatgcccaaccattccaagccttttcctcccctctcacccctccccctccaagagggtacgtngccagatttcaggcaatcaggctaggcttatgcaatgaaataccctcagcagagcgtccagcttcttcgtttagttgcatgcaatttattaaacaaaggagctccactgcctaaggctattggattacactggcagtttattgccatcaggcatgaagcacatttattatcaagatcagccgtcacagacacagttgcaaaagggagaggcaaatgaggacagctctttgggggagaaaccgctcttgggtttgctgcttacctgagttttgagccgccactcgggatttcctggggctcacagagtcattctgctccgcctcatgggttgcagaagcactgatcaccagcaccagaagcactgctgagttttggagcattctctgagaagtttccgctaagttgttgggnnnnnnnnnnnncctgcccccctttcctctttccctctcctggcttgagtgaagatgtggatctggatacactgaaagncttaggtgaggattgat

SEQ ID NO: 322910 - DNA, 1262 bp, Homo Sapiens
tggggaggctgggcccatccaccacctggtgtcagccttcatgctggctgagaacatttcccacgggctccttctgcgcaaggcccccgtcctgcagtacctgtactacctggcccagatcggcatcgccatgtctccgctcagcaacaacagcctcttcctcagctatcaccggaatccgctaccggagtacctgtcccgcggcctcatggtctccctgtccactgatgatcccttgcagttccacttcaccaaggagccgctgatggaggagtacagcatcgccacccaggtgtggaagctcagctcctgcgatatgtgtgagctggcccgcaacagcgtgctcatgagcggcttctcgcacaaggtaaagagccactggctgggacccaactataccaaggaaggccctgaggggaatgacatccgccggaccaatgtgccagacatccgcgtgggctaccgctacgagaccctgtgccaggagctggcgctcatcacgcaggcagtccagagtgagatgctggagaccattccagaggaggcgggtatcaccatgagcccagggcctcaatgatcctggtccatgaagtgcccaccacatcgcagcacttttaccacgttttgtcctcagaccccgcccatgctgtgtggtctctgcatgtctccattcttctctgtctctgtcttgcatgtctcctaccatgtcactgtccctgggccacccagtgaaagcaaagcctgggaatctgctcattgttgtttgggctcaggtattgagcctgatggcccccgggtattgaggggctccccctgctggtggccctgtcctgggatcctcagaagcctgactgtcctatgggcttctccagtgtccacaggggcttgggatggttgtgggggggctggcccctctagcctttccggtccttcctgggcaaatctaagccttggccagggccgaagtttaggcccctgtcttgttcatgtagccgaggggcaggcgggggatctctacacctctgctgtgggcacggggctgctgagggtctgtgggactccagcagctctgcactgggtagagctggggctagagctcagtcacaagcctgggcttcctggcctgagtgggtagacgcaggccggcagagggtgctggaccacatcttcgccaagtcactggcccagcagccttttctccgtccttgtccccagccccacctggctcccttggggtggccagctttccttgtggcctcctg

SEQ ID NO: 322911 - DNA, 1117 bp, Homo Sapiens
  misc_feature (86)..(86): n is a, c, g, or t
  misc_feature (165)..(165): n is a, c, g, or t
  misc_feature (212)..(222): n is a, c, g, or t
cgccgcgtgtcatcgcatattttggaagatcggccgcggctgcgcgcttcgtgtgcgctacaggcgaatatcgcagcgtgcggttnagcggctctggtctatatgggtctcaccgcgggcgggcgtcgcaatggggtattcttgggcgactgcgggtgctaagtnccatggcggttgggggaaaggaggaacagaattctccccaggtgttnnnnnnnnnnnaaacggttaatccgagttgtgatttggggtgttgttgtggggggcgtttttttgttggcgtgtgcgctttcgcggttgtctctttgggtccgtgagcccgagggtttttttcccctcccggccttccttgattaagcggaatacaggtgtgagccactgtgccccagccagaaaatctttaattgacaaatatttaagggacaagagggttttaagaaattaaaaggatgtatgaagtgaagtgagttgtgaacagaacctgggtgccctcctcatccacgtgcctcagtcgccctcgtgcctgaccggctttgccaatggagcctggaccctcagcacgggtcagctgtgggtgcgaacatggtggtctgggtcaggcctctttcaggtccccacaacaggcctgacttgtgcgtgagacgctttcaccttaaaccccacgccatcctgggggttcatggtcaggtataaaaccctgcagagaagtcaggctgtctgatcccaactctccccttctcagcctggtcacaagtcagttcccagatgcagcattgcaggtttctactttccgccggtctccttgggaacaaaacgttaagtgtgtgcggcctgtgcagggaggacagagggaaggagaggccggagccctcaggatcgagtgatcttgtcgggaggcatgaaccccgtgtccccgagggtcctgagcgcaactcggccgttgggtcggatcaccaggtgggtgatgctgccattattgagggagagccggagccagccttcaggaggaaactgcagtgctctgcacacgatgtagcggatgacgttggcgtgacagatgaagatctcgtaactgtcctccctcgtgccgaattcgccacccaggcctcgctacctt

SEQ ID NO: 322912 - DNA, 774 bp, Homo Sapiens
  misc_feature (47)..(47): n is a, c, g, or t
  misc_feature (148)..(148): n is a, c, g, or t
  misc_feature (403)..(403): n is a, c, g, or t
  misc_feature (510)..(510): n is a, c, g, or t
aaaaaacacactgtaagcttttctggttagggtctgccaatgctttnagctagctggatgtttacccattcacttcaaattttacatgtcccagcccaggcacggttggcgtgggcttgtagtccccaactacttcgaaggctgaggncaggaggatcacttgatccccaggagttcaaagacagcctgggcaacatagaagaccctgtctcttcggaaatcatccaaggagtgtgataaacatgacaacccccataaactgggtaaacaacaacaatggagtgaaaaacgaccacacatgccataaagcaatgttgaagcaaattcctgctgcaataaaggaggcagtggtaatgggtatcaaggctggatacttgacatcatattctccaattccacatanccattccaggtagactatgcagtaaaatgcaattgataaactgacaagcaacaaggcactgccacagagaaaccagctgctagtgtggaagttttctttaagggttntaaagaagtcaacataataggtcacaacaatggatgccaaaatccagaatccagaatggatattaagtcttggaagaggtttctcctttttctcaacagctgtggaggtttccggcccggcgtcaccctcgcggtccagctgggcctcggcgtccggcaggaggaggaatcgccgccggagctgctgccgggcccgcgaggagtccatcttggtaccgccatgacgggaatccggaccggtacccagcctctttttgtcggggg

SEQ ID NO: 322913 - DNA, 1305 bp, Homo Sapiens
ggccgagctggggatgctttacccgctccttacagaaagaggacaagtggccgaagtgccccggcaatagaataggtgagtggggaaattctgaggtgactcgtaatgagtaaacagggtttccccttgccaaaagtgctgagggactatcccagggcatttcccagaattccgggttcccggtgcagtggcaggggggcaggcggagcccggtccgtggtcccaatcagcccagggttcctggagcccgtccagagccctcagtgcttaaccagggctggagggaccacctgggtgggcctcagctggactcacagcagctccctgcctgggcggggtccggcctcaggaggaggagtgcgggtatccatagtggttgtggtcagcctcgcccagggtcaacgtcagtgacaggctgggcttccgttccagctcctcctccttcagacagtgctgtgggggtcgggctttgaagaagtctgagatgtagcagacagtgagggcagccaccagtgccccctgcaggaggccaacaaggacatcgctccagtggtgtttgtaatcagacacgcgggtgtagcccacgtagagggcaaaggccaccaggaagaactggactgtgggtcgcagcagccgtgcccacttccaacagagtcgtgcctgcacatacagcaccaagaacaccatgcagtacatcccaaaggaagagtgtcccgagtagaaagacaacctggcctcggtgacatcagcagggtttcccctgcacaccttctccagctgcacatagaccgagcagttgacccggctccagtcggggtcgcagacggctaggaagttgggcctcagacgcccaatcatgtacttggccaggtctgtcagagactggctcacggcagccccaaacaggaaggtccccagcaccttgtatacagcagccacgtagttgttgaagtccgagcgagaatagagccggtctgtgtacaccaggtaggcttccccggccgagacaaggatgacggtggccgtgatggtgaccccagccatgagcccgtgggtgatggtatctggacggtaggggtaccggatggagtcatccccgcagtaaaatcctcgcttgtacggggcgttcaccagcgtcaggatagcgaagggcagggaggcgaccagtaagcacagcacgtcgagcagcacgaagacccacctccgctgcatggtccccgcgacccccgacgccggtcccagcgcgtcccgtcgcgtcccggcccggccgcggagtcacgtggcgcggagcccgccccgcgcgga

SEQ ID NO: 322914 - DNA, 1639 bp, Homo Sapiens
agtacaacaaagctctcaaccagttttatttttcctcacaatgaacggaagaaaaaggcagaaataaatggtagggtcatttgctagtagaaaagaaagctgggattccccatttactttggaaactgaggagaaagaactgctttccccactcgtgtctgggcaaagggtgtgcccagatgttggccaaaggaaccagacaaaatcaacagccagcagttttctgttccaaacagttagctcctctacagtccagagggaagctattcctgagttcatttcaaggtgacagcagaagtgtttctctctttctgcttggcccaactgtgcctgagggctgatggatccagaccttgtaaacattcagctaggtgtaacataaccagaaaggctgaaggaaggctctaggccttcccagcttgagaagtaggggcctcatgtgtatctggtggcctgcagagcccaaagcagagagctatgatgaataaaatatttttattgcttttctaaaataactcctttcatatacaaggattccttcagttaggtcctctattatcctaaatgctctctggtcatgagcaggtgaggttctatttagccaagataagtggctgcctcagagtttctcatagggaaaactgaaatctgattattttcttttcttcacatagtctctaggttgagaactccaagtagtaagaggcacaggataaggatgggagagactgagcatttttgagagaatactcctctgctgaatgccactttgaagggaaagaagtcgaatggccatttccagtccattttgggttggccccttggaggctgtggcttctgggtaatgtccacaaagttcacaagagttgtcaaagatacttctgtaacttgctgagaatcctgtatagactggcactggtataggaatcgaactcctgatacatgagcttgcgggttggacaggagacctacatatgcccacaatacctggatctccagggaaactggtatgagacagcaggaagtacagtttatagctgaaatgctgcagtgccctgttgaggatcctggtccaccctcctttctgggctgggtcagcattaccaaagatggcaacatactctggtctgggccttccatgaagagtctgataaatctcctgctgcaagtggctgcagtctgccttcttcaacctgagcttgcatccagatattgcattcactccaaactgcacttcatgtcttttaacagagcaacttccattaccctggctctgtaagagggtcattgagtaacttatatcatcagtcagagccaagagtggcttcccaactatatagccaggattcccacttctaggactggtgagagaagcagctgtgcctctgttgaaaagcccctgaagcgaaggatgaaagtgttgctgtaaggaagcgccctggctcaacagtcaggttggtttgtcccaaactgacagaaactttctggattccaaaagtcccattggtctctatctcataggtgacctgagaaactacattctgacaagtgtttccagccaacagaggagcattagcctgtgaggtaagtattacaggaacctggaactccatattctgtggatcagtcatgcttcttg

SEQ ID NO: 322915 - DNA, 1089 bp, Homo Sapiens
ttgtttatttctctttatttcaatcatacagagtccgggatcccttatcatcctccctcctcagtctctgcccccaggggttaaataattttaaaaaatatttaaaaagctgtaacaaaataacatcaaaggaaatgggaaggatgggaggggtcaggaatcatgaaggagggtagagaagagggcctcttccccactccccactcttggattccagcctgggcagtagggagaactaccccctatctctccaggtacatcccagctgtaggtgaggtcagaggtcagggtatgaaagtgccggtgtgtgtgaatggggagctgggcagaggcaggctgttcagaagatgccccctcctccccactcaaccaggtactgcacagagccatcaggccgtactctccgagcaaggacccggacagggccccctcgggacaggtaaccaaccccacctcggactcctcccccagtcccaggagacaaactacggcacacggggagaacgggggtgctgagcgtctaggaagacctggggatggggatgaaactgaggaagatgaggcagtcatcgagtgcgggggcacttttagggatgtctgtcggggaaaccaactgtgaagttccaggggtgacctgtctgggggtccactgtccccagaggtccctgcggtagctggcagaagggtggaaggaagcaaacatccggactggggctgctggcgcacggcagcgggcatctgtgggcccggaagttgtagccgctgctgccctggtaactctggttagggctgggggatggtggagacactgaggcctgcagtgccctctgcagatgagcccgctccctctgctcctggggctcgggctgattgcgcactgctgagggtggccccagctcctccactttccccttctgcctcctcctcaggggctctggctccggcctccggcgcttccccaggggacgtgagacccctcccccagggccctgccctgaagggaagctggtgagtgctccatctccagtagggggctccacagggggaggcatccgagcatggagaccaacaaacatttcctcttcttaa

SEQ ID NO: 322916 - DNA, 422 bp, Homo Sapiens
ccgccccacaacaacaacagcactgcccccccagcgcccagcgccaccgccagccacgcgcgcgaacgggttccagagttctctgaggcctcccgggtcctggtatctggggtcaccgcagtcagttgtgcccggggacccggggtcccagacgtcaggcatgctcggggttcagtgaccccaacagacaaccgggcccagagactgggggtcccataagtcactcgggcccgggggtcagaagttcctgacgtcagcagggcccggaggtcaggggtcaaacggggtctcctcccccagcgaatgccccccaaagcccgccatgcccgaaggctccagcctgcaccccgccccgccctcggcgcagccatcagctccgccttggctgcctcctcgatgccgggaatccggaccggtccagc

SEQ ID NO: 322917 - DNA, 1072 bp, Homo Sapiens
ggcctgggtggcgaattcggcacgagggtgtggcgctcttggccaatgcccctgagcgggttgtcgagcggcgacggcggccccgggacagcccaaccctgagcaacagtggcatcagagccacctccaggacagccaagcagcggtcggggctccctccctccgaggagcagccaacctcccagagggaccgcctgagccaggtgctgcgagacctcgaggacgagagtacgcccattgtgaaactgggggatgccagcatcgcagcacccttcacctccaagctctcatccatccagtgcatctgccacgtgatcaagcagggccgctgcacgctggtgaccacgctacagatgttcaagatcctggcgctcaatgccctcatcctggcctacagccagagcgtcctctacctggagggagtcaagttcagtgacttccaggccaccctacaggggctgctgctggccggctgcttcctcttcatctcccgttccaagcccctcaagaccctctcccgagaacggcccctgcccaacatcttcaacctgtacaccatcctcaccgtcatgctccagttctttgtgcacttcctgagccttgtctacctgtaccgtgaggcccaggcccggagccccgagaagcaggagcagttcgtggacttgtacaaggagtttgagccaagcctggtcaacagcaccgtctacatcatggccatggccatgcagatggccaccttcgccatcaattacaaaggcccgcccttcatggagagcctgcccgagaacaagcccctggtgtgggagtctggcagtttcactcctggccatcattgggctgctcctcggctcctcgcccgacttcaacagccagttttggcctcgtggacattccctgtggaagttcaagcctggtcattgcccaaggtcctgctccctggacttctggctggcggctcctggccgaccgcgtcctgcagttcttcctggggaaccccgaagctgaaagtgcccttcctgagatggcagtggctggtacccactgccccaccctggctgcccgctgggcgggg

SEQ ID NO: 322918 - DNA, 986 bp, Homo Sapiens; identical to SEQ ID NO: 155056
  misc_feature (20)..(20): n is a, c, g, or t
  misc_feature (971)..(971): n is a, c, g, or t

SEQ ID NO: 322919 - DNA, 895 bp, Homo Sapiens
  misc_feature (96)..(96): n is a, c, g, or t
gcacagagggatcatgggcccggcactcatcaatgatctcccgcagctctgaagggcagtctccacccagtgggctctgctgccggctttcacagnccaccagctttgcggatcttctcagaaattacagcctgaaaacggggatatctccagtggcgatttcccagaggacgattccaaaggctgtatatttcagactttacatcatattgataaaatacatcttcccagttcctgaggtgagagatatgctgtagatttgactctgtctgtcttttctctcgtagttcccaaactcatggaagtctgtgttttcctcaactcaaatcctgcaagcttcacttggtagccttgagttaccaggaagtttgagcttctgatttttccgtggagttcaggtgcttctgaatggtgtagccggtataggcctcgggctgcccccaggactaggaccatgcgcttgccaagtgtgaggtctttttccctatccaacagctccctcagggtcccgagttcacagtactccatgacaatggagaattgaggcggagtcactgtttcatcaatgcaaatcccaaatatacgcaggatgttgggagattcgaatttcttcatggttttgatctccttattgaaagtctgcctcactattgcaatgctgccagcctggagttttttgaatacttttatggccactggagctctgtggtattctcctttataaagtgtgctgacttcattttcccttagcagaatccacggggatcctgaaagctgctccttcttgatctccttgatttgctcttgcgggatctcctgcatgcattttggtggtaaatactgcctcaaagtttccttgatttctttcatgttgatttctaatcgtctcagtgaa

SEQ ID NO: 322920 - DNA, 1421 bp, Homo Sapiens
  misc_feature (1387)..(1388): n is a, c, g, or t
  misc_feature (1397)..(1397): n is a, c, g, or t
cttggaaattgccccttacaggtcttttttatccagcatgaagtagccccggcacctggccaggaactgattcggttgtaggttggaagggacatgttctgcaagtttctcagttaaggaagttgcctgccctggatagaacctctggaacatctgggtcagctgccagggtgagcagtagcccacgtactctttcaggtccactcgccccgggcgtatcagggcagggtccagcctgtcaacgtggttggtggtcatgaacacgatgcgggcctcggtggaagccacaccatccaaggcattgagcagtccactgaaggtgaggcgacctaggccttggtactttactgggttctccacagccaagtctcgactgagaaaagcagcatccacatcctccaggagtaccaggctctgctgcggggccacgctcagcaggtggttgagtcggtcatcagagaggctggagtccgtgaggctcagcaggcagatgctgtgctccagttccccagccagggctgtgataaaactgctctttccgcaaccagggggcccataaagcaggtagccacgtctgtaaggaatgcctctgtcagtgtaccacttggggttatcgatgaattcctggacgtctctgacaattcggtcagccagaccctgttgtagaaccacagaattcagtggtcgccggcggcgtggatagccaaagggacgccattcagagcccacagctgtgtacatcacggtcttcccttcctcctgctgcaaggctagctctcgagcttcctccaggatgttgaagaaaacctttcggtcagtgcccagggccgtgaaggtgacagattcccaaggagtccccgtctgcaagtctatcatctgcatctctcgacttcgttctacccgaatccatttcccccgataccagataaaatggtttccagggctggggacaaattcaaacttagtggaaatgcggccactctcatgctgaaggtacgaagtctcgacactgaggtgctgagtacgggtactgtggcgggtgagccagctaagcaaccaggcatagctcctgtctcgagcagggacttccagtgtgatcatgtaatggcgccggaatgccaccaggcccagttggacacccttccgggccagggccagggctgtgcccacacccaccagcccaaatccagccccaaagtagggattgtccttcagagccagaataaagtctgaaagtggcatcttgaaagggaaacaccaaaccttacaggccctggggtgttacgaaaaccccagctcgcgcctccagccacatggtttggggtaacccgtcactcagccctctcaccgccgtgactctctcgccacccaggcttcgtgctttggnngtatagaanaggggggcgggggaataaaaaaaa

SEQ ID NO: 322921 - DNA, 773 bp, Homo Sapiens
  misc_feature (717)..(717): n is a, c, g, or t
  misc_feature (732)..(732): n is a, c, g, or t
ctctgttatgattttatttcttcaattgttccaatcacagtttctaatacagaaataaaactattcagcgtctccgttcttgcttcattttgtttcacagagatctgcatttctgagtttccaggctcaatagcagttctgttaagaacagacagccagtatcatcctgagcactgaggtatgctttccatggccgagacccagccctactcattgcgatggtctggatgttcactacttgaagagccatctggagggtgtcaggatggaattctccccgccaaggcaacacttgctgatgagcaactttaaggctaagccaagttttctcaaaataatcagcagtaagctggcgattggggactagcatgagggctcccagaatcagggagttcttgtaccctctccttgttctctttcaggaatcaagggtcctgatgcggcaaaggatgaagttttaggaagctctgggtcacaacgctctgccccctggcatttagagatagtttcccagtgggctttgccatacactggcaccagtgtgttgaagtctgaggcccagctattcacaggtctttctgccggatcctccaaaagtccaagagtagggtcagatttagggctacacagaatccgcttaacttcatcaatgccaactaagaggaggcgataatagaagagacctcggtcccgtacagccatatctttttcttcctntatgcagtaatacancaaacgtcctagcatgtcctggcactcagcaggtcgggaga

SEQ ID NO: 322922 - DNA, 760 bp, Homo Sapiens
tttttaagactctgttatgattttatttcttcaattgttccaatcacagtttctaatacagaaataaaactattcagcgtctccgttcttgcttcattttgtttcacagagatctgcatttctgagtttccaggctccaatagcagttctgttaagaacagacagccagtatcatcctgagcactgaggtatgctttccatggccgagacccagccctactcattgcgatggtctggatgttcactacttgaagagccatctggagggtgtcaggatggaattctccccgccaaggcaacacttgctgatgagcaactttaaggctaagccaagttttctcaaaataatcagcagtaagctggcgattggggactagcatgagggctccagaatcagggagttcttgtaccctctccttgttctcttcaggaatcaagggtcctaaagagacagaaaacttgtgtgaaagatgttcttaatctgtaggagctaagttttttatccaaattcccaaatgtacacaatgtgacttttatttttggacaaatggctgaaataaccagtgacgaacctctttcttgctcacaaatgcttcaaattcaggcaacagtctgaggtttagtgctaagatactctactttccaccaatcattgaaaaggtaaagatttatcatgacaagatttaaggtaaggactgtttttacctgatgcggcaaaggatgaagttttaggaagctctgggtcacaacgcctcgtgcc

SEQ ID NO: 322923 - DNA, 524 bp, Homo Sapiens
  misc_feature (140)..(153): n is a, c, g, or t
acatccaaatatatacaagtttatgtgtaagcaaggaagggtggtcacgttgacctgagttatgggtgaggggtgataggtgggaggtgggggctgccagacagacaccaggggaaggctcaccaggcagaggggaatgnnnnnnnnnnnnnnaatgaaacaagaaccagcccattgtctcacctggctgaggagttgggtttccaagggagaggaaggtaaggagagaagaaatctggactcagactcagagggctgtgaatgtccagctatgaggtttggaggcccttggaggatgttggcaggagagggcatgatcatcccaacctgaaaaaggaggcacaggactgtgtggcaggggaggagggcaaaaggtgttgagccaagctggatggttaggacaggagagacctgacaggggagggaaagcagtctcagaaggacctggggcttctctcagtgtttgaaatgaggccaggtgctgatgatgttgtacaaagcctgcccaggagacaaggttcggg

SEQ ID NO: 322924 - DNA, 1416 bp, Homo Sapiens
  misc_feature (21)..(21): n is a, c, g, or t
  misc_feature (661)..(661): n is a, c, g, or t
  misc_feature (687)..(687): n is a, c, g, or t
atggaggcccatggatcccancccgttggggccgggaggcttgggcacccaggtggagggggcaaggcctttcggttcttgtcagggcagttgcagaggcccagggccttcacccagccaaccttgttggaccctggggggcctagtagttcacgagttgagctgggtagatgccatcctttttgtcaagctggtggtcctgtctgggggccacgctgggcttctgggccaggggtggtttcttggtggttacacttcggggggcagtgctgggccggatggccacctcctctccagggctgcctgatgccccagccagcacgtagtgttgcttccgcaactcccccagccgcatgcgttcagcctccagcgtcttctccagctccaggacacgcacctgcgtctccatctcctgcttcttcagcttgatgagggacaggccggagaaatccatggtgtctctgtcctcaatctgctcctggcctgacttggtggaggccaccacattggcagccctctcattgactgtgcgagaacattcctgcaggcggctcaggtgggggctgtgcttgttggccttcaccttggaggccgccaccagctgggccgtgctggctgcgatctcggtgggagccagacgatgagctccttcatacttgcnccgtgtgaagcaccacccttgtcagnctgcctccaccaagctgtgtggctccccagccccacagccttgggaggccgagatgaggccttcggtccagcgcgagttcttggcgtaaaattcctgctgcgtggctgcccccctgccgctctccacgatctccttctgcaggctagtggatgtcgtcaccaggagccggatagccttcatcaggtctgtgcaggagttgaggatcctctcgttcacctccagcttcacccccgagctggcgtggcgtgcctggttcatcatgtcctcaatcctccgcacagcatcttcaatggctgcggatgtggccgccatctccttgtcgaccacggcccccagctcctcctgccgcacatctaggctcttgggtttcagttcctggcccagctgaaggatgccctgcaggggtgtccgcaccaggctggcctgcatgtgccgcagagcctgctggtcctgcagctgccccatgagctccagagcccgggccccgcactccctgcaggtgtctatgaggcggtcggcagggtcggtgggagccaggtgcgaggtggcaccgccattgatgatggtatccgcagccaggtgggagaagcgggtcagagctgccaccagggcggaggcgtctgccaaggaggtcaggtactgggcgtggccctcctccagggtgctcacggcatccaaggcctcctgggccctgctcaccaggtagtctggggagctggtacagcgca

SEQ ID NO: 322925 - DNA, 1730 bp, Homo Sapiens
  misc_feature (1571)..(1653): n is a, c, g, or t
aagaggcgtccttatagatatttatatatataaattattagtgtggggaaggggcaaggggcatacattgcagagggggcgcgcacacagggatcggggagggggcaggggtggcacacgatgctacgcaaaacagccacatctaacagatgaaataatcacaccaacggggcaggggaggggcggcggccacaggggttgggcatgggggaggagaaaagcaggggggacaaggaagagagacctggtccaagattctgtgcgctttctgtccccatcctcgccacctccccacctctgcacaccacatcgggccttggccttctgtctgtccctccctcccccactctctgtccagctgcggaggccctgcaactgagcagcaccctcttggctctgggtggcaggccaagggcacggtggggggagggtgtggggtgctccaaggtccaatgtaggagccatggtgctctcttgatcgcaggttctacagtggcttgtcgctttccttcttcaggtgactgtagtagtcctcctgggcaggcagcggcacactgtgcagcgggtgatgggcatgcagccactgctgctgttccagcgccaagcgctgcagctcagctgactgtgcgtgcatggcctgcagctgatgagctgctgacatcggggcagaaagggaggccggcaggtcccggtaaggggcagcaaagagctggtgacgaagaacttcgttctcgtgcagagggtgaggaagcagggggttagggagagttccagctgggtaggggatccgggtaaggtgagaccctgaggccagggggtcaatgagagggtgcaccgaggcagaggctgcatggatagcatcttgctggtgcaggtgcaggtgcgagtggatgtgggagtgctggtggtgatggggagtcacattgagcatctgcagccgggccagtgggtcattgcccagggccgccaccctttctgcgtgctgcctctcagctgccagccgctcagcataggacatgtcaggccgcagggctggcccagctgccagcgctagacgttctcgctccaggggccccaggctcggatgaaaggggaaagggtgcaggccaggtgggccaggctgcagagccaggcccccatgtcggggaaagggatccaagcccggcccagggaccccatgtaggggttccagctcactaggcttcacctctaagccaggcttgaggcggtcacggaggtctcgttcacgggcttcccgttccctctcccgggcagctggatcactgctgtacaggtccgggacattgtaacccaggagccccgggtccactgcccccaggggcacgtagaatggatggttgcgattgccaggagacatgacatgaggccgggcatattcactgagagtgcgcaaggctggagtgtcaggacccaggtaggggggcactgtagccaccgcactgcccggttcaaatggagggcgatggggcactgggcccagagatgggcattccaccggagcacggccctcctgagccaacttcacgctgcgttcaagctcgcgctccttnnnnnnnnnnnnnnnnnnnnnnnnnnnnnnnnnnnnnnnnnnnnnnnnnnnnnnnnnnnnnnnnnnnnnnnnnnnnnnnnnnnccttctccaccaggtcggcccgcttcttggccagcctggagccctccagtggcacgaagtacaggtcgctgcgcgcg

SEQ ID NO: 322926 - DNA, 896 bp, Homo Sapiens
gccagatggctttgccttgcatttctttttgggactccgagaactaatttgaaaggggtgggggtagccccagggagaaccccctttcattggtcaatctgagtccaaagaaaaccagaagtctgtcttctgctgggggtcagcaaggttctcgtccagacccctgagggtgctggggccttccagctggaggtcactggactcactgctgctgtcatccagctctcgggaggacgagttttcggcatctgagtcttccgagctgctgatcaccacaacgcgttcctctgcctccccggcgccactggccacgtggttgctgttgggcaggaagacctcacttcctatgacggggctcctggggctaggcggtccatccaggtggggtggtgagactgccttggaggtgctgggcctgggctgctccggggagctccgagccaaccttgcctccttcccctcctcagactccatcttgatgaccttcctggggcactgggtctggctgcacttcctcttctgggctgtacgttgtattggagacatccaggtccaacgtcaatagggtccctgggagtgctggcagcctctgggctggctttcttggatacagctgcatctttcccctgggtgatgcaagagctgaggtcctgcaggcgcaccttgaactcgtcgaagccatcggtgcgcacggcagcttgcaggctctggggctcctcctggcgcaggcggcagagcgcctggcgcaggaaaccgtgcatgtccagcacctcctggtccgaggcgtagcacttcatcctctgcaccagcgcgctgcccgtgcggatgcgctgcagcacagcatccaggcggcccagccgactggccatctcctcgtagtcgcgctggtaccgcgc

SEQ ID NO: 322927 - DNA, 1111 bp, Homo Sapiens
tgcaggtttagaaaataaagtttgttgggatcttaaacattttggataaaactaacaaaaaaatatgaacacacattcaggttgtggtgctatgaggagtagcgtcatcttatttagttccttgagatacacgcacggctgctcggtgatcggtgccgccctgggaaaggttggtcaggaggtgacaggggtctccaggaggagctcgggaggtgacaagggtctccaggagggagcaggggctgctcggccaggctgccctgggagcttgaggataaggtcaaggttggtatgtgttgctccgacttgagaatgaattaggtgtgtgactgtgtggcatcgtgaacatcagtagtgacgcagccgtggcctgggctttgcctgcagcgcacttaggttacacggagcgggatcagaagcaagcgattcggcacacaggcgtttggccacagcaattaggaaatacatattctgcggcagggacacgatcatattttggtgtgaagaagagggcaagagaagcagaaggagaatgggtcggtaggtgtgaaaagtgtttggcatgcatgggattaaacagaaaaggtgtggctgagatttcccagtggtgctcacagtgcatggacagcgcggggtggggcacggcgggcttcacacagttctgtccgtccctgagtgcttcctcaccaccttgcctccgttcacctggtcgaccgccagggtcttcacctcgggctgggcctgcggcggggtggcgtggtggatccgatgtgccaccccgacgtgggccttgtgcggcttttcgcgggccgggctgtgctgctcgccgcttcggtcggaggcgatgggggggatgacgaggggcctctctttgatgaggtggacctcggcggactccctagccagcagaaatggggtggggtcgggcatagcatccactggttcccgcaaaaggagtttcctgctctctgccccgaatctgtagacctcttcaaattccgggtgcaagggggctgagaggctctttttcatgcggcggcgaggcgtttcgggtagcttgtctttggggggcgctggcttgtagctggccagcacggggctccctgacggg

SEQ ID NO: 322928 - DNA, 1023 bp, Homo Sapiens
ggcctgagtggcgaattcggcacgaggcgccgggggcgggcgctgcgcgtgccgggcggagaagcggcgcgagccgggcgctgcgaacgttcgccgcgggggtggctccggggcctgagtaggcgctgccgctgcctcagccgagggggctgggccggagcgtgcggaggagtgaggccgcaggagaccttcccgacgacccctgctccggcggggaagtgagcaaggatgattgaggaaagtgggaacaagcggaagaccatggcagagaagaggcagctgttcatagaaatgcgtgctcagaattttgatgtcatacgactatcaacttacagaacagcctgcaaattacgatttgtacaaaaacgatgcaaccttcatcttgttgatatctggaacatgattgaagccttccgagacaatggccttaatacactggaccataccaccgagatcagtgtgtcccgcctcgaaactgtcatctcctccatctactatcagttgaacaagcgccttccttctactcaccaaattagtgtggaacaatctatcagcctcctcctcaactttatgattgctgcatatgacagtgagggccgaggcaagttgacggtattttcagttaaagctatgttagcaaccatgtgtggtggaaaaatgctggacaaattgagatatgttttctcccagatgtcagattccaatggcttaatgatatttagcaagtttgaccagtttctgaaggaagttctgaagctcccaacagctgtctttgaagggccatcttttggttacacagagcactcagtccgcacctgtttttcacagcagagaaagataatgctaaatatgtttttagacaccatgatgggctgacccctccttcccagtgcctttgtctgggctacctcctcatgcacaggcttggcccatggttgagatgtcttccatccccgtggagtgctcctactgccgatgtgaaaaatattgatgggtttccgggtaccgatggcagcagtgccc

SEQ ID NO: 322929 - DNA, 1035 bp, Homo Sapiens; identical to SEQ ID NO: 155058
  misc_feature (58)..(58): n is a, c, g, or t
  misc_feature (71)..(71): n is a, c, g, or t
  misc_feature (75)..(75): n is a, c, g, or t
  misc_feature (79)..(79): n is a, c, g, or t
  misc_feature (91)..(91): n is a, c, g, or t
  misc_feature (228)..(243): n is a, c, g, or t

SEQ ID NO: 322930 - DNA, 1087 bp, Homo Sapiens
tattttattgctgagtcatcctggggttccataaaggaccccaagccttgcttgtagtctatagctttgctaggactcccatgacatcaggatagagattgaggcacggggtcctttgggttccgattaaggaactatctactctgattctgttgatcttattagtccctccaggtcacctctacttcatctgtccgatacctctgtgtaaccccagaatcactgagtggggtcctgtgtccagcccgaaacatctcccagccagcctgggctatcatcgctccattgtcaatacagaatctctcatctgtagcaaaaagccgggctccacgttcctggcacattgttgccatcatctcctgtagcctcacattacctacaaagaggcaggggaacagggattaagcttagttttaggcatctcttcatgggtccagcagaacacgtcatgtgcactcacttagaacaatgacataggggattaggggcaaggattgggaagcctactccaaacgcttaatgatttagagtaccaggaggaagacgcatagtgttaagaataggaaagaggaacacttttcaataatacatacaccccactcctcccacaatgagggcctcctgggagccacaatgtgccatggctcgctctgtgatctctaccagcattgcaaacacagtttcctgtcagggacagataaggagaaaatattagaggggcatcccagattagttctgctctacaatataaaaccttcagccccaactttctgtcccagttttttactgcattacctgcagggagaaacacagatcctcaggagtacactcgcctgtggccagcatccgatgggctacatcctcaatgaaagacaggatccctgagaatgagacgtccatcccctttacagtgtatggcagctcaaccagcttcttgcctcgctttgccatctgttcaatgttgtatcctggacttgggtcgttagaaatctagcagaagaaaaaaataaggaaggagggaatggaagaggatgaaatcagatatgctgtaagcataagaagctcatttactatttcctccctccac

SEQ ID NO: 322931 - DNA, 927 bp, Homo Sapiens
gcggttgcaatggtcgctccctgagaggatgccgctcgtggtgttttgcgggctgccgtacagcggcaagagccggcgtgctgaagagttgcgcgtggcgctggctgccgagggccgcgcggtgtacgtggtggacgacgcagctgtcctgggcgcagaggacccagcggtgtacggcgattctgcccgtgagaaggcattgcgtggagctctgcgagcctccgtggaacggcgcctgagtcgccacgacgtggtcatcctggactcgcttaactacatcaaaggtttccgttacgagctctactgcctggcacgggcggcgcgcaccccgctctgcctggtctactgcgtacggcccggcggcccgatcgcgggacctcaggtggcgggcgcgaacgagaaccctggccggaacgtcagtgtgagttggcggccacgcgctgaggaggacgggagagcccaggcggcgggcagcagcgtcctcagggaactgcatactgcggactctgtagtaaatggaagtgcccaggccgacgtacccaaggaactggagcgagaagaatccggggctgcggagtctccagctcttgtgactccgggattcagaggaatctgccaagcatgggtcccggtgccttttactctcccgaactcctggaggcccttacgcttgcgctttgaggctcccgattcctcggaatcgctgggaccggcctttattcactttggggggcctagagggacccttgccccctggcggggatcccgctctgccctttttgagaaccggggccccaccacccccttagtctacgcaggccccagaccccttggcctccgggaagctttttggcaacagatggggacccaggtccgaagtcaagtactgggccggaattaatgcaagacgccgaaaaaacgctgttc

SEQ ID NO: 322932 - DNA, 862 bp, Homo Sapiens
gggagttttgcgggctgacacagatagagttaggcactgtccccattgtgccgcaccccatgggagttcaggtctcctggtctcgtgccagccgctgcccaatcacccactgctgcaagactggtgggaagccatagtccagaataaccatgtccttgagagacgccactgtcatatcagggcgccactgtgagccaagatggtgacggttgtgcatctgagcatcctccacgctcacccacagcctgatgtcctgcgttggggagacctcaggcttcagttgcacactcaggggcacccgttgctctgccagccagatggcacacttcattgccacctgttcatccccgcccgccactgctcgggtgaggctcagggccatttcctctgctttcttggtcttctcgtccatctggcgtggctgtgcccatccccctgggggggaccgtgcctcctgggaaatgctacctccgggtcgcctgggagaggcgggagaccaggagcaactcagccaggccgtgtggcctccggcgcggcccaagccctgtgtgtgcctcgctgtccccgcggcagtcgggaagcatcacactgcccggtgaccaggccgggatcctgcgtggggcggtgagagggcagcgggcgccgagacaggtccgcactgggcgcaggaggaaacgggaccagccgaggtgggaagaagcggggaaaggacgcccggacaccacccagccggggcgttccaagtcccggaggacccccacttgcgggagcgcccctggcgtcccgggtttcaaggcaaagccctctctcctcccgggaggccccagttcttcgcaaggggagcggcttcggcggaagagaa

SEQ ID NO: 322933 - DNA, 1040 bp, Homo Sapiens
  misc_feature (96)..(96): n is a, c, g, or t
ggggcggggtccgggcgttcacgcccgagttccttgcggtgccaccgagggcggtggcaagggagttccccctctagacgccgtttcttcccgctncgggtattgaagcaaggccccctccttgcgcccgcaggacgagtcgctctctcctcgtcggggttggtatgaggcggggccctggtaggcccttgggggcgcgcccggcagccccatctcccaggccaggccgcgtgggcttgttgatgaaggtgcccccggggcactgccagccccccggtgggggctcaggcactgcatctggctgcccccgtccggggttcctgggggaccccgggctttggggggcctggctccagagggccccgcggctgcagcgtgaggtccttgaagcccagatcttccagcatccgcagctgccgctcccgctgcagctcctgagggttgagggaggtgttgcgggctgacagcagatagaggtaggcactgtccccattctgccgcaccccatgggagtgcagggtctcctggtctcgtgccagccgctgcccaatcacccactgctgcaagactggtgggaagccatagtccagaaaaaccatgtccttgagagacgccactgtcatatcagggcgcactgtgagccagatggtgacggtgtgcatctgagcatcctccacgctcacccacagcctgatgtcctgcgttggggagacctcaggcttcagttgcacactcaggggcacccgttgctctgccagccagatggcacacttcattgccacctgttcatccccgcccgccactgctcgggtgaggctcagggccatttcctctgctttcttggtcttctcgtccatctggcgtggctgtgcccatccccctgggggggaccgtgcctcctgggaaatgctacctccgggtcgcctgggagaggcgggagaccaggagcaactcagccaggccgtgggcctccggcgcggccctcgtgccgaattcgccacccagcctcgctaccttagcaccgttagagttactgccgt

SEQ ID NO: 322934 - DNA, 1069 bp, Homo Sapiens
ttctgcacagaaggtttattggttcctcttgggaagggtcccctcccaccacctgtccagaagctgcctttgaagtcagttctgggtttccccagctctggctgaccattttgttccctgagtgtctgagtccccggcaggcggccttcactcagggtcagcgggcaccaggttgctctggaagagcttgaggatgtggttctcgatcacctgttgcactttccggtatcccagggccacggcaaggtccatcggggtgtagccagagtcggcttcagtggtgaggtcagcgcctcgggccagcaaggcctcaacgcatttcacgtggttcccgcgcacagcgtacagcagtggcgtccctccattccaatcatagatgttgatgtccacgtcacgctccagcagcagccccacaatgtctgtgtagccgcctgtgctggccagcgacagggcgctctctcgctcttttgccaggatgtgggggttggcaccccactccagcaggaagcgaacggtctcaatctctccaaaggcggaggcccagatgaggggggtgaagccgcgctcgtctggcttgttgacgaggttgtcacctttccgcaaatgctccttcagctggtccagctccccctgtgctgcgagctggtggatggaacagggaattctagggtggccggcagagctgaacacctcgttccctcgctgccggttggtgaagagtggtggagtgcttcagggagctgcctgcctgtggagaggaaacactggcatccggttcaggattcacaggctcaggggtgcagggaaagagactgaggaccacagtgtctgagccatctgcagcctcctctccggggtcttcagggtccccaagttctgaggcaggggtctgctgggtctggatgaggtcttctgcaggctgggtaagctccatggggaaagctccccacgagcctcctctgtccccccgcgccgaaagcccagttctctcaaaacttgggggcccaagtcacaaacttttctcttccaatggatatagcaggaggcaaactggagaccggaccctcag

SEQ ID NO: 322935 - DNA, 420 bp, Homo Sapiens
aaggaaaaggttaaacctttggtttctcctgccccctaccccacgaccagaatggagggaacgcccactgctgttacctgtgcgcgggaacccacgtgaaatgcgttgaagccttgctggcccgaggcgctgacctcacccactgaagccgactctggctacaccccgatggaccttgccgtggccctgggataccggaaagtgcaacaggtgatcgagaaccacatcctcaaagtcttccagagcaaccctggtgcccgctgaccctgagtgaaggccgctgccggggactcagacactcagggaacaaaatggtcagccagagctggggaaacccagaactgacttcaaaggcagcttctggacaggtggtgggaggggacccttcccaagaggaaccaataaaccttctgtgcagaa

SEQ ID NO: 322936 - DNA, 918 bp, Homo Sapiens
ttcacggtcccttttggttttgggtttttagcccagaaagccctgggggcctgtttcttgccttcttcttgtagcatggagaccacccttggggggccctggggaagggaaggccagtggtgtggcttccctttcagccttagcaacgcccaaaccctttttcctctacctggctccacttgtcccccagatgctatctccaaattccaagtagcaaaattccctgggtttcccctttcccagctcagagtcacttatggctggaatgtgggacaaactcttctaccagaaggtccagggcggttgcagcagctcaaaggtggggatgctggtgacattgactgggatggaaatgatggcccatggcagcccatgctgttccagagagcggcggatcatgtagccgtctcggccgagcaggaagagggcggggatgtcagctgtgcgctgggtactgtcctggatcatctccacgtagaagctgtcattgtcaactgcgttgtcagagatgatcaccgcccgcccgccgtgctcctggaccacccgagtcttggagaggaaggagcagccccccctctccaccagagcaatctggtcctggatgaagaaaccgttgctgagttccccgcaggcctctggaggttcagcggggacaaggtgaatctgctcataccttgtgtgaaagataccaccaaagtccttggcaggtgtggctgtgaagatgtatcgaatgtccccaggactcagcacttgaaagtacaaataatcatggatacggaagccgtgggccgcgacgcacgcggggagccagagcacgagacaacaccagcccgcggcgccggggaccatctccagggcccggcccggcgccgcgtttcctctcgccgccccgccgcgcgtcgctcgcaggacttcccc

SEQ ID NO: 322937 - DNA, 916 bp, Homo Sapiens
tgctggactttggccacaggtatatttttcccttccaccattccggatgggaaaagtttcttgagggtgactgtaggagttctgggactttgtccacacatcttctggaaagaggtttcacacctcccctgtttccaggaggcccacaaaccgaaccccccaggcttgttggctgcctttagaatgtcacagaagatctcccacatcccgtgaacccatccatcagggatgaccaggacctggctagtccgggtgatgcagcggcggacgaggtctctgatgttgttgtgcttgacggtctggaagtacacagtggcgctggatttttccttcaggtagggcttctcagctgaggcccagctgtgcagtagggccggctcgctgccctctgaggccacagggaagtaggtgccggactgtagggagctggagtccagtcccttagggcctgcttccgcccctcccagggtgtctgggggacacgggggctccctggcctgggcctggatgtactgggcctccaccgaggacaagaagtccacctcgccttcctggctgagcacccgccagtaggcttcagaacccccatccaagagggcgtccgtggccagccgggcactctcgttgtcactaaagtcagccctggctggccggacccactggctcttgacatcttccagacgcttccggattttgcccaggtgccttgaccggctcatgcctcccgtccctgggtggtgctgggggaggctggcacgtcagctcctccagatgtgggaagcaaatggaacacaccacggaggagtggggctcccgcacccccgggaggccgcctgctcccaggaccggcgtgcagggcacctccaagaagtgatttccgctgtccgagatcccgggaatccggccggtccagcct

SEQ ID NO: 322938 - DNA, 1295 bp, Homo Sapiens
  misc_feature (533)..(533): n is a, c, g, or t
ggatgatgattcccaagaagctgaagttatccagtctctgctggatgttgtggatgaggaagcccagaatcttttaaacgaaaataatgcagcaggagactcctgtggtccaggtacattaaagatgaatgggaagttatcagaagagagaacagaagatacagactgcgatggttcacctttacctgagtattttactgaggccaccaaaatgaatggctgtgaagaatattgtgaagaaaaagtaaaaagtgaaagcttaattcagaagccacaagaaaagaagactgatgatgatgaaataacatggggaaatgatgagttgccaatagagataacaaaccatgaagattctgataaagatcattcctttctgacaaacgatgagctcgctgtactccctgtcgtcaaagtgcttccctctggtaaatacacgggtgccaacttaaaatcagtcattcgagtcctgcggggtttgctagatcaaggaattccttctaaggagctggagaatcttcaagaattaaaacctnttggatcagtgtctaattgggcaaactaaggaaaacagaaggaagaacagatataaaaatatacttccctatgatgctacaagagtgcctcttggagatgaaggtggctatatcaatgccagcttcattaagataccagttggggaaagaagagttcgtttacattgcctgccaaggaccactgcctacaactgttggagacttctggcagatgatttgggagcaaaaatccacagtgatagccatgatgactcaagaagtagaaggagaaaaaatcaaatgccagcgctatttggcccaacatcctatgcaaaacaacaatggtcagcaacagacttcgactggctcttgtgagaatgcagcagctgaaaggctttgtggtgagggcaatgaacccctgaagatattcagaccagagaggtgcgcccatatttcccatctgaatttcactgcctgggccagaccatgatacacctttctccaccagaagatctggctaccttttatctcctaaatgaaacacctcccccgaatcaggccccaaccattccccacttgcatggctggacattggaaccgttcagggaaccctggatttgccataaaaggggggttctggggaataaatcaacccaggatcttggaatttgggccatctcccggaatttgggggcccctgtctgaaaaattccaaagaacccggaaaggggtctccaacgaagggcgcccctttatttttttcgtggtaagcaggggcgcata

SEQ ID NO: 322939 - DNA, 972 bp, Homo Sapiens
  misc_feature (46)..(46): n is a, c, g, or t
  misc_feature (57)..(57): n is a, c, g, or t
  misc_feature (125)..(125): n is a, c, g, or t
  misc_feature (729)..(756): n is a, c, g, or t
gaacatggcgaaaggtatccaccctgggattgcacgtgggtccaanctgggcccccntggtaggatccccattgagtgactgcacgctcatgaacaatcttccagagtttgacatgtaaaaaganctggaagaaccagccgagttgggagttgagggcgagttagcttggcttccatgggctgacacattggtagcagtgacagctgttttggcagcataaatatggctttcctcttgaaattacctatgttcttcttgtaccggattcgcttatttcccaaaccagtttgatacctgggagactgtgatgccacacttcttggctaactcctctttggcttcctcactggggtaagggttgctgagatgggaatagaaatattcattcaggatttctgtcgcttgcttgttgaaattccgtctcttccgccgcgcatccagaaatcgggaacgcaggatcatcaccgcctcgcacgtgctctgcttgagctgcatctggatggagctgaacttgcggtggatgatgctgaccatccgctcaatctcctttggggagatgggcctggtccggctttgctctcgcaggagattcatcacgtgggtggtgaactcgttgcaggcctgctcgtatttctccagctccgtatggtagatttgtctgatctgtgagagtttggctctgtaatctgaatgctccactgagttgtctgaacctgcccctccagaannnnnnnnnnnnnnnnnnnnnnnnnnnnaccctccgcccttctcaggccccgccacgccttccgctaacagcatgttgtccagccgcatcagctgggggtctgtgggttcctcctcctgggctcctcggatactcaaaaacttatccttgcttgctcggccatcttctcactggttcaagtaaacagaacatgatgcctaccaaagatatcctgacatgcttctgaagagagaggctccttccc

SEQ ID NO: 322940 - DNA, 1661 bp, Homo Sapiens
  misc_feature (836)..(836): n is a, c, g, or t
cggcaggagcgcgtgagaggacgaacacacggggtcgccgcgtcgcgcagacccctccgggtcgcaggtctgacgagaccagtggagctgcgcccggggtgtggcgcgccgaccgctgtgtgtcgttcacaccatgacggagcgaatgcttggtctcgcaactggacgcaacctgtcgtgaagcagactgtcacatcgggaccaaggcatcggcgaatccgattgcacacctgcccaaggtccagcatcgcccgtcaccaagcccacatcatcacgggagcggagagactggtcagaaagatgtggagaagcactggccaccgtcatcttctataatgacagtgtcatcttgggccatattcactgtagggaccagctggtatttacccattatcctactgagggcagcatttctgctgggcgattcatcaagcccctcaatcccactgtaagagggaatgggaaattccttcgttctctatcatcccaacgctgtttcaatgggcagctcaggtcccaggggggctcccaggtgacttcagctcattgcacttgcttattctccttgcaaccataagctggatcattcctcgtttattgccttcagtagacatagaccttcttagggtttccatggcatcttggtttgtcttgcccaacagggattctccatttactgctatcagttgatcattcacccgaagccttccatctttggatgctgctcctccattaaataatggacttgacaaaagattcccaaatctgggtggttctcttttgaccggttacctttgacactgacaccaagggcctgcagatcctgaatcattaangtgggacttcaaatgtcagaaattccctggtgccatcaggtgtaagaacaatatcctcatcttctgctttcagttcccttgggtggaaggcgtcttcctggcgaaagaccagaaggctcacagttccttccatcttggtgcttctcaacagcgaaacaacttcctcttgggatttgcccactaaatctactccatttacctctataagtctgtctcctgccttaagtcggccatcctgaatggccgccccccgggggagaatgtttttcacatagattggagctgagccacctattgttacatctctggaagtgatgctgaatcccaaaccttctgtacctttcttaagctggatattaagcctcttgcctatttttttggtgttataaccactgcttacagtcgtactaaatacattctgaggtgccgaggctggagcggatggtggttttcccgaggggtgtgcgctatgaggtagtcttgagtgagagtctatctgctcaggcgggtggttcagtcggggtgctctctgcaccgtgtgaagccctgcactgttcacactcctgttgtcaatatactggctgtcagggctaaaacggcttgaatagtaattgttcttctcactttgggatagttgttcatactgctctttatttgctgcaggaaccacatggaaccaaatgatgggtgtacgcatggcttggcgaaacatatgttgtgcttgttcaaatcttctatttcgaaggtcgccatcattaatcctgacaatgcaatcattctcacgaaaaagattttcatgttcagctttaccaccccacgcgtccg

SEQ ID NO: 322941 - DNA, 983 bp, Homo Sapiens
ggcaactcagtctttattgatggtttcatttttggggtcaccagtgctaagaggtggaaggtgggggggcacctttatgtgtgtcaaggaccccagagcacccccctcacgagagaataaatccaatttagaacttacaaggtggtggggatgggaagaggaagggacacagtatgtacagatgcttaaggggatgctggagggccttcagcaacagggaatggaggtgccaaagaggaagtcgggcagagtcagccactgatctggaccccctcagcctcggccagagggtagatctcaatggcttccaccaggggtagcgcctccacagcagtctccatgacggccaggccaacgggcagcctccgccttttgccagttgctgccgccccagctgcctgatgctgctgctgatgggtcttgcggtgcttccagaggttggagaaggagcggtagctcttgccacagtcagggcaggagtagggtcgttcgcctgtgtggatgcggcgatgttctgccaggcgcatggagatggcaaaggccttgccacacacttcacaggcaaagggccgctcacctgtgtgcaggcgccggtggtctttcaggtgggtactctgacggaacgctttgccacagtctggacatgggtatggccgctcacctgtgtggatgcgccggtgcacctgcagtgacgtctctgtgctgaacagcttcttgcactcgctgcactctagaccccggcggcgggcaggggccgcaggggatgctgtagcagtgcttccaagggctgctggagaggcaactggtgcacgagtggcccgtggggctcgaggggcagggggctccttagccaggacctctccaggcccagcagctgcatgggccgcctcgtgtgcctgcagtcgagcagctgagcccactttcttgccacaggtgccacactcaaagcgccgtggggcctgggcagcagcggctgcacagcg

SEQ ID NO: 322942 - DNA, 2194 bp, Homo Sapiens
  misc_feature (192)..(192): n is a, c, g, or t
  misc_feature (716)..(831): n is a, c, g, or t
  misc_feature (2179)..(2179): n is a, c, g, or t
tgcgttttgcccgagcatcatcatcggcggaggtatcgcggttttctgcttactctcggtcttcctcccccgtattccccggagccaagagaacgagctgggttgtagtatatgactctctgtcgcgccgcgcgcaccggccctcacctgactcaagtgctgaagcctgggcgcctagggggtgccgggggngatgccgttaacgacgctgagaggctctatcgggggagagcctgtctcctcatggatgtggggccgctcgccccggtggtgtgcggcattaaagcgtgtctgccgcgagttttaatagaggggggtttggtgtgtaagatgacatgcgtttcacgtgatgttatggcgggggaagatcggggggcgttgcgcataagaacacgcgcggttcgcgggagggtgtgggggccccgccgccacagaggggggtgggcgttttaggtgcttaagtagatgggggtgggaaagggcaattgcccgaaaagcccccattcaatgtcccacctggtctcccacggggtttttttctttaaggggatagacaacacttaagtggacccagtgttttccacagttgtcgcgctaacttggggccccggcggcgcccagaactgaaggggtttttgaaaaggctttttgcgagggggcccaaggcggcccgcccagggtttttacccgtctcgtctgttgtacgtcccgtgtgnnnnnnnnnnnnnnnnnnnnnnnnnnnnnnnnnnnnnnnnnnnnnnnnnnnnnnnnnnnnnnnnnnnnnnnnnnnnnnnnnnnnnnnnnnnnnnnnnnnnnnnnnnnnnnnnnnnngctgggcgcagggaagccaccatgatgcctctctgggcaccaaactgctggatcggaaggtctggtggatattactaaaccatacccctacaccaccaccaccaaacttctgcctctgtctttaatacaagttgggagactggatgggctccagggtgaagtgagaggttcttcaaggtgaactgtttctgcatccagtgccaggtctcctgtctcaaactgcaggggtgcaggcagaagcggggagctatgcccagtcagtgccagcccctcaccctcacgccacagcagcagcagcaccaggctctctggccaactgcctgtttgcccacgtggccacactcctgggtgggtgcagcctcactgtctctcctgcactgagatgcgactctctttgccttcctcctgggtgacccggttggcatccatgtaaaggtctcttgcactggagcagcagtgttggagccaggaagatcgtcgggaaaattgatctcctggggttcctgcttggggtggggggccttattggttggcttcttggccacctttttgataaagaccagcccccagaggatggcaaaccaggatcccgaagatgatggggatcaccaccagggttctcagccgatcctggggaccacagacaacatcagtcttgtttgtgcctgcctgttgcacaaccaggtctttggtctcacagcttgtccaaggggtgacatttttcgaaagcagatgacacattggagaagaagccgactgggcagggctcgcagatggtatcagaaacccctgtagcaatctgcttgaccccaaagccgggcgagcatgagcggtgcaggacacagctctcacaggcctcactcgtacagtgccagccttcttcacaggtgcagatggtgtctgtttctgaggtgcccttctgctggacccgaagccctaggttggggtcgcagtatttgtgctggtggcagtgtgtctctctgttccaggtgtctaggaattcgctttcaccgcaaggaaggcattccgtttcagtgaactctgtgcagtcactcaccagtttctgtcctggctggcacaaagaacagcactgactgtttattaggtactgtttttctctgcatgcagtgggtggttctggatggacagcggtcagcaagcagccccagaggacgcactgcagaggcagacgaaccatggcgaggtgagaccaggcggcaggaccactgggcgcccgagcgaggcctctgctggtaaacctgccccagcctggccatccctgaattccggatccggtaccccagccctgctttttgtacaggcggaggaaggaaagtgggaggagtgngggaggaaagaatgg

SEQ ID NO: 322943 - DNA, 1632 bp, Homo Sapiens
  misc_feature (40)..(48): n is a, c, g, or t
  misc_feature (76)..(90): n is a, c, g, or t
  misc_feature (103)..(244): n is a, c, g, or t
ggggaaaaaaggtggcccctttgccttttcttttgggggnnnnnnnnnaacgaaaggggtttgaaaaattttttannnnnnnnnnnnnnncgccccaagaaannnnnnnnnnnnnnnnnnnnnnnnnnnnnnnnnnnnnnnnnnnnnnnnnnnnnnnnnnnnnnnnnnnnnnnnnnnnnnnnnnnnnnnnnnnnnnnnnnnnnnnnnnnnnnnnnnnnnnnnnnnnnnnnnnnnnnnnnnnnnnattctgaaatggactttaattggcttttgtctctagaattacccacccgttcctgcgctctacggttctccatgccccctccagtttgggggtctaaaccgaacaggagaggtgcaggggaccaggaggtgtcctggcacaaaggttcgggggtctccctggcaaggggtcccagggcctggagcccaaggcccagccaaaagcacacagcatcaaaacatgtttttagtgggaagctccaggccctgcccctccccgggggcctcgaggtcggggagcaggtgggcgtctgtctgcctccaggtcatggcagtgcaggcggtgagctgggggccggcaggggcgcggacagtgcggcgtggtcgaacagagggttgcgcacctccattttccccgttcggggccagtcccgggcactcgtacgccgtgaagtctccgtcgtcattctcctcatccgaggagggccgtgtccagctccttgggtggctctttatgccgctccaggcacagcatctgttgccgttggtgctggtagtggtacatctccgcgctctgtgccagccgctggtccccaggcgagatccggggagctgcaggtgagccaggggccttcgcagtggcgtagtcggccttctgagtcaggcggatctcacgctgcagcctgcaccagcagagggaggctacggagagggcggctgcaccggccacacagaacgccaggatcagcacaagggcgaggccgtcgccttgccctccccggggctccaggggcgacatgtgcaccgggtcggatgacacaggggagcccagggaggtgtggggcgtgggcgtgggggttcctggagtggaggggaggcccagctccagcccctgcccccgtgccgagaagcccagggtggcaggctccgggagccgctgtcggtccttgggtaggggcggagttgagtgtccaggctccttccgggcaagctcctgggccaggaagtcaatctcatcttccagtctgggctggggccggcccccgcctggaggccggcgcatcctgggcacacagagcccttgctggtcctcctggaagggctgaaggcagggcccacaggcatgtgcaccaggaggacaccttgcccgcctcttcagggcacagtccaggctcccgggacaggcggctacatccgggtggccggcggcggctccacgcagggcggcgccgaggacgaggccggagagcagcagccgcagcagccgcaggtgccgcggggagggcggaggcagcggcgtcgccatccttcagcgccgccgccggggcagcatggcaccgcgaggccaggggctcggcgcgggctccgggctccgcgtcgggagcagcggaggcagcgggggaggatccc

SEQ ID NO: 322944 - DNA, 1198 bp, Homo Sapiens
acaatattgaaaactaataagatgatcgtttattggaagaacagcaacacaaaccaaaataaacctataagaaaacaatggacataatgaaacagaaaacaaagctcagtggggaggacacatatttactcaaacatcctggcaattcatatctagggcactccctctgtgtgtcagacgcccttgcatgtgtcaaatgtcatctgataacattgatgaaaaatatcattcacttcttcttggtgcagaaggcatagaccggattatgcaatcactgagaagtagcttctggatgtgttttctggtggcggtcttaaccatttccagccgactgaagggctcttggaccctttggaacatttgtagggtttctctccgggagtggatgcgctggtgctcctttcaggctccccctgtaggtgaaaactttcttgcagtctttacattcgaagggcttctcccctgtgtggcttctcttgtgacacttcaagtaggacttctgggtgaactgcttctggcagacgtcacacgtgtagggcctctcgccagtgtgggttcgctggtgaaattggaggctaataagctgcatgaagcgcttcccacagagattacattgaaagagtctctcgcctgtgtgtgatctcttgtggatgactagcttggaattacacgtaaacctcttctcgcacacgtcacatgcaaagggcggcagtgccttggcttcttggccatccgggtgactgactgggctcgcagggcctggggaatgaattgaattcatcccagcttgtcctggggattctctgttgcccacaggtgtggcttctccttgaggctcttcttgggaaatggaggaggcatctggtttgcttcttttgggactgctcagattcagagcgtctcctctgttcccgctgtgagtcgaagcttctctctccacaacgcaggcagaaggtgtgtcagcatccacattttccacagaggctatttttggggggtccttcccctcctttgctctcaccagatctgtgggactctttggaagctgaggctctggggatgtcagtcctgggttctcttccctgttttccttcagatccttctccaaggtctgcttgggtctcagagactttgggtcacctgttacgtcaatactcttgtgtagcagaaacgtcctctcctcgtgccgaattcgcca

SEQ ID NO: 322945 - DNA, 536 bp, Homo Sapiens
tttcttaaactattgttgtgtttctttttccctcagttgcttgtttctgcttgaaggaaaggttctccaattatgttcaaaccgtaattttggacattggccggtaagatgggtgtcctatttgacacttggaaaggaaccaagctagcccaggtaccaggactttgccaagtaattcccaatgtatcctcactggtactggggtataaatgcctgccgttttgattcatggtccagtcacaaatcctcagctgttgctgatgtaggaaggatgggtctcttgggcttagtcccacatatcgattggcttgagatgtgcctgaagctgtgtaggtggttgctgtaggtgaagctgcctcaccttcagtggatgtagtgatgggtttagtatctgtcatgctcagggtcacaggtcgcactgcactgggatggggagagggtgccaagacaggagtgaaatggccaggcactttccctactacttgaccactgccgttaggctggctggtttgtggactggatgggtcataagaagg

SEQ ID NO: 322946 - DNA, 1282 bp, Homo Sapiens
  misc_feature (299)..(495): n is a, c, g, or t
cccgcagcgcttttttgtaccggtttttgtttttatccgccctctttaaacacgggtggagaaataggtttatttttgttgcgctccgaggagggcggtaaaatattttcgcggggagggggttttgtccaccaaattgggggcccgcccccccaaagaaaagaggggttttcttgccagaaaagtctccccggggggacagttgtttttccccccgcccggggcggtggtaaaaaaaggggggcccgcgcccgtatttttattataggccccgccccaatggggcgcccccttttctnnnnnnnnnnnnnnnnnnnnnnnnnnnnnnnnnnnnnnnnnnnnnnnnnnnnnnnnnnnnnnnnnnnnnnnnnnnnnnnnnnnnnnnnnnnnnnnnnnnnnnnnnnnnnnnnnnnnnnnnnnnnnnnnnnnnnnnnnnnnnnnnnnnnnnnnnnnnnnnnnnnnnnnnnnnnnnnnnnnnnnnnnnnnnnnnnnnnngctaaagaccttttatcacttttgcaaaaaaccaagaaaaggccaactccatttattttattcacgtggatctcttaagggaactaccaaatctactaagggacctccaagaattttgtgacccatgaaaatctcctctcctagtcacaagggcataaatacataaaaatacataatggcaaatttctgaatctgacatgacttctcccaaatacagctgtcttcagttcctttattattgcctctttgcagcagcggtgatggtgggtgatggagtgacatcaggagcgccagaaggaggaagtcagaaagcccttggggacaggaatgtccttgtgttgcaaacatttctccaagaactgcttgaggcgtatgaaggagcccatctgtcctgagcttgtgatagcttcaattctgggaaagtagtcctctttgatgagaattagcatcttccagaactgaacctggtattgcttcatgagggcattcccacacacctccaggaagtcaaagaggagggtggctgtcacatctgacaagggctccatgtttaagatctgtgccaaccagcgccatccatgatttaagccatgagggtgaatctcctgtcggtttccatatggccaccggagctggatgatagcagcgtagagacggatcatccctgacatgcgttttagaaagttgtcttgctgctccactttggaatcctttacttggtaaccaagcatcctctgatagtcttccaaagccattccctccttgaaagtgggatagaaaggaaccc

SEQ ID NO: 322947 - DNA, 1052 bp, Homo Sapiens
tggtgccgaaggcggtgaggtggcgggtgaggcagacggcctggcggggcgaggtctcctccaggggcagcagcccctctgtccgccacaccacgtcctcctcgctgaagtactggcacagggacgtgtacaagcccacggacacctccagcgccgaccagcggaagtggctggagaggttcagacggtaactccccactgggtctctggtccccggggaaatgaagaaggtgtagggccggtggtcggcaccctggagggactctgggcggatcctcctgctagccgagcagttgcgctcattgggccggggctccgagtgcaggtagactgccaggtagggctcgggttcctcagacaggtagcggccttcacggtgaggcgcgctctgaggccagccgctcgatggggatctgggcgccggcctgtgtctggaacgccatcgaggcccaccttggtggagacggtgtagttgctgatatagccaaagggaaagggattggagtccaccagaaagatgagctgcaccacgtcactgaggttggccggggccctgctgaaagcccgccagcgtcaggggctcctcgttgagcacgcgggagcgcgtgacgatgggcgtgagggcagaggtcaggttgtaggcctgggacgccaccatccgcgatggtgactcggctcccagctctgagcgctgtggtgcccgcacgtctgagctggccaggtggatgaggtctcctgtgatgttgaggatgctgtctccgatggcggtgggcgtcacggtgcccgcggtggtctctgcctgcaggatgcgcatcatggcctccagcttgtgcagcgtctgcttcaggcacgagcggcatacgagctccctgctgggccccatgcactgggccagcgcagcagcgatctgctggatgtcatccacagtgtggaccctcagggacaccagagtctccgtgatgttcttgcgtatctgggctcggcgctgccgctcgtgcttgggctctgccgccacgtccagggcccgctcgtactcgttcagcacagtgacc

SEQ ID NO: 322948 - DNA, 1100 bp, Homo Sapiens
  misc_feature (322)..(322): n is a, c, g, or t
  misc_feature (326)..(326): n is a, c, g, or t
  misc_feature (591)..(641): n is a, c, g, or t
aggtttgaaattcccccgaaggggggggtttttggatttttccccccccggatttcccatttggggactttaaaaggggcaaaaaattctttcggtaaagggcctttggcccacggttggcctttggcctttttcccccgggttagattccccaaccaagacccaaaagtttttttaattccaaggaatttccccgaaattttcaatttctattttcctcccaaatgagactctttcactttttctggattttctggttcttgggatcaggccccagagtttattttttctgttattccaatggggacagtcatttctatgnttgntcagcagaatttggatcatcagcatctagatggatgtcatttttttcttttcttgtattttcattctgtttctctgggtcattctttctgtaccgatcatttcctcgtggacatctccaaccatcatttgcccatcttcccttccaccggggagagtaactatctctgtcaattctaccaaatgatgaactcttactttttgttctacatcttgagggggacctagaatgagatctggacctagaccactttctggttctccttnnnnnnnnnnnnnnnnnnnnnnnnnnnnnnnnnnnnnnnnnnnnnnnnnnngacctggatttttctcctggggaagaatctttcactcttggctgagatcttttgttctctctagaagtttctcttcttggggacagtgattcagatcttctgctttccctagtagtatccctttttggagaccgagactgagattgcctcctttctcttgcaatatccttttttggggactgagaacgggattttttccggcctctggctgactcattcttaggagatggtgattgagacttcctgctttctttcccagtttctcttctgggagatggagactggggccgcttcttttcttgtggagtgtctttgttgggtgaccaagttgtagatggagaatgaaatctagatcttcgagtacgaggctttttggttttatctatggtatcttttgggctttcagatggttgagaaacagtttcaaccttttcatccgcaagatcagaagacggcacc

SEQ ID NO: 322949 - DNA, 1132 bp, Homo Sapiens
gttcctgcagctcagtgatgtcattgcgaatgtcaccaagcataagtagcaggaagttcgaaagaccagggggttcctggagaccctctgggcccaggcgctcctcgtctcccccttagaaccatctcttcctggtgcccctggtggacccacagggcccctccggccttgcttaatgtgggacagatcaggagatggtcccatgggtcccattgagccccgtgggccgggctgcccaggagggcctggcataccggggaagcctgggcttccctttggtcctggtgagccgggagggccctggcccccaggcaggccaggaggtcctggaaggtaggtgtttgaggccagcaccttgtcaccagtgatatacttgcccaggtcagctgcattgttggggagcagagcaatcttttgcttcagctgcagcacggtctgcttcatctggtagaactccttgcatgtggcacagcaagttccggctttcaccatgttcttcagacttctcatggccagtgtcattgggatatttgtctcccctggtacatgtcttcccatcatcttcccggatgtagccttcccggcactcgcagcggtagctgcccaaggtattgatgcagatgtgggcacacagcgtcccattgctgctggcacactcatcaatatccagacagtatggcttctcccgcttccggtgtctctcccggtcatatcggtatcccggataacaagtacacagcactcggccaaagttgtccgtgcactgctgttcacagggagcctcggcacaaacgtcgtaatcttctgggatgcattgtccaagaacaaatttatatcctttgcagcactttttcctgtagcatgtggtgagctcgcctgaagacttcagacacgggtatttagtcgtcgcgattttgctctctgagcagatttctctgtcgccgtcctccggctcctctctgtaggtccacgtgtgtcccaacgccaggagcagcagcagcggacccaggctcctgcccagctggcccctggcagctcctccccggctcggaggcggcggcaccatcagggaagctcccggcttcttcccagcgccgagctccgtccggaccaagcgtcctgctcctccgcg

SEQ ID NO: 322950 - DNA, 1189 bp, Homo Sapiens
  misc_feature (75)..(92): n is a, c, g, or t
acccaagttaaatctctttaatatcccaatacaaagtactgatgcaaaaagacaatgagaaaacccaggaagttnnnnnnnnnnnnnnnnnnagaggttttataaataaaaaaccccgagcagcttttcagaggcagaggagctaagagaagcagcagtccaaagtgaggaagggagtgtgtggctcctgggacctgccccttgtcccctcactcacagctgctcgtaaacacccctttcaaaaggggctgcaccctttggatatctgcttctttctcttggtccctggggacgccaactagctctggcttcaatcccctacaaaaattcctgagatctcggggacccccagccagcccttcccctgcaggtaccccttggtggggagggctggggagccggtgagagttcatagcgtatccaggagcataggtcaggagcacaggggagcctctgagtcccctgcccgctccaaaagcacacaaaggggaaggctgccgtagagcttggggtccgtgaggggctggagcagaagcaggaagagtcccacacccagggcatagcctgccagcaggggccgcctctgtgggtgctccaaggccgcgcaaacagctgggaaacccatgtaattgcagaaggaatggcagagaaccggcccaatcaggtgtcctgtgcggatgaagaggaaagcagtgtaggcaccgaagacagctgtgtaggagaactggaacgcagcagacaagaagatgttccccacgctgctctggcggaaacgcagctgctcaataatatggtgaaaatgggcaactccaaaaaagagcgggcaggtgaacacagcagggcccaggcccatgcacggtgctaacatgggcagcatacaggcccggaacaccagctcctctgtcagcggggcgatcacttggttccgcagccaacgcatgtctgtgaggcagcgggcccaggagcggggggccaggacaaccttcagcccatctgccaggtcacaagggcaatccatagagagctgcatcagtgggcccaggaaaagaatcatggtcagcaacaggggcagcagcgccgctgggaaaatgccctccagcctgaagcccatcagggtgagcagggatgtgcctggctggatgcctgtgagttccctccagagcagcacgcacaggggtgagagactgga

SEQ ID NO: 322951 - DNA, 1238 bp, Homo Sapiens
  misc_feature (238)..(238): n is a, c, g, or t
  misc_feature (247)..(247): n is a, c, g, or t
  misc_feature (258)..(258): n is a, c, g, or t
gggatcatgccctccttgctacccagcgggggcagcaaagactcatcctctaggaacttgagggggaagtggaccaggtggccctggacctgggtgagctcagaccgagccaaggggggactgaccgtggccaagggctccacggccacgtactcccggagagtccgcagggaacgcgtggcattggatggcaggcagcggaagatctgctcatagatattggcgttgctctcagccnatgtcttgnccacaactggnaagaattcatcaacagatggggtctcggaagatccaagtctggccgggtatttgctccaagaatcacaccgaaggcagtgcttccgcagactcaaggcaaacctgcccgcctgatactctgccccattcatgagggatggttccgtctctgtgtcctcgatcagcacggccagctcactgtcccgcttccccagcaagctccggtcattgatgtttgcagaaccaatgatgactgtccggtcatctgcgatgagcaccttgctgtggatgtagatgagctccgagacggggtgcccgcccagctctccgtgtgtacgaagcccgcagatggaaatatagtcccgccatgctgtccccatggctgctttaaggcgatgcaggattgaatactccccacgacacagggtcctgtaagtaaagtgcagaatggcctggatggagttgccaccgcccgtggagatgtcaccctcgaagccagggagtaagggcaaaagcacgtagactcggtaacaccacccctgtttgtgggccttcaggattctgtccacaatctcatcgcccaccttgttcagaaccgtccgcccatctgagcagctaatgaagaactgattctcaatgtagaggaagtgctggctctccctgatggtgtgcaggtaggcattgaggatggagttctccagagtccctgctgaccagcggtccactgatcgcaagacctgtacggtggtgcactgccctcctggaagtgtgaaggggagctgattggccgtgctggtagacttgggaagcaggtaggggtatgtgggagtcttgtacttggccttggtggtcttggtgaagttccagcgctggatgaagtgccgggcaaggtcccgggccggtaggccatggacgaccaccccaacgtcccgccatggcatccgaggggtcgtcttcctgtcaatgaaatcttcgaaaggccggtccagctgcacccagtc

SEQ ID NO: 322952 - DNA, 956 bp, Homo Sapiens
  misc_feature (79)..(440): n is a, c, g, or t
aaggtgagaaggtgggagggaagggaggctggggggagggaggcggatgagaaaggtgggagggaggaaagaagtggtnnnnnnnnnnnnnnnnnnnnnnnnnnnnnnnnnnnnnnnnnnnnnnnnnnnnnnnnnnnnnnnnnnnnnnnnnnnnnnnnnnnnnnnnnnnnnnnnnnnnnnnnnnnnnnnnnnnnnnnnnnnnnnnnnnnnnnnnnnnnnnnnnnnnnnnnnnnnnnnnnnnnnnnnnnnnnnnnnnnnnnnnnnnnnnnnnnnnnnnnnnnnnnnnnnnnnnnnnnnnnnnnnnnnnnnnnnnnnnnnnnnnnnnnnnnnnnnnnnnnnnnnnnnnnnnnnnnnnnnnnnnnnnnnnnnnnnnnnnnnnnnnnnnnnnnnnnnnnnnnnnnnnnnnnnnnnnnnnnnnnnnnnnnnnnnnnnnnnnnnnngggtgccccctcacccatccacactcctccctccctccccggcctcaccctcgcactcggagccagcagtgttgggttggaagcccatggggcagacacactggaagctgccttctgtgttctcacaccggccgtaggtgcagggtggggggcttcgggcacactcatccacatcctggcagctggctccgtgcggtgcagcctggtacccggcggggcacacgcacaggaagctgcctggcgtgttctcgcagcgcccgaggtcacacggcggcggcacgcggtggcactcgtccacatccaggcattccgcagcccgtgggccggctcggaagcccgggccgcacacgcagcggaagctgcctggtgagttctcgcagcgcccgggagcacagggcgggggcacgcggcgacattcgtccacatcaatgcatcgggtgccctgggggctgagccggaagccagagtcgcaagcgcaggtgtagccgcgaaaccgggaaatgcagcgtccatctt

SEQ ID NO: 322953 - DNA, 1224 bp, Homo Sapiens
  misc_feature (106)..(114): n is a, c, g, or t
  misc_feature (126)..(126): n is a, c, g, or t
  misc_feature (133)..(149): n is a, c, g, or t
  misc_feature (932)..(932): n is a, c, g, or t
  misc_feature (1125)..(1125): n is a, c, g, or t
  misc_feature (1150)..(1150): n is a, c, g, or t
acactatttttctttgagaggggagattctccccccttatataataccaagccctccccccccgcggggggtttttcgtgtgtgcccatcaaccctatttcttttnnnnnnnnntcccctgttccnagagatnnnnnnnnnnnnnnnnnaccatttttgtttgcggggggggctccccgggttgatctcccaaaggtagggccccgggccccctatttcccaccagagtgggccttaaaggagagaaagccttttccctttctcccacaggcccaagtttaaatgcccactctttaaaaagcggggggcaccgggaacccccctgggtttcccggggaacaaccgccgtttcggaaagccccccccggggttcttccacctttccctttccccaccctggtaacaatcaacccggggccggaagttcgggccaattcttccggagggttcgccattggctgcacccaagttttgcacgcggcattgccctatcgaggagccgagtccggtggtttatacgtttccagtccgcgcttcaccatggggaaaggtacggcctagccagcccaccgtgagacgaaaggccagggccggtcctccaatcccgggagagtgcgtcgttagttttcgttgtgagggcgagcccatccccaagaattacaggtaaggccgatacttctttcccttgcaaaggcctgtgtttgccctccaagtcccctagggcttcctgcgtctctacatggccaggctgcgaatacctatagcggtgctagcggacctccgtgccacgctagtagtgtggtgggtattccgcagcagtgcacggcttgtggcagcctcgatgaagcgttccttttcccctcatatgccaggtccatcagcgagccacctcacgagcatcctgggtacacgtctaaccctaaggctgaccnaggtggggctctcggaggcgttagccccagccctcccaggagtcttaatgttcctctcaacaggaaaaaacgttctgcgccctttgtgccccaaaccctcgacccttcactcggcgagaggggtcgctgagggagagatccacctctgcccttcccgttgcccgccggttcttcctcgcccgcctcttacgcnaccccgctcccgccggctcctgganaagccggccccggccccagcgcttccctccccggcctagcccctctctcccacccttccgctcgcccaggcctt

SEQ ID NO: 322954 - DNA, 444 bp, Homo Sapiens
  misc_feature (17)..(17): n is a, c, g, or t
  misc_feature (25)..(25): n is a, c, g, or t
  misc_feature (110)..(110): n is a, c, g, or t
  misc_feature (115)..(115): n is a, c, g, or t
  misc_feature (170)..(170): n is a, c, g, or t
  misc_feature (173)..(173): n is a, c, g, or t
  misc_feature (261)..(261): n is a, c, g, or t
caattaaccactgacgnaacctccntcaattgaaaaggccaggttcgggggaaacatatcggttccacaattgtttgctggccgaaaggtccaggtttgatctcggttgncaaanctggtaagtccccaggccctggccgttcggggccggtgccgcagcccagtggggntcncacagctgtggtagagccggtagatgtcgtagcagtgctcggaagcccgaggcgttgtagaccagccctgccagtgctcgcagccccnttgatcctctgggcctcactcagcagccgatcacagcccaccttgacggggttggcagggaggggacccaggaagtcagtggggtaggggtagtccatcatggccagcacggtgaaggcattccgggcgaacatgaagagctgggtcaggtccttctcgtctgaccagcggctggcaggtgcc

SEQ ID NO: 322955 - DNA, 902 bp, Homo Sapiens
tcaaggcagaagacccaggaagacaaatcctggctgactacttgacacgttctaataactttctcccagtttccttgatatgacgactgacctctttcaaagagaagtttgagccgatttccaataacatggactttttctttggcttctaaacagtctgttccttcagcattcaccagtagttggcaagacatgtcttgcaaagaggctactctgagttgggattccaacagctcatgctttatttgcataagctgtttgtgatggtcctgaagtatctctgcatcaaggttagaatcaatagggacaatttcatttttccttctgtcaatgttctccagcataagaagcaaaccatggctcatttcatggaaaccctggcactgcatcagggcatcctgcagcaggccccgccactcctccagcagagagcacactcggtcccagcgcccattcatctgcgacaagcgatcctgcaggtcccggctctccttgctgtcagcctgggtgaactcagggctgcagagattgatggagaggatgatggctttgcggtggtccacagctttctggagctccttgagctttttgatctggagctcgatggtctggatgtcagtgctgagttccagacgctggagctgttccaactcctcctccgtgtcccccagccaggcccagatgctgttcaagtctgagttaaactgctgccacttctggaggttctgcttcatcctcaactccttgctcaatgcctgggcctggagaagctcccatcggtcaatcacaccagccgtttgggtttcggtactatgcaggttaacaaagccaggaaggctctcctcttcctccttcagtttgtgctccagtctcttcacggagtctatactgctactgcattc

SEQ ID NO: 322956 - DNA, 1348 bp, Homo Sapiens
  misc_feature (58)..(58): n is a, c, g, or t
gtgctcaaacattttaatcatttctgccctgttactcccaccccagatccaagcgccngccaagttccggtgggggctcagtcctccggagtccaggagtcagggctcgggggcgttcagcggcaagtgggaagattggggcttttcctgtcctcgaagctgcacaaaggtggccccagccagaacacagggagagggcagagagatgtgctcatcagtctgggcaggcgggccgggagcagtcttccagaaacaggtgggagccagggctcattttcatagccaagggtcccaggagctccccaggagcttcggccaatgggctggtccatggtgggtgaggggccagaggctctggccattgctacaggcagtaaaactcctgactctcagtgatggtcccaaaaagcacacccagaagaatgggctcaaagatcaagatggggccccagcctcccgcagagtcctgaaggaaggagtggctcaagtcaggccctgggtccaaaggccatcagggaaggaccaggctcctgtccttgagtgtgatgcatccatcctggaagtagggccagctcagtgctcgctgagccatggggagaggaggcccagagccaggcccagaggcaggaaaaggatgggcctcagcaaggccctgggctggggcagagctgaaggccaggtggctgccacagaggttgctgtcgggctgggactcctgggtttggggcaccacacgaggctggagttctgtcaccttgctttggatccaggaggcatagctggaggccagagtgtacacaccaggcctgttgcgggccccacaggcatctccccagctcacaatgcccgtcaggtaccagagaccctccacagggcaggagagtgggcccccagagtcaccctggcaggcgtccttgcccccctccacatagccagcacacaccatgtcctcttggacaaagtgcggctcctcaggcttggcgtcgatgttgtacaggcagttacacgtctcacgactgatcagaggcacctcgagttgctgcagtggcttgggcgtcaggaggctcactgagggggccacatgaccccagccagtgacagtgcagtggaggccgttggggaaggaggcgttggctgcagggaggcagatgggccggatgtagcgggagaaggtgatgggtctgctgagttggaggagtgcaatgtcgccctgggagccctcctggaggtagctggggtgggggatgatgtccttcagggtgctgaccttggcgtcctcggagtaggagtctagctggtgggcccccagcttgacctcataggcttccttgtggtgctcgctggggaa

SEQ ID NO: 322957 - DNA, 1142 bp, Homo Sapiens
  misc_feature (25)..(25): n is a, c, g, or t
gggaaccgatttccccaaagatgcnggggagtaggggaggcagtccttagagtggggatccattgtcccacccaccccacgctccaaagtccaggctggctaggagaaagtgagtaggaagcttagcatcctctctctcaccttccccgtgacagctgacttctctcactctgtcctaacatcacaagaggacaagcggagagacaaggatgagaaggatacaggagctgtcctcaaaaagctagaacacccctggcagaatatatacaaccggtattttatttcccaaagccgcaaaccagcgcagcagaagctggggatactggggaatgttggaaaaaacaggggctgggccagcccagtcccagtggtgggaacaggaagtgatgagaagaggggtacccagggccagagaagtaggtgagagggaaatttccaggtggagaagctcacagtaggacaccagcagccacggccaacagaagggctgccaatccagctgtgggagccacacagcctttattatggggctgctggggccccccttttgcaggatactgccctgaattgctgcggtcctggtggccagcggcgcctccagtcaacctgggctcctcatcccgggaggcctcgtgttctactccctgtctcggagtctgactggttggcgctggcatgggtttggtggtggatgtgggtctcactggggccgaggtagaagtggtgacagatgtggttgaggccacagtcgtgggctctggagggggcagccggacaaggggtgggattcgaggggagaagtaggtcttgttgcggaggtcagagttacagcgggacccctggcaacaggagccactgagcgtgaaccctgggcctgttactccatcccgagtgcagaattcatcctggacacagccccggacaggcaaggacacagtcacattagctgccgtcaaggtgacgttgccgtcgaagcagcccttgtagacatgatcgctggcgttgtagcagctcacgaccggcggcgatgtaccctggcacgcctcccggctcaggcccacacagctgtagcactccacgccgttgggcgggtatgcactctcattacctgccgggtcgagcgcccgcgaggtgaggttgag

SEQ ID NO: 322958 - DNA, 818 bp, Homo Sapiens
cccccaaggttcttaaaccagggtggtttttaaagggcccacccggaaaccttttttcttgtttcccaggcagtttttccggcgccgggccagaagggaaagggccagtccccctgaaaccagggttctttttgtttgggaaccaatgggttcggggcttctcccattttcccccaccgggggccatgttgttcccccttgagggatcctggggaagggacttgtcccttgggttgcttgcccagtggatctgacaactgacacctccctctaggtgccatctgtggctgtgatactgcatctccttcagaatagcttcctgtgttctggcaactctcaggatgtctggcatcttcagtcaggttgtgtccctgaactgatgatggggctggggatagaatccatggctgcccaaataatgaggcgctccctgagtgagcccaggcagtggaggctgttaggcccagacctgaggaagcgttggcacacaaggtccaagctaccaccagcgccctcctgacaacactgggacactatgaaggagaagaggcaggaccaaccagggcctgggagtctcagataccctcggtggccttggaaagcaatcaccggccgtacctgttgccgctgacactcttgcagcgcccgcagggcagcgtcgttgagcctgagcagtaagaggctagtccgggcagcttgcgtgaagcagagccggagctgtcctctcagaggctcctggagctcctccatggcgacgagttcgagtgcaagcagcacgggggccacaggcgagggccaccaccgccacctcctctccc

SEQ ID NO: 322959 - DNA, 1465 bp, Homo Sapiens
  misc_feature (1363)..(1363): n is a, c, g, or t
tcctctgccccaggtgaacctggccctgcctgtgttcttcatcctggcctgcctcttcctgatcgccgtctccttctggaagacacccgtggagtgtggcatcggcttcaccatcatcctcagcgggctgcccgtctacttcttcggggtctggtggaaaaacaagcccaagtggctcctccagggcatcttctccacgaccgtcctgtgtcagaagctcatgcaggtggtcccccaggagacatagccaggaggccgagtggctgccggaggagcatgcgcagaggccagttaaagtagatcacctcctcgaacccactccggttccccgcaacccacagctcagctgcccatcccagtccctcgccgtccctcccaggtcgggcagtggaggctgctgtgaaaactctggtacgaatctcatccctcaactgagggccagggacccaggtgtgcctgtgctcctgcccaggagcagcttttggtctccttgggccctttttcccttccctcctttgtttacttatatatatattttttttaaacttaaattttgggtcaacttgacaccactaagatgattttttaaggagctgggggaaggcaggagccttcctttctcctgccccaagggcgcagaccctggggaaacagagctactgagacttggaacctcattgctacgacagacttgcactgaagccggacagctgcccagacacatggggcttgtgacattcgtgaaaaccaacccctgtgggcttatgtctctgccttagggtttgcagagtggaaactcagccgtagggtggcactgggagggggtgggggatctgggcaaggtgggtgattcctcccaggaggtgcttgaggccccgatggactcctgaccataatcctagccctgagacaccatcctgagccagggaacagccccagggttggggggtgccggcatctcccctagctcaccaggcctggcctctgggcagtgtggcctcttggctatttctgtgtccagttttggaggctgagttctggttcatgcagacaaagccctgtccttcagtcttctagaaacagagacaagaaaggcagacacaccgcggccaggcacccatgtgggcgcccaccctgggctccacacagcagtgtcccctgccccagaggtcgcagctaccctcagcctccaatgcattggcctctgtaccgcccggcagccccttctggccggtgctgggttcccactcccggcctaggcacctccccgctctccctgtcacgctcatgtcctgtcctggtcctgatgcccgttgtctaggagacagagccaagcactgctcacgtctctgccgcctgcgtntggaggcccctgggctctcacccagtccccacccgcctgcagagagggaactagggcaccccttgtttctgttgttcccgtgaattttttcgctatgggagg

SEQ ID NO: 322960 - DNA, 1756 bp, Homo Sapiens
  misc_feature (239)..(265): n is a, c, g, or t
  misc_feature (628)..(644): n is a, c, g, or t
  misc_feature (1036)..(1036): n is a, c, g, or t
gaggtatctttggaaaatttaatttggaccatattttcttcctctttctgaaaacatcaaatatccccatacagtttgggttccacagcttacaaaggggcagtgggtttcccgcagttacatactgtacccaactttctatagaaagataaaacattttccaaccttgcttttgagtatttcctaaaaaatgctttaaagtttccttacaataaatggcaagtaaaacaaagtaaggnnnnnnnnnnnnnnnnnnnnnnnnnnnatgtactgcatgttcgaggaataaggaaggaagactagttccatcagagtactagtaatcctagtaccctggggattactgctggatcctcccaggtatacccctattattgaggccctgatgcacccctgcactgaggaacctgagaagggtaagtactaaacagtctgtcatagccacgtgggactgtcaccagcacaggtgggactgggagtcgcccagttcttctcggtgctcacaggagtaacaaaggaactaggactaaaccataaccagaggtctcccacgtggtactacagtaccacacgttcacttttgtggcccttacaaatgcacatttatagacccaatgtatttactggnnnnnnnnnnnnnnnnntgcctttactaatttctgtatcaaattattagaatgaaaataaaagcatttgtctgataaaacacactttctatgttagatgaaaataactcccttgcaagataagcttggtaatgtgtatttgtcactatttatatatttttgccttagtacacacatttcctttaatagcatcatctgaacagctttgtcatttttcaaacctgtagtttcattagcttaaaaaaaggataaggcagccaaatttaatgagttttggttgcagaaaaacatctcaggtattaactctcatcttcaaatattaagagcacataattaaaagataaagtttcttctcttaacaggaaactaagcagctattgtcatcaaatgtactttttacatgtactttntagtgaagggccccctcataaatataaaattaaattcttttgaggaataggtttgtgattttagttatgcaggatttacatttatcctttacattttgtagtaaaaaatgtgtggtctttgcttattttcatgaagtgatttcttcatctcagcaggctctcacatacaaacggcaggctgggttactcagcttgtttctgaaaggggaggcagccacatgtcatgtgctcttagaatccttgcaaaaactcctgtagctgggtgacaatctccgtatccactgtttccatgagggactggaaaccttgttctcctagcatctcctgctgtgccttgagcttctcgtagatgaactgctgcagtgacactgtatgaacagggtccttcagggccagcatctttttcctcttatcttgttctgtgggtggttcttcatcttctgttacttttggttcctcaagatgagacatcaacatacagtctttataagttcctgtttcaggatcttccgtcatgacatcatgcaggccttctactgaaatgtttataatcccacagaatttatcttggataacactattatcagatggcagaagagagagcaaagccaaagctgaaagttttcttctttcaggctgggtaatgttgtccattcgatcaacccacatttcaatcatatttcccaaaagctggtccatctcctgattaaatttatgggc

SEQ ID NO: 322961 - DNA, 923 bp, Homo Sapiens
cccagcttccgtggaaagggagaaggttccaggtggttactccggtggccagttggccatggggcaggccggttttcttccggaaggccctttgccagcaaggcgcagagccagagggagaccaagggccagggacatcagggggagttgagcgtcgggcttctcttccccttccactgggttgtctgggtccgaggtgtgggcccaccaggaagggggcgtggcctcaggccgggctgagcaggtacagaggggacagcgcagcagcagcaccaggacggggtgggtcagcagagagagagcagaggtggccaggtgcagcacggcccagtgagggggagcatggcccaaagacatgggcacagccacgggtcctcccggtgacagtgccagcaggcctagcaggggctcagagctattggaggctgctgtgccctgcctgtccagcccggtgtggaaccacagctgggctgaagtcacctggcggctgcgtgtatgctgggatggccggaacatgtatctgaagaggccctcctcagcctcctgggccagccctctggcagctgacttgtcctcacagctggcatctgtggctgggaaaaggatggcttgggagacatcctcctcttcctcgggctcagagcccctgtgtgtgaagccccccagggcatgtcttcggggcagccgcctgactccagggtccccaccttccctggtcaccgcggggggccccaaggcatccaagaacagggccctcaccttggccagaacaagttcccgggccagctccagcccctggcagctgtgcccaccctgtggggtcagcagcaagaagagcagtaggtgcagcaccatagctcacctggccctactagtggggaactcacaccctgccccgtgccccttctgccagggtctgccca

SEQ ID NO: 322962 - DNA, 1051 bp, Homo Sapiens
  misc_feature (578)..(815): n is a, c, g, or t
  misc_feature (833)..(866): n is a, c, g, or t
  misc_feature (906)..(945): n is a, c, g, or t
aataggagaaaaggcatgcaaatttattacatacatgcacaggagtccccacaaaatgtgagactctagtaagggcccagactgatgaagtctaaatagcatttgagctcccaaaaactggggcctgaggtttctgggaggaggtggcagcagacgctaggaggttgaggggaggaaatgcatggcaaacaaaggctgtcttgtcatgcagataaaacctctcaagcagcccagtcctcagaagagatggtatcaccttcagtatcctttcctgtgagttaattgtccatgttttatgagatgctagggaaagggctcaagacaatggcattccttctgcaggaacttcccttagaaacaaaagagaacatcagagaaggcccctccctgcgcttcaggagggttttgggagggaaaaggagtgagcgatggtcagatactttagttcaaagcattcagcctcccacagcttcatactttggggtatcattttctgagccccaccaccaatttcctaggataggatttttaaaatttaactcaataaatgcaggggtgggccaagcgccgtggcccannnnnnnnnnnnnnnnnnnnnnnnnnnnnnnnnnnnnnnnnnnnnnnnnnnnnnnnnnnnnnnnnnnnnnnnnnnnnnnnnnnnnnnnnnnnnnnnnnnnnnnnnnnnnnnnnnnnnnnnnnnnnnnnnnnnnnnnnnnnnnnnnnnnnnnnnnnnnnnnnnnnnnnnnnnnnnnnnnnnnnnnnnnnnnnnnnnnnnnnnnnnnnnnnnnnnnnnnnnnnnnnnnnnnnnnnnnnnncagtgagactccatctcnnnnnnnnnnnnnnnnnnnnnnnnnnnnnnnnnngcaggggtggcacatagtatgacttttttcccaaattttnnnnnnnnnnnnnnnnnnnnnnnnnnnnnnnnnnnnnnnnttacccttattttgaagtcctttattgtgtaagattttctacagaatagaatctatttctggctcttcattctttccatgaggtgtagattatttttacaccaatg

SEQ ID NO: 322963 - DNA, 1127 bp, Homo Sapiens
  misc_feature (419)..(429): n is a, c, g, or t
  misc_feature (479)..(545): n is a, c, g, or t
tttgggtttgtgtttgacatttagccctgctttgtttctgtcctgcacttttatagtcggttgtgtcttcaattatagcaactcagagttgaacctcttcgtgcggagtctctcgtcgcttataaccgttcttcgatgccaagtcatatctaaggaagtttctctctctcggtaggacacgtgacgggtggcgtggttagtactattttgggcgattatttatctttagctgtgttcgtccatatatagcagttgtgagtgctcagtgacgcgttgatatgggtgcgtcgcttgcgggatatgtgtcgctcggctttctattgactaatagtgttgtgtagctctccaccaagctgagatgacggatttatggtgggtgggggttggttatgggtgggcccccccctgccacaagaggnnnnnnnnnnntgtttttggggggggcttttccccgcgcccctcttgggggtttttccctnnnnnnnnnnnnnnnnnnnnnnnnnnnnnnnnnnnnnnnnnnnnnnnnnnnnnnnnnnnnnnnnnnncccccaaagggccttggctgggttgggcaattgttggcccccccactggttgcttcaaaagcccacttctgccggggctgtcttgccacaaactgagctgtaactggtggcgccattctgcttgccagcccttccaccggcactgctgttactactgctgctgctccctccgcctccgctgccgccgcctccgcctccgctaggctggacgctggggggccggggctgggtcgtgctgggcccactgggagctggtggggccacagcctgggcatagggagcaggggtgcccgagttgtggctgggagctggactggccttggggcccagggcacttgggggtgctgcgggggcggggaccccattgttgccaggagtggtgctcaaggcagaggcagcaggcggggggccggaggggtaggtgggcggcacagctggggactgagggtgctggttgctgtggacaggcttggagccgtttttggctggagactggctgacttcactgtctgtggaacgtcccctcttcttatcatcttcagagttttccgtggtaccctcgtgccgaattcgccacccagc

SEQ ID NO: 322964 - DNA, 838 bp, Homo Sapiens
  misc_feature (570)..(606): n is a, c, g, or t
  misc_feature (608)..(720): n is a, c, g, or t
  misc_feature (763)..(798): n is a, c, g, or t
tattttgacgtgtgtttgtttgccggggggggttttaccttgtttactatggttttttataccatgaaaacgtttgtattatttagttaagtaattaaagctgtcattttcttttcttttgctctactgattctacttgtaggcagaaatagtatagtcatgtaaaatatatgttaaaaatgtaaattaaatgtattttgttaaaatatacacttaattctttgttgctataatgtgttcctcttctaggcaaggataaaagccatcaatacattttttgctaagaatggttatcgattaatggattctagtatctatagtcaccccattcaaactcaagcacagtatgcctccccagtctttatgcagcctgtatataatcctcaccaacagtactcggtctatagtattgtgcctcagtcttggtctccaaatcctacaccttactttgaaacaccactgggtaagtgagatccttacaataaaatataataatatttttaatttggagctgaaattttgaggaaatcagttggagtggggagctcatttatgttgacattgatgacnnnnnnnnnnnnnnnnnnnnnnnnnnnnnnnnnnnnncnnnnnnnnnnnnnnnnnnnnnnnnnnnnnnnnnnnnnnnnnnnnnnnnnnnnnnnnnnnnnnnnnnnnnnnnnnnnnnnnnnnnnnnnnnnnnnnnnnnnnnnnnnnnnnnnngtaatggccgaattcccgggcatatgtccggtaccgtcgactnnnnnnnnnnnnnnnnnnnnnnnnnnnnnnnnnnnncggccgcttcctcgctcactggactcgctgcgctcgtcgt

SEQ ID NO: 322965 - DNA, 1086 bp, Homo Sapiens
gatcccgaggcccagctttcaggcacggaaacaccagataaagttaaagtccagagccaatctgggctcagttggttctagggttcctccaacagctgagagttccgaagctcaaaggagggaaagagccccgaaggagcctctgagttgatgtcacttaaggtccaggcatccctgggtttgcacctgttccgggggtttggaggttctcccccaccagtccggccaggacagcctcaggggagagtgaaggcccctagcttgtctgtctatccccagttgctggagaggctgctgtccaggagcaaactgcaggtgtgacccagcggggtgctggcgggcccaggggctgtagccagctggcagggtgagccagcccatgccagagccagcaagagcaagggcaagcagggcctgccacagggcccaccctcggctcagggcctccgctggccatgcaccacggcacaccgcaggcccgcggctgcctcaacacaggcagtgccagcagggcctcggccgtggcccgcagcttggggtctggctccagcatcatgtcaaggacagaacgcagctcggaagacagaccggcagtgaactcagggggcaggtagccctggcgcagctgctgccagccctccccaccgtggggcagctccatgttgcatgccacttccaggatggtgaggcccagactgaacacatccgctgctgtcccataggagccctgcagcagctcgggggccatgtagcgggggtctccctcctggacctcaccagctcctgctgtacccagctccaccagcagtccgaagtcacccagcttgcagcggccccggggccccaggaagatgttggcaggcttgacatcaaggtgcaccaggccctggctgtgcagatgggccagggcaagcagcgtgtcccgcaggtagccccagacctgggcctcaggcaggctggcaccccaggcctcacagtgttgctgcaggctgggcccgcacagctccgtctgcaggtacaggatgccgccctcctcccaggcctgctccagccgcacgcagcatgggtgctgccccaccttctcgt

SEQ ID NO: 322966 - DNA, 1168 bp, Homo Sapiens
  misc_feature (726)..(726): n is a, c, g, or t
  misc_feature (1058)..(1099): n is a, c, g, or t
  misc_feature (1137)..(1138): n is a, c, g, or t
agcattaggactataagaacagtttgtaaaaaaagcaggctggtaccggtcggaatcccgggatatcgctgatgtgggaagtgtttacacatggagagatgccccatggtgggcaggcagatgatgaagtactggcagatttgcaggctgggaaggctagacttcctcagcccgagggctgcccttccaaactctatcggctgatgcagcgctgctgggccctcagccccaaggaccggccctccttcagtgagattgccagcgccctgggagacagcaccgtggacagcaagccgtgaggagggagcccgctcaggatggcctgggcaggggaggacatctctagagggaagctcacagcatgatgggcaagatccctgtcctcctgggccctgaggcccctgccctagtgcaacaggcattgctgaggtctgagcagggcctggcctttcctcctcttcctcaccctcatcctttgggaggctgacttggacccaaactgggcgactagggctttgagctgggcagttttccctgccacctcttcctctatcagggacagtgtgggtgccacaggtaaccccaatttctggccttcaacttctccccttgaccgggtccaactctgccactcatctgccaactttgcctggggagggctaggcttgggatgagctgggtttgtggggagttccttaatattctcaagttctgggcacacagggnttaatgagtctcttggcccactggtcccacttgggggtctagaccaggattatagaggaccacagcaagtgagtcctccccactctgggcttgtgcaccactgacccagacccacgtcttccccacccttctctcctttcctcatcctaagtgcctggcagatgaaggagttttcaggagcttttgacactatataaaccgccctttttgtatgcaccacgggcggcttttatatgtaattgcagcgtggggtgggtgggcatgggaggtaggggtgggccctggagatgaggagggtgggccatccttaccccacacttttattgttgtcnnnnnnnnnnnnnnnnnnnnnnnnnnnnnnnnnnnnnnnnnnacactcgctgctctcaataaataagccttttttgaccnntcgccgatccgctatcccccaataccctgt

SEQ ID NO: 322967 - DNA, 1302 bp, Homo Sapiens
  misc_feature (286)..(286): n is a, c, g, or t
ttgtattttgtggttcacgggcagaatgggagtggtatttgttataggggtggtactaaatttttcggtcctaaatggtcccggggatgaggtgggctggagtctatggttgattcgagtgtcctgtggtggcgattggcctttaatcccttccccaacccgcaatttacacgatctttaagatcacgaaaaaggtttaaatattttagaatacttaaaaagaaataaaaattcacatttaaaaaggaacactcaagtcaggaaatattttcccatcatgcttttnctgtgaacaggtgtctgaaccaaaacactgccaaagccacgactgcttcaagtttaatgaaaattgatccccatgacaatagagagtgacgactctaacaggtgcgctgggttttttgttctacttaattttaaattcctgaaatgggagagagggaagggagtttaggaatttatttctattaaaatatagaagttattgcaaaaccctaactgtaaaaacgcaccaatataatcggactttgcatacagtagctaagagaatccaaacatttcagtgaaacagtgaatttgcctggtagaacgctgacaaattcccatccacttgccctcttgaaaataaaaacaaaattcaaaacaaatcatacagctagaattttgatatctgaaatatttttaaataagttgtccataggacaactggctcagctctcccttataatatctccaggtttatcttttcgcaaagatgttggtttgttaagacttgctgcctctctcccccaggcacgagggcaagtgaggctcagtttatccatctttcccaaaccacactgttcctcttcacagaactctgcctcttgagactggctaaaactcatagtcttcatcagccatgtcaatggcccaggcaaacttctcccgctgggttttgttgtaaatcttctcaattgggacaccccacttcttgcaccaagccactgtgatcctagggtccagataattgagtttggaggttcccagggcaatctgtttattttcctctcggtctgtggcttgaacttccagcttcatcaactgttcctccagtctctgaacagccttcttctttgactctactaccttcttcgtctttgcatccttcatgaccttggcatcagccttagcacttttcaggtctctccgggcatctgctagctgttccttcttggcatcaatcttagtttgcaagttcatcatagacttctcaaaagtttttggtggtgccctctgatggttacaaagaattgcaacagc

SEQ ID NO: 322968 - DNA, 858 bp, Homo Sapiens
taacctgcttagaaaagctatgtagttcaattcatcaaaagtttctccatccacggtggtcccctctggctctctctttattggttttggcgggagatggcctgtggggctttttccggtattccacttttgtccagcccccttcgctgactttgctgtcctcttcactggctcttgagtcagtctcagggtgcaaaggcatccctggtatggtgttgggttggtggaggtccctggggcttctcttgaagtcaggcgactggtgaggattgagtgctgactgagaaaccctgtagaactttccagggtatcttcctcttgaaggagtggaatgctgactctttccactgtatcttcctctaggagaagaattgagtgatatactaccacgtccatatttgttcctgcttctgtctgagtatcgacccctctctgaagaggtgtcagtattgccactggaaaagccactgtccctagagttgagatgtagggaagagaagtttttggtcagtccatactgagtaggagacgagcttctggactggttcacaggtgtaatctgttgatacttaatgggcacctggggccgtctcacagcagcagcgtaggaatcctggccatcaaagtgtgagaagaacggtgaccccagaataggattgctctgggaacgctgtaaagaagtgttggatgcaatctgccgcatcctcagagtatctaaccactggcaatcagcacttgagtcggacctgcttccagggttgccatctgaattggtgaataatgtctgaatggcaagttggactgctttcacttcatcctgaggttcgctcatccgaagtatccggaccggtccagcct

SEQ ID NO: 322969 - DNA, 999 bp, Homo Sapiens
  misc_feature (327)..(390): n is a, c, g, or t
  misc_feature (473)..(567): n is a, c, g, or t
  misc_feature (790)..(853): n is a, c, g, or t
gcccccccgtgtttttcccccagtggggggaaaaattttattttcccaaagggggcgaccaaagggggttggaataagcccccgtggggggggttttaagggttttcttcccatcccccttttgggaaaaggggttctcccaagtgcgggcgagaaatatcttttaagtgaagttcccacccggttttttccaataaaaaggcccaggggcgggggcttaaatttttatttggggcttcgctttggacccccccttggatagatcccgtaaagcccctccaaacttcctttgggttttgttcaaaaccgttgggtttcccccggggnnnnnnnnnnnnnnnnnnnnnnnnnnnnnnnnnnnnnnnnnnnnnnnnnnnnnnnnnnnnnnnncccagtttcctttccttttggggccccgggcccaaaaaaatgttttaaaaactttttggggggcggagggggcggacaagggnnnnnnnnnnnnnnnnnnnnnnnnnnnnnnnnnnnnnnnnnnnnnnnnnnnnnnnnnnnnnnnnnnnnnnnnnnnnnnnnnnnnnnnnnnnnnnnttgtcaaagaagaaaaccagaacgttttattagtttcttgaacctatttatagcgtcaaaagttagacgcaggtgcaggcctccattccatctattggctggctctcgactgccgagactggcctgccaacctgtgtttcaggagggcacgcgtctgcggctgaaccgcggaagggccggtgaggaaccgggcctcgggagatggccctgagggcccccgcannnnnnnnnnnnnnnnnnnnnnnnnnnnnnnnnnnnnnnnnnnnnnnnnnnnnnnnnnnnnnnngctacagcgccacggtggagtgtggcgccctgcggttgcgcgtcgtcccgctgggaatcccgccagggacgcaggtgggcaccgtgtggagctgcgggaggacgggtgcccccagggagaggaagacccccgcaacgggtaagcgc

SEQ ID NO: 322970 - DNA, 2173 bp, Homo Sapiens
cctacccagctcggggttctgtccccgcccagagacctgaggctcggggctgcagatggaatgcacggcagggaggcgggaccctttgtttgtgtgtgcgtgttgttggcctccatccccactccccagactccacttctccaggcctctctcccgccttttcatcccgcatccgcaggacacccaatcaccgggcaacaggatgccttccgcgccttccaccctgacctggaattcgtgggcaagttcttgaaacccctgctgattggtgaactggccccggaggagcccagccaggaccacggcaagaactcaaagatcactgaggacttccgggccctgaggaagacggctgaggacatgaacctgttcaagaccaaccacgtgttcttcctcctcctcctggcccacatcatcgccctggagagcattgcatggttcactgtcttttactttggcaatggctggattcctaccctcatcacggcctttgtccttgctacctctcaggcccaagctggatggctgcaacatgattatggccacctgtctgtctacagaaaacccaagtggaaccaccttgtccacaaattcgtcattggccacttaaagggtgcctctgccaactggtggaatcatcgccacttccagcaccacgccaagcctaacatcttccacaaggatcccgatgtgaacatgctgcacgtgtttgttctgggcgaatggcagcccatcgagtacggcaagaagaagctgaaatacctgccctacaatcaccagcacgaatacttcttcctgattgggccgccgctgctcatccccatgtatttccagtaccagatcatcatgaccatgatcgtccataagaactgggtggacctggcctgggccgtcagctactacatccggttcttcatcacctacatccctttctacggcatcctgggagccctccttttcctcaacttcatcaggttcctggagagccactggtttgtgtgggtcacacagatgaatcacatcgtcatggagattgaccaggaggcctaccgtgactggttcagtagccagctgacagccacctgcaacgtggagcagtccttcttcaacgactggttcagtggacaccttaacttccagattgagcaccacctcttccccaccatgccccggcacaacttacacaagatcgccccgctggtgaagtctctatgtgccaagcatggcattgaataccaggagaagccgctactgagggccctgctggacatcatcaggtccctgaagaagtctgggaagctgtggctggacgcctaccttcacaaatgaagccacagcccccgggacaccgtggggaaggggtgcaggtggggtgatggccagaggaatgatgggcttttgttctgaggggtgtccgagaggctggtgtatgcactgctcacggaccccatgttggatctttctccctttctcctctcctttttctcttcacatctcccccatagcaccctgccctcatgggacctgccctccctcagccgtcagccatcagccatggccctcccagtgcctcctagccccttcttccaaggagcagagaggtggccaccgggggtggctctgtcctacctccactctctgcccctaaagatgggaggagaccagcggtccatgggtctggcctgtgagtctccccttgcagcctggtcactaggcatcacccccgctttggttcttcagatgctcttgggggttcataggggcaggtcctagtcaggcagggcccctgaccctcacagcctggcttcactctcccctgaggctgccattgatccaccctttcatacagaggaccgctttggttacaaagctcgggtctcccctcctgcagttcggttaaataccccaggggctcttctgagcatgtccagggaccccagggcccgcggggcctggaccgccccataccttggggccccgggaaaagtacgtgtggcccctttactaggaggggtcctgacccttggggcttttcccggggccccggtttccgacggacctccccaaggtttgagcccccgtgagccttggggaccccaagggggggaggtcccctcggtcctccttggggactccccccataagggcaggggggcccccccttccgggggag

SEQ ID NO: 322971 - DNA, 1005 bp, Homo Sapiens
ggcctgggtggcgaattcggcacgagggttccttgtggccgacgtgcaccaaggacaggaagatgtcacccaagcgcatagctaaaagaaggtcccccccagcagatgccatccccaaaagcaagaaggtgaaggtctcacacaggtcccacagcacagaacccggcttggtgctgacactaggccagggcgacgtgggccagctggggctgggtgagaatgtgatggagaggaagaagccggccctggtatccattccggaggatgttgtgcaggctgaggctgggggcatgcacaccgtgtgtctaagcaaaagtggccaggtctattccttcggctgcaatgatgagggtgccctgggaagggacacatcagtggagggctcggagatggtccctgggaaagtggagctgcaagagaaggtggtacaggtgtcagcaggagacagtcacacagcagccctcaccgatgatggccgtgtcttcctctggggctccttccgggacaataacggtgtgattggactgttggagcccatgaagaagagcatggtgcctgtgcaggtgcagctggatgtgcctgtggtacaggtggcctcaggaaacgaccacttggtgatgctgacagctgatggtgacctctacacccttgggctgcgggggaacagggccagctagggccgtgtgccctgagttatttgcccacccggggtgggcccggccaaggcctcgaacgaactccctgggtccccacggggggggacggtgaaatcccccggggaaagccggggccccctgtagattcccggaggcccttttggggggggcctattcccccttttgcactctcccctgggggcccccgcgggaccggcttcgggcccccccacttaccattaggctgggaaatccgcggggccaaaatctggttttttaccccaaaaaccttacttccttcccaaatccccctaagcctccggggggggcgctttttctgggccgccac

SEQ ID NO: 322972 - DNA, 1445 bp, Homo Sapiens
  misc_feature (475)..(475): n is a, c, g, or t
  misc_feature (481)..(481): n is a, c, g, or t
tgggatctgtcgcgacgagtgttttcgagcgctctcgggctcacccgttgcatgtcggctccgcgcttctgcattggtgggtcatgagcgtcacacactattatccgggttgaactcttgtttggggggggttatgttgcggagggaggagttcggggttcgaatggggtgggcatcaaactttggaagggctcttatgccgggttcccggtgcttgggggggagtctgggcgctatcgacggcgcgcgcccgcgggtttttttgggcacgttgaggctggtgctttccctgtccagcagcagtcagtcccggggcccccaaaggtagatgagccctcttggcggcgggggaatccgccggaggcccccgcagatccagatccagatgtggatctggccgcctttcagatccgagccccgcatcccgctgcgccctaggagcgcgcggcggccccagagccctggctcggtgccntgaggnccccacccccctgagcgcgcccgcggagctgcaccccttgcacgatcttctccacccaggagcggtgcgcagagaggctgatgtagaccccgggcctgttgcgctcggcacagccctcgccccagctgatgatgccggccagcaagccaggggccgtcccccctggcacatgagggggcccccggattcgcccaggacaagcattccggtcccccttccaagtagccggcacacagcatgtcctcagtgatgggtccctgtcctgctccccgcccagtacagatggctgcagacttccgagtcgatgataggaaccttcagcttctgcagggtctgagggtggggcaagggaactccatcttggatgctcccccagcctgagatccagcagtgggtgtttggagggaggtggatagaggcatcaggtaggcagatgggcaggacccgctctgagaactgtatggagcgctcgagacgcaccagggcaatgtctgcacaggcaccttccttccaggaatacacagggtggggctccacccaggcaacacccaccttctgggaccgagagccagggttccccagctgccaggcccccagcagcacagagaacaggtatggtttgttcaggttgtccttgaaacagtgggcagcagtgatcacccagcggctggtgagcagagaacctgcgcagtggtgggtcccattcttctggatgctcacgatccagggccactcgctgtcagtgctgtcctcgccgcccacaacccggttcagctgctggggcttcccacaggctgggggaacaggtatcctggccgcattgaggatggctgtcgacgccagcagcagcagggaggtgaaggtgccgagacagcccccacccagggctgggggcgctccagaaaccaccatggctggtggggcgggggagcaggcagcaggctcgagagacccagggcgatgc

SEQ ID NO: 322973 - DNA, 1190 bp, Homo Sapiens
  misc_feature (970)..(970): n is a, c, g, or t
  misc_feature (1023)..(1023): n is a, c, g, or t
tctgaaaggcttcgggagtccggagaaaatacccagggccagttcccttcccggggaatgtagccgcccaaggggagcgccggaaactggatgatttttcatgtatagggtaccctttcccataggggccaaggggacccatgtccaaaatttcccttgggtgaagtttttaatgtttaaaaacattcagggggattacacctttaaatggtccttatttaaggtcatacctggaattcccaatattctcgtggccccccaggggcaatcgggaatatccttttattgaggaatatgtggacccgaactgcagattggggcaatgcctctgccagatctaagaatgtaccatcaacaatggctatgttcagatatacaggccgctcccgtagggtcaccagaggtgacggtcaggtgtactctacgacccagcagcacagcccggggcccaggccgcccagcgccgctgactcgggcggccgctccggccgcgacaccgacagcagtcgcagcccatccccgcccagcgccgccattgcgccctgacccgcggcgcgcaccagtgacgcagtcccagggaggtgtgggtgacgtcaggccgcggcgcggctccacgccccgccccgccccgcccgggcccgacgcggaagcagacgcggaagaggacttggtgagcgcgcggcagctttattaaaccacgggataacggctgcccgcaggctccggatcggtgggcgcttgcggaaggggacccggctcagggcccagggctgggactcagccactctgacaggttggagacctcctgcagccacagcacgtcctccaggcggcttccgaggctcgccctgcccggcgccagggccctgccgtgagcctcgcggtgctcccttcctctaggagtgaggggggccgcggtggcttccagggctggcgcggggcgtcctactggacgggctcggggccctgngcagagcgcagaagctcgcatctcctctatgctgggggctgcccctcttgagncctcttgttttctgcttgcccgctggtatctgctaggagctccaggctgctgttatcaggtgcgtcctcagtgccctgggctgagtcctttttttctagggttagctgcttcacctcacatgagcagtggtgaagaaattggtgttgggtgatctcacgaaatactt

SEQ ID NO: 322974 - DNA, 1078 bp, Homo Sapiens
  misc_feature (32)..(32): n is a, c, g, or t
gagacaaaattaaggggggggaaaaaatccanccataccatttaaaccaggtcccatggatggcccaagcctccctgaaagaggtaaaaagttttccccagctaaagaggggatgtttcccttcagtttgttttatccagtactaataaaaagccatctgcccctttaccagcaagtcctctactcagaaagaactgacccacgcaagtctgggagagtgactagttcaaatgtgcagggctgaagcttccaaacacagccactattttctgttgtatatcttcatctcaatggtgacatggccactgcccaaggaacttgtggcagggatcccaaggtgaggcagcaacagatgtctgtgaacattgtgcgttaacagtggctcagagcctctagattcacagctctgcatggtgggcttctgccttcaacaactcactgggcttcatgaagatgccttccatggctttccagtagttgttctgacttggctgggccatgccatgcacctctttttgcccactgataggtcgaccatattgttctcctgtgacagacagcagtacctcagtggaagagtgtttgaaccgcacctcaccatctctcacccagtagggtccattacagagcactgtccagtcatccagataatcaccttcaccttcctcaccaaaagcactcacttcctggtttccagaaagaggtgaagtgaagtggtgactatggaggtttcggccagtgttgacatgtgtcagccggatgggctggccacacttgatgggggttcccctctcacacactgtggcactcttcccccgtatcctccagtaactgttgctgtcatccacagaggttacacctgtcactgactgctgcccactacctgacccatagcgcacgtcgtgtgagtgcagtcggacgttgtggcgcgtattgagtagcttcaccacggagccgcaagtaacgacacccaggctggacgctcccacagcgctccacaaaccccccaacaacagcagaggtactacagccatcctaactgtatcgcggagccccaaatgttcgaagaaaactcccc

SEQ ID NO: 322975 - DNA, 815 bp, Homo Sapiens
tcaaaattattgtttttatcattttggagagagaaaatagggggaaaatcacatacattaacagtccatgatgccaagctcctgaagagtaaaagtttcccagctaagagggatgtttccctcagtttgttttatcagtactaataaaaagcatctgcccctttaccagcaagtcctctactcagaaagaactgacccacgcaagtctgggagagtgactagttcaaatgtgcagggctgaagcttccaaacacagccactattttctgttgtatatcttcatctcaatggtgacatggccactgcccaaggaacttgtggcagggatcccaaggtgaggcagcaacagatgtctgtgaacattgtgcgttaacagtggctcagagcctctagattcacggctctgcatggtgggcttctgccttcaacaactcactgggcttcatgaagatgccttccatggctttccagtagttgttctgacttggctgggccatgccatgcacttctcttttgcccactggataggtcgacgaatgtctcgtgttgcagaaagaggtgagtgcatgtgcagtgtgtaagggatgcggcaacagtggattgacatagttgtcagtccgggatgggcgcggccacacttgatcgggggttcccaccccggccgtaatggccgaagtcccgggcagatgtccggtaccgtcgaatgataaactcgatataatgtattgttagacgacgttatgcggacccgattcctcgctaattactcttcgcctcgtcggacgcctcagcgagttgccaccatcggtgacaat

SEQ ID NO: 322976 - DNA, 1671 bp, Homo Sapiens
  misc_feature (708)..(717): n is a, c, g, or t
gtaaaattgttattattattttttaaaataatttctagtgttcacatttctataaagaattaacccagtttcaggaaaccctgccccagcagggcaggtaagcaacactctccctgcccacatctagtttgatttcacgccctgatgcttcaaggtgcccagaaaagcggcagcttgtggaagaggaaatctatgcccggcccgtgcttggggcccagggctcagtaagctttcgagaaagcagaggggaagactagcttactgcaaaaacctttttaaaaaatattcatacacttcagtgagcgcctgttgagacgttaggggaacaagagcttggaaacatcccgtccaggccattgggaggcagcgtcttcctcacaccccgtccctggatgtcgggggtgcagggggaaggtcccggctcttccactggagaaaggagactcacctggcttcctagttcatgtttgactatttcctctaaaacctgtgctgagtctttgactgcatgcacgggaagcacaaacgttcggcttgtatgcaaaaaaagtacaaaaacaactagaatataaaagttttggtaatataaggccatctgttcaagtccaccttggaaacctgtaacagatatttaaatactacagtgaaaaggcatcttaatatactttttaaaaacatctgaagtaatccgctaagattaagtgtgtnnnnnnnnnnttcaattccctttgagggcactttgtcctttgaagaagggaaagtggggcggggagggcacggggcccaccggttaatgcttcagccacgggtgggcttcaatggaagccttgctgcggtccccatagtcatacaggagctcctccccagccgcgatgtctcgggaggcgatgaggatgaggtgaggtacgccgtcgatgtcgtgcagtttggtttggcagttcccacatttgctgtgattgatcagtcttcctaggcgatttgtctctctagttgcatccacgcagtaggttttgctcagatactgaaaatagtacatgtagcagcccgtggaagggtcctgtgcgtacagagcctcccgtttcttggcgtcggtgatctcgatgaggtccccgtggtattccaccacaaagtcaccccgggagaactgcttggtggcaatcacacccctgcctttgccatcgatgaggtcaatcttcattccttcttccttcccactttcaatcaattcatctattcttttcctttcttcagactgcagctcggctttgctcttcctggagctccttcggacagggtagaaatccgtaagtttgcgattctgttgcgtttttccttgagcctttttttcggggggcctgttttgcccttgatgggctttttcagggcttgcttggcgatggctgcattggtggaatcacaagatgagggtggagtttttggaggttctgctgcttcagatttttggtttggaaaaggtaccaggggacctttcctggcgtctttgatcttctgttcctcggacttcatggcgctccgtactgcgttcccagcatttcttttctcttctcgtttcctgtagattccggctaatggtttcccctggcatttgacttcgtgatgtgtaactgagttctcttcctgaagggggaaacgcattccagagcatttgtt

SEQ ID NO: 322977 - DNA, 405 bp, Homo Sapiens
  misc_feature (391)..(391): n is a, c, g, or t
aaatttttattattattttttaaaataaattcagtgttcacatttctataaagaattaacccagtttcaggaaaccctgccccagcaggcaggttaagcaaccctctccctgcccacatctagtttgatttcacgccctgatgcttcaaggtgcccagaaaagcggcacttgttgggaagaggaaatctatgcccggcccgtgcttggggcccagggctcagtaagctttcgagaaagcagaggggaagactaggcttactgcaaaaacctttttaaaaaatattcatacacttcagtgaggcgcctgttgaggacgttaggggggaacaagagcttgggaaacatcccgtccggggccattgggggagggcaggcgtttttcctcacaanccccgttcccgggg

SEQ ID NO: 322978 - DNA, 1378 bp, Homo Sapiens
  misc_feature (561)..(575): n is a, c, g, or t
  misc_feature (1008)..(1008): n is a, c, g, or t
tgacggcctctgaattccgggattgtgaccacgcgtcggggctcgctcccttggcccgtgtcctgcttgctggctgctcggtgctgcgcgtgcctccaaggctgtggtgtgtgatgtggcgtgctgcccgcccggccgcattcccacggtcccgggcctcgctctggacgttcgcgtcccccccatatcctgaggtcaccgaccggcttcaggacgttctttcgtaggtttgacattctttcgagcgcttgagcacttccctcgaagcgcttcctggtgtcgggttctgggtccggggcgaggggcccatcttcttctacactgggaacgagggcgacgtgtgggccttcgccaacaactcgggcttcgtcgcggagctggctgggccgagcgggtggctctactggtcttcgcggagcaccgctactacgggaagtcgctgccgttcggtgcgcagtccacgcagcgcgggcacacggagctgctgacggtggagcagggcctggccgacttcgcagagctgctccgcgcgctacgacgcgacctcggggccccaaaagnnnnnnnnnnnnnnnttggaggaaaagagtgggggggagaatcctcgttgcctacctgaggatgaagtatccccacctggtggcgggggcgctgggtggccagcgcgccccgctcctaggtgagggtgggcctctggggactccaatccagtccattgcggggaacggaagggggcaggagccttggagggggccccgagcccccaacattaggccccccgttctgtggatacgaaaagcggtccccgcaacaggcaccaccagcagtcgggcccgcgcatccaggcgcacggcccactagccccctcccggcaccggcagcggcgccgagttcccgcgcgcactaagccgagacactgacctcgagctggcgtcaccctcacccgacaactgccagagccgcgtgaaccgcctgcacctccttcccactacctcgtgcgcccctttngaacaagtccgcgatctgcaaaacaaatcacaacgcatgcaacgcggtcggcaccagcctatgccgagtcggagcgcagcgccgacaatcactggtctgtccacccctctataccccactccaccaccgcccccgcgatcggtgggggtgaggagtgtgagttgaggacctgacacacacatcgacaaggaccctcccgcacagacagcgcacggcggaagatactccagtcatgcccacgctcaaacagtagacaaacacacctgctctagctgtgcgccaccaggcagcgcatcgggggagagagagacggtcacgcgggacgacggaggcgctaggccctagcgcaccgccgctctcgcgacgaact

SEQ ID NO: 322979 - DNA, 900 bp, Homo Sapiens
  misc_feature (11)..(11): n is a, c, g, or t
  misc_feature (22)..(22): n is a, c, g, or t
aattgagcttnaaaggaaaaantcgttcatctgagtttgccccggcagctaagcagcagcaaagcaaagaattccagcccaaggctaagccaagatcccatccgccctccaacaaggtgtcccggggcttaggggtggcgaggacccaggtgctgtctggaggcagcgggaagcccttgctacttgcccaggctcattgtggcagtggcggggagactccagtcactcagttccccgtagtctgtgaggtcctgagccgccacttggacgtagtacctggctcggggccgcacagccctgaggatgaaggacgtggcttcaatgggccccacccggtggaagcgcgcagctccctgacgcttgtaacggatccagtacttcagtgagaagatctctgggaagggccaggacccgggaggctcccactgcacctgtagctggcgctcagcgagggggcttaggcgcacgccttctggagggtcgggcttgatgatgtgctctgttatgaaaggcacgaagctgctgctggagccccaggggtggacggcggtgacattgagcacgtagggagccatggagaacagctggacatccgtgatggtgcagctggtggacgttggcgtctgctgcaggcagggccagctgtggccccgggcagccatgccgagcctgtacgtggcaatgaaggacacggggctggtggagtttggagcaggcggcagggtccaggagcaatccacggcgatcgggtaccgagaggctcggcattgcacccggggcagtgtcagagctgctgggggccctttccttccactgcagggcgggcagctggcccagaggacaagggccaggagaagctgcggggtcatggctgcggccagctctgctctcaggagtccc

SEQ ID NO: 322980 - DNA, 1224 bp, Homo Sapiens
gttcttcttccctcattcctgttcctggtggctccagggagggcctgcaggaagggcgcgccgttcatggctggagggatttctggtcgaaaatgccgggcctggatcaccttctggtccacgtggagcttgtacttggctgcagctaggatcttctcctccacgctgttgacggtgcagaggcggagcacacgcacctcgttctgctgcccgatgcggtgggctcggtcctgcgcttgcaggtcctggtgaggattccagtcgctgtcaaaaatgatcacagtgtctgccgactggaggttcaggccgagccccccagcccccggtgctgagcaggaagatgaagtactcagagccgggctcgttgaaggttttcagcagcatgccccggtcctccgccttcgtggttcccatcaagccctgaggtatttaaagcccgcgatacgcaaagtaatcttccatgatggtcatgagggaggtcatttggcagaacagcagcactttgtggttggttgctcggagtttgggaagaattctatcaagaagctcaaatttacccgaggctcggtacaggtccagcccttggacaatgccgccagtgaaccccaagtgctcggaaaaggactcctcgatgtgctggaacatgtaggggtggttgcagatcttccgcagctgcatgatggtgttcatcagggtcttggtgccgcctttgcccttcttgtccttctcggagccatcagtcagcagcacgcccttggcctgcatgtggcggtagagcactcgctgcagcgcagacatgtcgcacttgatgacgtactccaccttttcgggcaactgggcctcgacttcctttcttgagtcgtcggagcaagaagggccgcagcactttgtggagacgccggatgatgagaatggtttcctccctcattcaggtccaccttttccccggtcatggcaaagggtgcgttaaaccactgctcgaaggtgctgcagctcttgaagatggtgggcagcaggaagttgagcagcgcccagagctcgggaagcttgttctgcagcggtgtgcccgtcagcagcaggcggcggggtgccacatagtgcgtgttgagcacctgcgtcagcttgcagtggtggttcttcatgcggtgaccttcgtccacaatcatgtacttccaacggatcttggcgaggatgtgcttgtctttgatgatgtactcgtacgtc

SEQ ID NO: 322981 - DNA, 1404 bp, Homo Sapiens
gggcggtttcttatttcttggcttaaccgtctttcttcggggaaaatttccattgaaggcgcatgtctgagggctacctgacagtcttagatttgactctcttggggaagctcttcaatcccagtgtgtatacatcatctctcttaacccacaagttgtgagccatcctcaaactccacctggtacatttggatagggtgggaggccacaaacttggctccatagacttggccgtctgtccatctcacttggaccacttccccttcagcaggaggaccaaactggagacagtcctggctcactatgtcctcaggataaagattgtcgctgaaggagccatcatcaaagttgacttcatagaaggtctcggtggtgagcctgaccacttcacactggtagaagcgcccgttcttatgcttgctaatgactttctggcctgcagtgatgctttgcaaggcccccttggcacgctccaaattaggaatcttgtgccgaaagcaggtaatgaagaccacaaaaggccagtcgtcaggctgcatcatcacaccggcagcctgggcgcagctcacatggaaggcaagttgggcagcggccgtgagaacactgcacacagcagccagcagttcttttcctccgcttcttacagaagaatacatttcagtcttgaagcggggccagggggtttttgctcaccatccaccggacttcctttctgccatgttgacaaaccttgcttccagaattgccacagcacatgaaacgtggacccacctgtcatcatttgctctctgcagggcccctcctcgtaatgagcataaacagcagtcctcctctagggcattggctgaacaccgagaacacatccagtcttcagaagcctttgcaggggggaccccatagcaactggcatggacccggacgctgcacttcttgcaggaaacgagtatgctggtgccatcctcctcaagataaggagtagaaaggttgatgtccgtgctgcagccagtcgaagtgaagcacatttctggaatcaatggcttggtcctctgcttctggggggctaaatctgaagcatttccacagttctgattaaagcctccaaattcaacctgatgataagtctggaagatcatacagacagcgcagtgaggggcctgttgggccatggtctcattgaattccttctcagcctcaaagtttggaggtcggttctgccacagttggctcagaggcttggcccaggcctctgtctcctcagcctcttcctcaggggtcagctgttcagatgtctcatcatcactgacacactcctgcagcacaagtgggtgatggcgggggagcttgcttaaaggctgaccgacgcgtggtcgacgatatcccgtaactccgggccgtaccagcctg

SEQ ID NO: 322982 - DNA, 1044 bp, Homo Sapiens
  misc_feature (73)..(73): n is a, c, g, or t
  misc_feature (118)..(118): n is a, c, g, or t
  misc_feature (568)..(568): n is a, c, g, or t
  misc_feature (591)..(591): n is a, c, g, or t
  misc_feature (761)..(761): n is a, c, g, or t
caattgcccactttcggaggcctcttcccctacccctacacctacatggcagcagcagccgcagccgcctcgnttttgccgccactagtgctgcagctgccgccgccgcagccgccgntccctctcccggagccccttcctgggcagtgcggccccgactgcgtttcagcccctatcagatcccggtcaccatcccgcctagcactagcctcctcaccaccgggctggcctctgagggctccaaggccgctggtggaaacagccgggaagcctaagccccctgcccgaagctggctctccgcaaaagtaaggggccccatcccgcggtgccctgtcgcccaagtggctcggccaaggaaggcggccaatgaactgcagagcatccagagactggtgagtgggctggagagccagcgagccctctccccaggccgggagtcgcccaagtgaggggctgcccagctgctcccctgccacgcaggccacccgggctgcctgcccctgctgcttgggacgtgtacagcacagaatgattattttattttaattaaaggagaaaagtggggcntgcagcagcccggaatagagccntcgtctggcaagtcggggccctgggacacttccctgggcctcaaccaaggatcaggctgctggaaacacagtcacttgggagctgctgggctaggtccagaatccgctccagcgtcaaggtggcatccgaaggtgtctctggtcttccagcgaggtgggagaggcctcantccagggcccagcggtccctgcagaagccagaaggtgcaggggccaggggtgggagcatcggagggagtcccagagccctggaccttgggcctagaccgcgtgataaaactgggttgagggatgctggaaccgagttacgactgaagtcagtgtagacctgagcttggagggaaacctgttagtctccccacctccttccctgaagagacaggcacccctccccagccgggggccaaacggaggggagtgggccctttctgccctttaaaccccccacggggc

SEQ ID NO: 322983 - DNA, 1026 bp, Homo Sapiens
  misc_feature (143)..(171): n is a, c, g, or t
  misc_feature (234)..(243): n is a, c, g, or t
  misc_feature (290)..(313): n is a, c, g, or t
  misc_feature (337)..(388): n is a, c, g, or t
tgagcgagcacgcctgctgcgagtcacagggcgggcacgaaccgggggagtttggttgtgcccgcccgcccccgccctgttgccgcaccgtttccgccccgccgccgaggggtgtggtctccgccgtctagcgggtggtcctnnnnnnnnnnnnnnnnnnnnnnnnnnnnngtctctcccaggttgtgttcacgcaggcccgccgccggccgccgccatttggaataccgcggnnnnnnnnnngccgggtgagacgacgctttgctctcgctgctgccgccggctggggnnnnnnnnnnnnnnnnnnnnnnnnacttggggggatgtttcgggtacnnnnnnnnnnnnnnnnnnnnnnnnnnnnnnnnnnnnnnnnnnnnnnnnnnnngaaaataaacatttctagatcacctgacgttttttttacattcctttggtatttgcaaaataaataaaaaactacgaaacaaatatactgagatcctcctatctccatcccaacccggatgccccagcatcaagggtcgaacgggacctccattcagccccattccagggcctgaatctccagggagtccctgcagggatctcactacctctcagctgtgttgcttcactatttgagaatcaagttctttcccaggcgaatgagaatcccaattggcctaaactgtttccagatcccccgaggctcctgggtctccacgcagcttgggtgcgacttccctggatcccgtcacttgcccacacagaagtcctggaagatgatgtccaggatctcctcggtaccccctccacctgtgagccgggtcaggtgaccccgggccacccgcagcgcctctgccgccagggccaggtcttttgactgcttgtagtggccgagggcatccaggcaaccctggaggtggtgctggtgccttgctcgggtcagcagcgggggatctgtggacgggtccccacacactgcagctagctccttcctcagcgcctccaggaggccgtcccctcgtgccgaattcgccaccc

SEQ ID NO: 322984 - DNA, 839 bp, Homo Sapiens
  misc_feature (823)..(823): n is a, c, g, or t
ttaacatgcacaacctgccacttttaatcagaagtccatgtatgaaatccaggctggttttggatgttaacatggagcgaatgggatacatcaaagaatggttggctgcttgttttaaagaggtcccactggtgacaggatggtagtggcgatggcagtgaggacagactggtaaagggaaaacccagaggcttgtggggagaaagggcttttgtagttaggaagagacagaggtaggcccctcagccagctccagcaggatagagacaacaacatacagcgcacagagaattcgtgcctcagggtcatagtccatgtcaggaggactgctggccagctcatcccagttctgctccatgacagatttcacctggtccttcaacagaggaagggtccccttctccagggcctcagccacaaactgctgctcttcagacagctctagcagggcatccaggaagtccagaatggcttttgcacgcgcttctaccaagaccccagcagcattaaaaaggctgcttaggagaggcttgtctgggtcctccatgtgtagctccccggaaatcaggacctcagatactctttgctctagatcctgccgaatatcctccttgccgaggcacttagcgagggagtttagcacatcttttctcttctcctctgtcaggtccttgaggacactctccatgtcctccaacttctccttcatgtttctggaatcctccgaacccaaagactttcctgtagaggcatgaattgcgatccttgtccacccagcccaaaaggttttatttctaaggctctgttatttgtctgactgtcntctggagaccacctct

SEQ ID NO: 322985 - DNA, 2141 bp, Homo Sapiens
  misc_feature (246)..(247): n is a, c, g, or t
cgggccccctaaaccccatttttttctggctagggactggcaatagttacctttccaggctgggtggctccactcttcagtctctattttctagtccagggtcaaattccccatgaggcccatctcccttaattattacccccacatcaaatcatggtgggaccagtaataacagcatgatgttttcttacaatgtggaccaaaagaaaaaagggaaaagcctgaagtgggggtgggtggggaggnnaacccccaggtggaacgtcggccctgagacaatcccctggccctacagttccaggtccaggttagccgttagtccaaccaggtcccttccaggaggacaggcgtgggagtgcagaggctgcctctggcccaaaacgagaactggtagagctggcgctgagatgctggttcccagcttttgagtgcctggaagaccagatgttggtaagaggaccatccagggccctgggacactgccaaggggagaaaatgattttctccaggcccctcaaccacaaaactgcagccccaaggaaatgaagcgttcctggtagacccagacaaggatgttagaggtgatgggagccagaagcatctcaaagacttgcagtccacagacttcggctggagagatccgaggcagtaggctgaatttggtcactaggatcttctatacaaccaattcctccagaagtctggctgccaaaactcctccgtgggaagcaccaggaaaaccacttgccatttctggggggcgtgaggctgtgtgtctgtctcagggcaccaggggcagggtgtgcgtgttttgggtggttcgcatctctgtctctcctggtcttcacagccagttccaggcaggggaccggatggcggtggctgctgctttgaatatgttttggttgtctgggtttggtttttatgttttggtttcagtgtgggaggcttggtttaccaggggtactgactcctcccctgggcgctggcatataggccctgcagttctgaccagatatgccagctctggggctcacaccaagccggcgttctttggccatgctgtagaaaagacctctctgctgcaggaggtccgatggggcgccgtactcctggatttctcctttgtccaagacgatcacccttgtgtagtccatgatggtgttgagccggtgggcgatggtgaggacggtgcagtcctcgaactgtgtccggatggtggactggatgaggtcgtccgtttccaggtccacggctgccgtggcctcatccaacacaaggatcttcgtcttcctcagcagggcccgggctaggcacacaagctggcgctgcccgacactgaggttctccccgccttctgcacattcatggtctagcttgtcaggaagggctgacacgaagtccttcaggtgggccagctccagggacgtccagacttcttcatccgagtactggctgaatgggtccaggttcattcggagggaacccgaaaacaaaacagggtcctgggggatgatggtgatcttgaagcggaggtcgtgcaggccgatcttggcgatgttgatgccatcgatgatgatctctccttcggcagactcgttgatccgaaataagcccagggtcagggacgacttcccagctcccgtccgccccacgatgccgaccttttctcccccattgatcgtgacattgatgtgcctgagaacgaagtccaggtcctctcggtagcgcaggcagtagttccggaattccactcggcccacctggggccagctgctgggcggagctgtctcctggatttgccagggcgcctccttctcagtctctgaatactccttgagcctctccacggccacgatgttggtttccatttcagatgacatccgaaccagccagttcaagtacgtggtgacctgcaatgagtaagacactgagaggcccaccaagccagcactgaggctgtgcctggagatcaccgcaaacagggcagcaaacagaacgatgcagttgcccacacactccagccgcacggccagccacctgttggccacgatgctggggtaataggccttctggttctcgtccaccttcaggtcactctggtggatgaagcgctcctgctcctcgaaggctcgaatgac

SEQ ID NO: 322986 - DNA, 1141 bp, Homo Sapiens
  misc_feature (557)..(557): n is a, c, g, or t
ggggagacaggccagggaggccacctggagcctggcacagtggcctcatttattgtgctgctctgctgctcacaggggaagccggtcccccagagtccccttcctggtcctggtgagtatcttgtccctggattgcttgtcagccttgtcctcctggagcactcagtagccggcaggctccccgcctttcctggagtccgaggcagctgcccagccaccagccgtgcggacgatggcttgcaccacagcgatgaaggtggacgcgatctgggtgtgatggtgccgggtctccagggctgcagtcactgcctggtcaatgtttctctccactgtcgtgacgttgggcagaagctggttgtgcagccggggctcctccacggcccgcttcacgtcatagccgaaccagaggttgtagatgatggccagtgcagtggccgtggtgatctgtgtgcccccagcagctcccaccaccatccggaccttgccgtcctggcccaccatgatcgtcgggcacatggacgagagcggctgcttccctggctggatgaaattggcanggtgaggggggtaccccaaaactcgttggtgatgcttggagagctgaagtcgtccatttcattattgaacaggatcccgctgaccggggagcggaccttggagccaaagtagaggttgatggtgctggtggcggacacagcactgccgtcctctgcgacgacagacaggtgagcagtgcccccgtcatccggcgtgtagaactcgggcttgtagtaggagatcgggtgagtggtgtcgtcagagatctgggcccggagctgggcagcgaagaactcggaggtcatgttgcggaccacctcagtcacatccacaaacttggggtccccaagcagggtcctcttggcgtaggcaaaccggaaagcctctacgatgcggtggtacgtcaggcccttctgctcggggctctccacgctctcccgggagaagttgtaccctttgaggatgttgaggatgagggccagcacgggcccgctgagcggcgcactgggcatgtacagcaccgcgtctcccaggctgatgttcagcgggtgctcgatcagctcagcacggtagtgttcaggtcctcagctgtcacaatgccccc

SEQ ID NO: 322987 - DNA, 628 bp, Homo Sapiens
ggttgtagatgatggccagtgcagtgtctgtggtgatctgcgtgcccccagcagctcccacctccattcggacctggccgtcctggcccaccatgatcgtcgggcacatggacaagagcggctgcttccctggctggatgaaattggcaggtgaggggggtgccccaaactcattggtgatgctgggagagctgaagtcgtccattcattattgaacaggatcccactgaccggggagcagaccttggagccaaagtagaggttgatggtgctggtggcggacacagcactgccgtcctctgcgacgacagacaggtgagcagtgcccccgtcatccggcgtgtagaactcgggcttgtagtaggagatcgggtgagtggtgtggtccgagatctgggaccggagctgggccgcgaagaactcagaggtcatgttgcggaccacctgctgagaccccagagctggcctcagtcacatccacaaacttggggtccccaagcagggtcctcttggcgtaggccaaccggaaagcctctacgatgcggtggtacgtcaggcccttctgctcgggggtctccacgctctcccgggagaagttgtaccctttgaggatgttgaggatgagggc

SEQ ID NO: 322988 - DNA, 1007 bp, Homo Sapiens
ttgtcttaagacctactctattataacatttgcaaacacacattaatttacatactaaaatagtaaatgaaatttcttggaagttcaaaaaaagatctttccaatcttttccatcaccatagaagtggaaatccgtctgttttcagagttgtcgaacttttctttctgtgctttttatgttgacatctaacttgtccactttggttgtcagccggtcaagaatgtcatcttgctcctcaatttctgtctgcatccccaggggctatgtccttcagacgacccagtcccatggacagctcatctaggttgctgtcgatcttctggtgataggctcgaaggtgtgggttctttgggtaagcatcagtactcatggcagaaccagcccctctggggacagggtctgtatcatccagctttctaaggtttgggtggctggcctggtactttgcttcctgttctttacttgtacttatagcttctttcaatctgttgttgggctgggaggtgagggtgccattctgttcaggtggggtctctactggtttggatttgaagtaattgaccagccccccaaacacgctcttaatgctattgatgtgtttctggctgatcttcaaatcttggtccatcttgtccaccatcttctctgtgcgctccaggactcctcgctgacgggcgagctcctcggaagaggcgaccccaaccttctcggactcgtacatgagggccagggacctgctggtgctggcggccgtggcctcagccctgcggaggacctcctgccgcaagtactgctgcctgtccgcgggcgcgtcgggcccgtcggggaggtctcgggcgtccctccaaggggccggccgggcgccttcgtcctccccgtcgtcgtcgaacggattgtagcttttagggtaagctgacatggtgccggcgcggctctcggtctgggaaacagaaggaggagccccactgccgccgccgtccagggcctcgccccgcccgccgacccc

SEQ ID NO: 322989 - DNA, 1216 bp, Homo Sapiens
  misc_feature (206)..(206): n is a, c, g, or t
  misc_feature (209)..(209): n is a, c, g, or t
  misc_feature (234)..(234): n is a, c, g, or t
  misc_feature (266)..(266): n is a, c, g, or t
tgaatagatcataaatatatttgtcaatccttggagcctactactgacacatacatattagctagatacgtggtagctccagggaagtgctcaagagaggcagtccatttccttgtgaggtgtagctatctttcacaatgaaaaccagccgtgttctctttgttctcttgtggatttgtatcttctcctgggaagaggcgagagcntangatcataggcccacaccgagagcanggctgtaccccagcctgaccatttcccactcnttgacatctgcttggcagagaagatacctggagataattttgtgaaaagtgtagcggaagtctcggttccggtaagcatagacaatgggattgacaactgaattggcatgtgacagaaagaatggccatattcattgcccacttgggcttatttttaccctgagctggctggaaaagagtgacacagttaacagcatgcacaggtaaccagcacagggcaaaaatccccacaatcatggccagtgacttggctgcatggatctcccgctggagggtggtcctcgagtggtccatcagctcagtgcgctgaagctgcctgcaggccaccaggaagatcttaatgtagatcaccagcattataagcagtgggggcagaacacacccaaagaaattgaaatataccatgtagctcatggggaccacattctcaaagagacacttcacaaggcagcagctttcattcgtggttgcatcccagggttctgtgcagttgttggtggcactgtctttactgttccaccccaggaatggagtcaatccgatgccaaaggcaaggacccagaggacagcaatgacccctcttgctcgggtccccgtgaccaaacttttatacctgagcgggacacagatggccaggtatctgtcgactgccacggccagaaggctgaagatggagctctgcgtgagcaccagcacgaagcaggcgaggaagaggcagccgtagaagtcagtgcagaagcccaggctgatggtgatggcaaaggggatggcgaagagccccacggccacgtcggccgcagccagggacaccaggaagtagttggtgggcgtctgcagagtgttcgccgtgcccaccgcggcgcacaccagcacgttgcccgccaccgaaagcgcggcgatgaccagctccagcgccacgtacagcgcgtcctggtctccagcagcaggcc

SEQ ID NO: 322990 - DNA, 1324 bp, Homo Sapiens
  misc_feature (877)..(922): n is a, c, g, or t
gagatggcccacaaggaatttgagcgtttcatagtagtgtcctgggagatcccggatcagcttccgcagcgtcctcattcgctcccgcgcgtcctcaatgcggttggcctcgatgaagtcgttgtatttgtcatcagtgaaaagaggctcgggcagctttcggaagaaggacttgagcaggctgctgatcacattgaggtcttgccagcgctcatcctgcaggttgatgtcaccaggcccgcggttgagctgctcctgtaggctggacaccactgcattgttgccgggcactcggtaaatgcctgtggactccagccctcgtgcctccacaatgcgacagcatgcagccacgattaaggggacgcgctggttctccgtggctggctggcactcctccagcctgaccccaaacgccctcggagcggccttcttatttttcttgatgatgttgatgccccagggggttttgggggctgcagcactgtcatccttgctccctgcgggcaggtcctgagtcctgaggccacgtgccgcactctgcttgaggaactcagacttgaggccccccaggccgcgagagcctttgggggaggaatcagctttgggcccagagctatggctcactttgcgataatcattaagcttcttgctgatcagagcttggttggcacagccggggtcctcgccctcggccctgctgttctcccggatcgctctgatccagcccagcatgtcatcccggtcctcagcctgaaagagatattcacagaagtcagcggtggtcagccggaacacgtgcctcctcttggtctcgctgtaggagatgtccacgaggcaggagccgatgcagacgggcgccgcctcgtcctcacctgcnnnnnnnnnnnnnnnnnnnnnnnnnnnnnnnnnnnnnnnnnnnnnntccttgctcagcgagagcgagcgcgcccgcagcgcggcgtacacccgcttccactggcgcaggccgctgcccgctttcttccccttcttggtgagaatctgcttataatacaaccagccttctctcctgatatcgctgaaggtcgcatctgagaggtcagaggttgagtgtcgcttagaaggagcgtcagcatcttcagaggtgccccagctatccaaggacccgtcggtgaagaagctccggagcatccgcaggctgggtatgcggtttggcaggcgccgcagaacccggccctcgtcgcggaaggtgttgagtccatcatcgcaggacttggagcgctccgtggtgatggccagcaggtaggaggagcggcggccagccttgatgctgctgcagtcctgc

SEQ ID NO: 322991 - DNA, 996 bp, Homo Sapiens
  misc_feature (50)..(51): n is a, c, g, or t
  misc_feature (221)..(307): n is a, c, g, or t
  misc_feature (393)..(444): n is a, c, g, or t
  misc_feature (788)..(788): n is a, c, g, or t
  misc_feature (855)..(855): n is a, c, g, or t
  misc_feature (944)..(944): n is a, c, g, or t
  misc_feature (966)..(966): n is a, c, g, or t
  misc_feature (974)..(974): n is a, c, g, or t
  misc_feature (979)..(979): n is a, c, g, or t
tctaggtgtagtggcctggtcccatagaaaagcttctcaataagtgtttnngattacatttaattctcagagctcccttccaaggggatactgccaagaggtaaagctccaaacctctactcttactgagagcagaatttcttagaatttccagaaccatctcctatgcttaagtataaattcttgtcagacacagtggctcacacctgtaatcccgctannnnnnnnnnnnnnnnnnnnnnnnnnnnnnnnnnnnnnnnnnnnnnnnnnnnnnnnnnnnnnnnnnnnnnnnnnnnnnnnnnnnnnntgtttaaaaattagctaggcatgctggcacacacctgtagtcccagccatttcagaggctgatgcaggaggatcgtttaagtccannnnnnnnnnnnnnnnnnnnnnnnnnnnnnnnnnnnnnnnnnnnnnnnnnnnagacagctggaatccatgtcttataaacaataataattaatttttaaaaaaagtatttatcatccacaccaatcctggggaagcctaacaatcccacccttaacacatttccagttttaaaaccctggctgatctggaatagaactttgtccaaattaaattgtagaaatgctatggattcaagagtaaacctgcttgattaatcaaacaagctggaaaactactgttaatttctttgttgtaaattgatcactgtaattttaccttacatgtcatttatattttgtatatacatgaacattttaatttccatagcttttaacaggttgacataatacttctcncatgcagtaagtcagtcattttttccacttgtaactgtaattcaataaaatttaatcctgtctgggncatcttgctccacatttaataatctagggtaagcagggcatgggattaggaggacataacctatacggtcacttacaaaaacatctccnggcaaactatctaaacttcttnaaactccnggggnactatcaaagggatacg

SEQ ID NO: 322992 - DNA, 1131 bp, Homo Sapiens
  misc_feature (504)..(504): n is a, c, g, or t
ttttttttcctgctgggggcacgtttatcccagccaccgcctccagggcggccgcacaggccctgggcatcaatccagcagggctcccgactcactccctggaaaccagctccccaaccacccggccctgatggcatcccgctgcggccaggtgtcctctcagccgaggtccttgtcactgcctagctgcgtccgcctgccacaccagctcacccgagatgtaggtggcctggacgtgaagggagtcgtcgagcaccacgaagtctgcgtcagcaccaaagtccagggtccccttactcttctccagccccaggcaactgggcggggtgcagggatgcagcctccaggggccgactccatgctgcagcctgtggcctgcaggaagtgccggacacagacgtccattggggctatgctgccactcagcgtcttggtgcctgccacgtaggccgtcagaccgtccacttccacttcctgctgtcccagcgtgtgccggccgttgcncaggcccaaggcagggatggcatcggtgaccagcaccagcccctggggatgggcacggtgggcgatccgcagggcggcggggttggtgtgcgtgccatctgcaatcatcccatagaagatgcagcggcctgcgggcagccggtcgctggtcaggagccccacgatgcctgggtcgcggtggtggaaaggcagcatggcgttgaagaggtgggtgatgaaggtggctccgctccacacagcatcctctgccgcccgcaggtcagccactgagtgccctagggacacgcagatgccacgggccgtcagcgcccggatcacttcgtggctacggcccaactctggggccagcgtcacgatgcggacattgtccaggggcccgtaggtggccagcaagtcctggaaggcatcggcctcgaaggagcggaggtgggcctcggggtgcgcgccccgcttctcccggctgatgaaggggccctccaggtgcagcccttgtgataaacctccggtggggaagtgaccagggtggggcagaaggaggtgacgccgtgcgacaggatcctccgggccacgagggcaacccccgaacccacgtcctccgtggcttgagagaagtcaacaccaaatcca

SEQ ID NO: 322993 - DNA, 969 bp, Homo Sapiens
  misc_feature (61)..(61): n is a, c, g, or t
cacagaagttccagtccccctttaatttaccccaagttcccacgggtacaaatcccctggncctgccaccttgcaaatcccaccgagctcttgattcctgctcccctgatcatggtgttgctctctgcatgattagctgctggttctccagacactgcttcagcttgtcttctgtcagtgtcaaccgctgctccagaatggagactgtctgagtgaggacatccagctggcccacaatgtgctccagcgtgctagtcagtgtctggggcacactcacgggctcctggggctggctctgcacagactccacactcctgcctctgcctggggggacagggaagtccacttctggcagattccccatggagctggccagtgtggctgggggcctcggcactttcgtgacttctccatgatcaacaatgtcaaagttactcttccagaccatcacttgttcatcggagcctccagaagcgaaatactcccccgttcttgaaaaggcaacggtggtggctggtccctggtgcccgtggagtgtgtagagcagccggccctccatcaggtccaggatcttcagggttgagtcactggaggctgtgatgaggtagtttcccgatgggtggaaggagagggcgttcactgctgcactgtgtaactgataatgctgcagcagccggtgagtccgcgcgtcccacaccttcactgtgttgtccatgccggcagcggcaatgcaggtcccactggggtggaagtccacgtaggtgacaaagccgccgtgctcacagtatgagtggatacattcccggctggtcttgtcccacagcttgacagtcttgtcatcactggcagacacgatgagccgcccgtcgggggagaacttggcacagcggacccagttgatgtgctgggtcagggaaaacaggaatctctggcgatgagttgaccacactttgactgtcttgtcatccc

SEQ ID NO: 322994 - DNA, 917 bp, Homo Sapiens
tgtcttccccacagtagcccagtttgccattttccccccttttttatagttttatcccctgtgaggcaggcccttatatgattctccattggggcatgatggctactgaagaaaccattgtggtcatggccgtgcatggttctgatgcattcaaagccctgaaaatccccatagtttaatggtcatatctgcagaacaggaagccagaagcttgccgctgtggtcgaatgaaatgtcctgtacagagtctgtatgtcctttaagagttcgttcaaaatctccagtctcataatcccacaccttaattgtagcatcctctgaagcagagaccataacactgaacacaggatggaaaatgactcgagtgactggactcctgtgaccactcaatgcatatttttctggcggacggggaatccattcttttgggtctcgtttctgaccaagaggtccacctgacgtaaattcttcttttgcttcatttagctttgattctaattccataaccttcttttgtaatctaataacagatgtccattttttttccaaaagaccagcatactttttatctaattcttcattcacatctaattcagcttcctttttaaaaactgaatatgcctcttcatagccatttgaacgaagataatctgctatagctcgatttagttcatctcgttgtctctgggacagcaccatcttggctgtaatgtcaagcttatctgatatagtggtatgtccctcctttgggaaatcaaaaagctttttgatccgtggacttataatttaaatatgccactaagtgtcttccacacaggggaaaatgattctttcacaaatgaatccaactagtaaccagaagatattcaacaagtaagattcattccaccggagcgctgcaccgccgcctccgcccc

SEQ ID NO: 322995 - DNA, 1258 bp, Homo Sapiens
  misc_feature (258)..(258): n is a, c, g, or t
ccagaaaacgaggcatctgctcagtgttgaacatctgaagtcctcgcgtgagtgcacctgcgtgcagactgtctgctggtgtttattatggctgtgctctgtgattacagtgcactggcaaagggctgtagtgtcctgaacaatgatgcctgtttttattagggttcctgaagtggttcaggagcttccattaacttcgcctgtggatgacttcaggcagcctcgttacagcagcggtggtaactttgagacaccttncaaaaagagcacctgcaaagggaagagcaggaaggttcaaagagaacagagcaagatcactatgagacagactacacaactggcggcgagtcctgtgatgagctggaggaggactggatcagggaatatccacctatcacttcagatcaacaaagacaactgtacaagaggaattttgacactggcctacaggaatacaagagcttacaatcagaacttgatgagatcaataaagaactctcccgtttggataaagaattggatgactatagagaagaaagtgaagagtacatggctgctgctgatgaatacaatagactgaagcaagtgaagggatctgcagattacaaaagtaagaagaatcattgcaagcagttaaagagcaaattgtcacacatcaagaagatggttggagactatgatagacagaaaacatagaaggctgatgccaagttgtttgagaaattaagtatctgacatctctgcaatcttctcagaaggcaaatgactttggaccataaccccggaagccaaacctctgtgagcatcacaaagttttggttgctttaacatcatcagtattgaagcattttataaatcgcttttgataatcaactgggctgaacactccaattaaggattttatgctttaaacattggttcttgtattaagaatgaaatactgtttgaggtttttaagccttaaaggaaggttctggtgtgaactaaactttcacaccccagacgatgtcttcatacctacatgtatttgtttgcataggtgatctcatttaatcctctcaaccacctttcagataactgttatttataatcactttttttccccataagggaaacttgggttcctgcaatgaaagtctctgaaagtggaaacctgcttggtttccctaccacacacctttttggtttaagatcctgggttttatgaaccttcaataaaataaataaaatttcccctggggccctttcaataattttc

SEQ ID NO: 322996 - DNA, 907 bp, Homo Sapiens
  misc_feature (799)..(799): n is a, c, g, or t
gggaggggctggggttgcggcgcggcggcgaggaccagaccggggcctgaggagaggagaccggcggcggcggcaatgctggagacccttcgcgagcggctgctgagcgtgcagcaggatttcacctccgggctgaagactttaagtgacaagtcaagagaagcaaaagtgaaaagcaaacccaggactgttccatttttgccaaagtactctgctggattagaattacttagcaggtatgaggatacatgggctgcacttcacagaagggccaaagactgtgcaagtgctggagagctggtggatagcgaggtggtcatgctttctgcgcactgggagaagaaaaagacaagcctcgtggagctgcaagagcagctccagcagctcccagctttaatcgcagacttagaatccatgacagcaaatctgactcatttagaggcgagttttgaggaggtagagaacaacctgctgcatctggaagacttatgtgggcagtgtgacttagaaagatgcaaacatatgcagtcccagcaactggagaattacaagaaaaataagaggaaggaacttgaaaccttcaaagctgaactagatgcagagcacgcccagaaggtcctggaaatggagcacacccagcaaatgaagctgaaggagcggcagaagttttttgaggaagccttccagcaggacatggagcagtacctgtccactggctacctgcagattgcagagcggcgagagcccataggcagcatgtcaatccatgggaagtgaaccgtggacctgctgggagcanaatgggacctggatgggacatatcgggaccaaggaagggcccctggaaccgcctttcctggaaactcccggggaggggaaaaagaagaaaacacctgggggggcttgg

SEQ ID NO: 322997 - DNA, 921 bp, Homo Sapiens
cctggccttgccgacccacagtggggcctccagctggggccacgtggccatgagaatgaccagctaggcttccctggaggccaggcctccctggactgggccaggtgcttcctgccagcaaagatgagtaatgtctcagggatcctggagacagccggcgtccccctggtgtcagtgaactggccgcagcccagccccccaccggctgtgccagctgggccgcagatggaccacatggggaacagctcccagggggccccctggctcttcctcacctccgcactggcccgaggcgtctcggggatcttcgtgtggactgccctggtgctcacctgccaccagatctatctgcacctgcgctcctacaccgtgccacaggagcaacgttacatcatccgcctgctcctcatcgtgcccatctacgccttcgactcctggctcagcctcctcctcctcggagaccaccagtactacgtctacttcgactctgtgcgggactgctacgaagcctttgtcatttacagcttcctgagcctgtgtttccagtacctgggaggcgagggcgccatcatggctgagattcgtggaaagcccatcaagtccagctgcttgtacggcacctgctgcctccggggcatgaccctactccatcgggttcctgtgcttctgtaagcaggccactctgcagttctgcctggtgaagcccgtcatggccgtcaccaccatcatcctccaggcatttggcaaataccacgacgggggacttcaatgtccgcagcggctacctctatgtgaccctcatctacaaccgcctccggtcagccctcggcccttctacgcccctggttcctccttctaacttcacccacccaggggaagctccctggcgggccccttcccaggccccggtccctccaagtc

SEQ ID NO: 322998 - DNA, 1043 bp, Homo Sapiens
  misc_feature (11)..(11): n is a, c, g, or t
  misc_feature (374)..(374): n is a, c, g, or t
agtgtctctcntctggctccacagaaaccagcccctatcacgtggcttctggaaaatgtgccctcctcaggattggtccagggagtagtcacaggtagagaaagtaaagggagcagcaattgaaactcgcccttgaccctgtgtccagtaaggaggtgaagtctgtctggctcactccattccctgccatgcccacctccctggctgccctgccattgcttcaaggagggctgttcctcctgggtgagactttcaccctttgaactagagtgcctttgtatgtgtccagggggagggtggaggaccctgggatctcccaggccttacaaaagtggcggcacataaatacaaacctaaaaaacagccatttcctngccagcaggtatcaactggccccacagcttcagctatggccaaagaggccagcgtggcaaggtcctgtctcagatctggctgatggcagggagccaagaggtgctagcaccctcctcagcccttcactttgatgaccgtccttcctcgtgatcatcaaagaggttagggttctctgccagcgtggctctcactttcttcttctccttgaagcgtcctgagttggagaccttgacgtgcttgccctttgtgctcttgtccacaatcttctccaggcgggtgttaaagtcgctgttggggcctccagcgtcaggcctcgggggttctgcatctccctctgtttgggcataggtgtcagggatctcatacagcactttgggagtggatttctttttccggaggaaagtcagcttccaccaaccaatttcagtcgtcatggcgctccctaagccaaggatggggctttctgtaatcccgactgctccaggctggaggtgagacctttcctagagaagcagttgagtgtaggagctgcctgggagggtgagactcgggaagcaagtggtgcctccgggctgctgtatcaggcaaggctcagccaggagaggtgggtaggagcagctgcacgtcaggtgcaagagaaacaggtgcaagagctgttacctgctctg

SEQ ID NO: 322999 - DNA, 743 bp, Homo Sapiens
ttgagcacaaaggtccactttacttacatgaaggaacataaaggcatgagaaacagtcatctcaataaatgcaagacatgagcataaaagaggttctcggcctttccagcgttgttattacagagagaaacctacaattattttgttaaacaaaattcaaggctccaggactcatctctggagctgatatgtcttaaatactattatagtaggaaagggagaggagaaaattccccacccactcccccgatttggcccgtgtagcttccctttgagggtgtgtgacttgccatctgcaaaagtcatggccaaaacaggaactaacaggccaaactaccatcaatctagtcttctacagcaccctaacagagtgccagggtcctctgtcccctccgcacctgagggcaaagttccaggaagtttactgccggtgttaggaggtgagctcaagttcagtgtctcggcctctggctccacagaaaccagcccctatcacgtggcttctggaaaatgtgccctcctcaggattggtccagggagtagtcacaggtagagaaagtaaagggagcagcaattgaaactcgcccttgaccctgtgtccagtaaggaggtgaagtctgtctggctcactctctccattccctgccatgcccacctccctgctggccctctgtttgggcataggtgtcagggatctcatacagcactttgggagtggatttctttttccggaggaaagtcag

SEQ ID NO: 323000 - DNA, 985 bp, Homo Sapiens
  misc_feature (57)..(57): n is a, c, g, or t
atacagccttctcggcgagctccccttgtgccgcgatgccattggcgctttcctggngggacaggtcatcacggtgcacgcaggtgtaatctacgagcgttgtcttaaatcatcggcgaaggcttcctaccctagggtactcggccttattaatgatttcaggtctgcccattggagcgccccttgcctccgcccagctgggccccctgcggctgttccatcccacagggcttgcgttttccaagtaaaagagagagttgtaggttcccttcaggcagggccttcaggcactggcccccttgccgcttggctggtcctggggaggccgaggaaccaggttcgccctccgtgttcactgtgtctggcttcctcagcccgcacgggggacctgctctgggttggacgcctctccacattgctgctcgccttccccagggtcagcctgcaggccaccatccgcgacgtggtcatagtctgtgtcctgctcatcctcctgtcgctcaaggtcattgtctgtggaccccagctcagctcgggcctgcagccagcgacctggggggctggcccagagcaggcgccgcgtgcggccccacagcgcggcacctaggcgggccgggtggtagtagccccctgagtcacggctgaggcggcgccaggccagtgctaggccagtggccagcagtaggagcagcagcagcagcaggacaacggtgacagagctggagcccacgctgtcctccgcgctgccacccgagcccaaggcccctggcagggccagcagcatcccgagccctaaggtgcagggcagagcctgtgggagacaggcaggggctcagagggctcagcacctggggtggggcctggtgtggggcaggctgggtgaccaagaccactttcgtttttttctctttgggatcctcttgggacagccaagcagaaaaggccaaggccttatttggtcaacccaggcttctggccctgtgat

SEQ ID NO: 323001 - DNA, 940 bp, Homo Sapiens
  misc_feature (178)..(257): n is a, c, g, or t
caaacatcgccgccccgtcgacgtgtggcccgccgccccatcgggaagcgcgaccacgggctgtgcagtaggccgccgcccggaccggcgccgcggcgcgtactctcgcacagtcgaggtacgcgagcggccaacgcgctgggtgccccgcaccggcggcgcatacgtgggcggacannnnnnnnnnnnnnnnnnnnnnnnnnnnnnnnnnnnnnnnnnnnnnnnnnnnnnnnnnnnnnnnnnnnnnnnnnnnnnnncgctccggccccgcgagcctgcaccgggttcgcggcgtggtggctagggcacgggtcgagggcgctgttccgcttgggaggcgtgctcgggtccaggcggtagttctggggctgggggggtgaggtttttagggtcctgaccccactgaataaagagatcccttgaaaatccgcattccaggtcaggttggctggcaagtacaactttagggctaggtacacgggccaagtcagaaagaccatgacataaagagagatggcgaaactgaaacggattatttcttttgtcttcaaaacatctcatcaatttatcactcatccattctacctgggacttagaaaactgcaccacattgtaactgacattatttaggagtgccaatgagtaaacacccaatcctgcatctttagtcctccaaatctgatcaagaagttgagcaagttccaaaactctgcctgctgtgtccactgctattaacacatttccatcacctcgaagtgtttccaggacatttgtcagaagctgctcatctctctgttttcttctaggctgtacatatgtagcattgaatgaatctgtgataagtagggaaggcctgcttagcatttccagggaacatccatttaaatggatctccctcttgtggttgaagtcaactgcataaacaatttcttggaaacca

SEQ ID NO: 323002 - DNA, 1820 bp, Homo Sapiens
  misc_feature (254)..(254): n is a, c, g, or t
  misc_feature (280)..(280): n is a, c, g, or t
  misc_feature (543)..(543): n is a, c, g, or t
  misc_feature (1458)..(1458): n is a, c, g, or t
gcgcccttttttgtttgtgcccccccgggttgtttcccccactggggcgccgaattgttttattccgccacaggcggccccacaaggggtccgttcgatttaccgcgcggcggcgatgttccaggttttacttccacgtccccgcttttggtggaaggcggcttgcccatggttcgggacgaggaaatgccttacagagacaatttcccacgccccgttcttcggggagggaagtgggccagggggcacggggngggatacttttgataattcgggaagntcccgcgctcgggaattccctgcgttggataggatccccacgttaaatggggcctggcagcgacctgccccatcgccgggatttttgtttcagaaaccgccttcgggttctgcccgcccgcgggcgttttctttcatttgggcgagggggttccaaagcccacctggtcatgggcccaggggtctccctgaggaccaccaggctatggacccatgtgtccacttgcgcttacgggggcccgcggcgcccaaacgacagtggtnttcgggaaggttctctgaggcgcgagcgtcggccggcacaggcttaccctctcgctcgtcggtgtccttctccgtgtcggtctgcttttattacctcccagactgagcccccgacctggcccagcctggcccgtccccaatccagtgggctggccaggccacctgcaccagggaggacagctgctggcagggactaataaacccttccacctggccatggtggtggtgttctctatggaccgaggccctgaaacgcgggcagggaggggcagagaacacactagcttgggggtgggcaccagcttcagacccctcagcagctttgggccctcggccgactttcccaggcagtgcaggctagcccagtccaggagtgtgcagcctggcttgggtcgagctctgtcacatctggataagcaactgggggctgagagtcccagggcagcctggcccagcaggtcaaggcgccacagggggccatcaggtccagctggcgcaggccggcaggggagggtctgctctgacctgggtgctgcatgggtccctccagctgccaccacctgcaccaggcagtcccgaggggtcacaggctagcccagcacactgtcattgaaggccaggcagacaacagccttctggtggccgccatactctctcttgatctctccagtctccacacaccagagccgggccaggttgttcgaggaagcagtgacgatgttactgggagtcccccgagaaggcgcagccccacatccagccgcgggaggactccccggggttgccgctcttgatgctcagctccgtcatcagggagaagttggacgtcctccagatcttgcacgtctgatcagccgagcaggtggcgaggagcgtggagtcggggctgaagcgacactgcagggcgtagggcgntgtgggcagggatcttagtcttggggatgagctgggtcacctcgtcaccaatgccccccgtcagattccagacatagcagtttccggtgctattgacagctgccatgtagctggcgtcgggatcgatgtgggcggacgtgatggagacctcgggctcagggatcagctgctcgttgtggtctgttttcaagtcccagatgtggatagccccgctctggtcacccacgatgagctctgcctgggttggggtgcagcaccagggactcccagggtgaatgccttgggaggtcacaccggaccgcagcatgattgcttcttgcaggttaccagcacatccgcatgtatgatcttaacttcctcgt

SEQ ID NO: 323003 - DNA, 725 bp, Homo Sapiens
  misc_feature (705)..(705): n is a, c, g, or t
  misc_feature (711)..(711): n is a, c, g, or t
gcataaggccaagttttcccgggtgggttaatttgaaccaggcttccccacatgttaagcttggccgttccgggggttcggaatgttggggccggaaccgtgaatgggaggaccttcgggggctccaggggatccagcctgcttcgtttggtggttctgtttttcaaagttcccaggaggtgggatagcccccggctctggtccacccacgatgagctctgcctggtttggggtgcaggcacacgcagttaaatgggtgcgtccacctggaagatccgctggcactgcaggttccgggacctgaggtcccagatcctggctgtgcagtcctcgccgcccgtgtacatccagcggccgtcttcgtggaagccccacagacgcgatgttcttgttgacgccgtcgtagctgatgatggggttagggttattggagttgagatcatacatgcggatgtgctggtaacctgcagcagcaatcatgctgcggtccggtgtgacctccaaggcattcacctgggagtcctggtgctgcaccgtccgggtgcagatgccgctgtgggcctgccagaagcgcacggtgtggtcgtagcctgcagtggccaggatgaccgggtcactgcccaccgtgcctggggaggtgttcatggtgtgcctgcacgggccctagagctgaacggcaggggtcaaaggtcagagcatcttganggggcngcccgcactccgcc

SEQ ID NO: 323004 - DNA, 1373 bp, Homo Sapiens
  misc_feature (36)..(36): n is a, c, g, or t
  misc_feature (46)..(46): n is a, c, g, or t
  misc_feature (787)..(805): n is a, c, g, or t
tcatgcattacaagccctggaagaggtgagagaggnctgattctanactgtggtccaatgggcatattatgagtggtccttgtccctgcctgctatggggtaaccctgacccagctagcgtccctgacaacatgatacaaaaacacagacctctagcgggatacagagatgtgtgcacagctggcaggaggcactggccacctccccaccttgttccccatagcttactcctggatgtagcctggagggactgctgggctggggagggactggccatggagcagggagctggatgccagcgggacctcagacctggactgcagcatctctttggttatcggttgtgtgtgtgctcagaagggaggaggccttccccttgttacatctctctctccatatattctcccggactcatcagtttggggggcgaaaagtccaccacatggtcttggcgacaaaccactggggatgtcaccccagctgcagagctggaagcttgtgccggaggggaaactgggtgagcaagggaggggcgaggcctgcctgtgctctcctcaccactgctgggaccagaaaagatgggcacctgatagctcagctgggcagtcccaacgcattcccactcagccaagggcctgagccccaggccattctggttgtgtcttttcagagcagtgagacccagcctcaggcctcctggggggcagcagccacactgcccgtggcgctctgcgccaagcactgtccagggatagtcccgctgatgttgtggatggcaccataggtnnnnnnnnnnnnnnnnnnnggagacagtgctgtcctctccgaggccaagccgttcagaatccgaggcacgtagggtgtgaacggtgggggcatgtgggcctctgcctcacttcctttgtcacttgcaggctcttctgttttgtagttcagagggctgaggtgcttgaagcatccaaagcaggtgtgagccaggcagaccaggatggtgagcagcagcaccaggaaggtgaacagagtggcgggggccttcatagccaggcgcaggaaggaaaagaagtagagcccagaagaggcacaggatgggggcctgccaaggccctggttcacagcggcaaagtggatccccttcctccagcttggctgggaggtagacgaagtagaggttgtgccggtccaccatgtgcttgagcaggatgtagatgaggccaaatggcgcgatgataggacaagtgatgctgtaggccacgatgacagtgaagacacacagcatccatgcatacatggctccaaactcgtactggaaggcctggttctgcttgacatttctgcggtcagcagccgtcttggccatgatcatgcggactcgt

SEQ ID NO: 323005 - DNA, 923 bp, Homo Sapiens
gaactccaggacatcatttttgccggccagtgagatcccaggagctttcggggggtggtcatttggcgccggacgccaaccaattcccattggggggtgaaccggagacaccgcacggcctggctgtgcccctggtatgggaagacacagcctttcctcctgatgtcccagagcttgatgtttgtgtcctgggaaccagaggctacaaactcgccgtacgggtggaaatccaggctgcagatgttggctttgtgtcccatgagtgtgcgaagaattttggcagcttccaggtcccagacacggatggagcccgactgagagccggccacgatgagctcctcgggggtgttgaaggcggacgctctcccactggggatgtgtggcccgtcaggctcatgaatgcagttgggcttgttgatggaccacaggttgacgcggcagtcatccccgcctgtagccagcagccgcccggaggctttgcccagcaccagtgaggacacgttgctggcatgcgcgacgatctcttgcaacttccaggctgtcttggtgaccacaggggtggccatccttcagctggctggcacctgaagccccacccacaaaataaactgtgctttcctcgtggggtgggggtggatccccccccagatccaccaatcaagttggcagagagttcccacacatccaggcagacagaatgcctcgtcttctggccctggggtgcctcgtggttccaaattacccacagcagcaacagcagcagcctgtgcacatctgtcacgatcctggatcatggaatgttaggctcgagccatctcagctcaatacagggctgcagctgcggctccggaggccgaggctccgctccaggcgcgacccccacttgcctccatcccctgccttgattggccgctgcttgacaa

SEQ ID NO: 323006 - DNA, 915 bp, Homo Sapiens
  misc_feature (16)..(16): n is a, c, g, or t
  misc_feature (29)..(29): n is a, c, g, or t
aggcccacgctgcccnaagaaccgcaggnacttgtagcggggagaggcttcttgaaggcagtggtccagcttgtctcgattttcctctgacagattcctcagccccctcagcgccacaaacacctcgtagtggggagcagagcccgcagaggaatccagaatgctgctctccacacagccatggtccagcagcttggcccccgcccactgcctcactgcccggcccagggcctcagagaacaggtcttcaccaatatcttcccctcgcacactcagggtgtggtccagcctgcagatgaacctgacgactggacactgattgtaggcaccaaccactcgcaccacatcacccaggcggcacctggtgaggctggcgcggtccgtcagcaccagctcatactccttgccctgctgggcctcggccaaaaggagggtggaggcagcttcctcctgggtgccttccttgactgggagcagctcgataaagggggccccagggggcagaaggtagagcccatggggctgctctggctgtaggtttaggcccagcacccctcccgaggcagcataagcaggagagaagaaggctagtccttggcaccacaaggccccgagggcagccacagcctcggcctggcctcctgcatccagagtcaccaccacctgcagctttggccagagccgaagggccagtccccgtggcccctgctctagggcctcccggagctcagctgcccgttcacggagaggcgctccagggttcccggcagctatcgccccagctagctcttcaccatcagtctccaggcccaagaaaacatccagaagttcgacagccgtcccagcctccagtgccctcagccctggggacctcagtgcgtccagcagcagggcacctagggtccttggttccag

SEQ ID NO: 323007 - DNA, 1063 bp, Homo Sapiens
  misc_feature (352)..(352): n is a, c, g, or t
  misc_feature (367)..(368): n is a, c, g, or t
gcaggtctgggtaccgggcgctgcccctgggtgattttgaccgcttccagcagtcgagcttcggctttctgggctcgcagaagggctgcttgtccccggagcggggcggcgtggggacaggggccgatgtaccccagagctggccctcctgcctctgtcatggcctcatcagtttcctggggttcttgctgctgttggtcaccttccccatttctggctggtttgccctgaagattgtgcccacctacgagcggatgattgtgttccgcctgggccggatccgcatcccccagggacctggcatggttctgctcttggccttcattgactccttctcagagggtggatctgnaggacacgagccttnncaacgtccctccctgcaagctggcctctaaggacggggctgtgctgtccgtgggagccgatgtccagtttcgcatctgggacccggtgctgtcggtgatgactgtgacagaccttgaaccagccccacgcatgacagcccagaacgccatgaccaaggccctgctcaagaggccgctgcgggagatccagatggagaagttcatgatcagccggaccaccttctcgctggacatccaccaggtgaccaagggccctgggggggctagaaggtaaatacgctagcaaacttggcaattggacggcccttgacttccaggcctctccctgggcacctgcccccctcttgggcgccaacacctgcgatcacacaccccctccacaacacccgtggacccatggcacaatcatccggtgggtgtacatccccgtcacactcccactgcggctacacgcgtgccgcccacccatctccaacctcgatactatgggaactcccgctcaccacgacctctccaacccccaactagctcccaccacctccgccgcacaacgacctctccccctcaacccgtcccctatcctctgcgaataccttaccacatacacttccacaatctatcctggactctcattcttcagccctcttctactcctctccatccgaacacgccactcacttccgctccatagagac

SEQ ID NO: 323008 - DNA, 1106 bp, Homo Sapiens; identical to SEQ ID NO: 155066
  misc_feature (45)..(135): n is a, c, g, or t
  misc_feature (144)..(152): n is a, c, g, or t
  misc_feature (184)..(192): n is a, c, g, or t

SEQ ID NO: 323009 - DNA, 778 bp, Homo Sapiens
  misc_feature (497)..(497): n is a, c, g, or t
  misc_feature (667)..(667): n is a, c, g, or t
acaggcagtggcagctgcagccgttcagcagtcaacgtcccagcaggcaacacagggaacctcaggccaggcaccacagctcttccactcacagactctcacaactgcacccttgccgggcaccactccactgtatccctcccccatgactcccatgacccccatcactcctgccacgccagcttcggagagttctgggattgtaccgcagctgcaaaatattgtatccacagtgaatcttggttgtaaacttgacctaaagaccattgcacttcgtgcccgaaacgccgaatataatcccaagcggtttgctgcggtaatcatgaggataagagagccacgaaccacggcactgattttcagttctgggaaaatggtgtgcacaggagccaagagtgaagaacagtccagactggcagcaagaaaatatgctagagttgtacagaagttgggttttccagctaagttcttggacttcaagattcagaatatggtgngggagctgtgatgtgaagtttcctataaggttagaagggcttgtgctcacccaccaacaatttagtagttatgagccagagttatttcctggttttatctacagaatgatcaaacccagaattgttctccttatttttgtttctggaaaagttgtattaacaggtgctanagtcagagcagaaatttatgaagcatttgaaaacatctaccctattctaaagggattcaggaagacgacgtaatggctctcatgtacccttgcctcccccaccccccttcc

SEQ ID NO: 323010 - DNA, 862 bp, Homo Sapiens
  misc_feature (550)..(562): n is a, c, g, or t
ttttaaacacttttataaactgcatttattgtacagagtactctgaagaaagaaaaaaatatgtacagccattcattttcattaacacatatattctgtcctgcaatactggagaggtggaatgtgtctggcacagaaataacccctaggagttataaattagaaaaacaacacttttaaaaaagatttttacttttctggtagaaatataaaaactgtggttcatggggaaaaacattaaaattaaaaagtccaatcaattatagaggtggctttaacacttaaagttttctccctcaaaccaacttgtcaacagcagtgtttaaaatctacatataaataaatgggcagcgctgcccagatagcagcacggtatgagcaactcacagtcacgctgcgcggtgttctcagtgcacaaataatgccccttcccggcatcccgcggtgggcacttacagaagggcatcacctggtgccacaccctgcaactcaacatccatcttctcacaacaccaccatttaaaggtaccaaaacaaactgatttgtttnnnnnnnnnnnnngaagggggtgggggaggcaagggtacatgagagccattacgtcgtcttcctgaatccctttagaatagggtagatgttttcaaatgcttcataaatttctgctctgactttagcacctaagaagacaagttggagtagagatgagagactgaaatggcacttcttaacatattaagatggtaaaattcttaccttaaagctgcaagcacaattctcaccatacccagtcagattaaggcacaggcatgaaaacattaatagtggaatcccttgtcacaatcttatttttgtttataaaac

SEQ ID NO: 323011 - DNA, 1000 bp, Homo Sapiens
ggagaataagtccctcagaattccctggtgcttcctgggtgggggggacaggactcccttaggccctgcttaaaggggcagcagatgtcatgagccaagattagtgggtagagaagacaatggggacagccgatcattcagaagacacccggtttgatcaggagcgggggaaatatctgaaggcttcttcgaaatttcacggcatgtgcttttattaacctggctgtttacaggagctgaagctcttgggtttgcggtgatgactcttgaacttctttttcaacgagcccacttgcttcttcccgcgcttctggaccagccctcggtacacggtcgtctctctcctgctctcatcagtggccttctctcttgggggctttgccttctcatcctctttgtctgtcaaaaagtcatcagtgccatccccatcctccgtgcttccaaggtcctttctggtgaatagctcaggtgggtacaggtctgtcatgctgtcatcacttgcagctcccccctcatcactggatgtgggctcccagaaggcttcccgcgggcgaggcccgtcaccgtccatctggtcctccctcctcctcctccggtgcaccaggcaggcaggcacgtactccaccccttgcttctgacattcttcatatttacacagagctcgctggtaccgccggccctgggtgtgcctcagcacgtgttctgggcacttgttgatgtgccgcagggtgagtttgcagaacaactggtgcgggttcttggtgctgggcacgatgtgcggctcgaactctgcatagtcgaaggccggggaggcgcggaccagccgctggtactttttgccgcgggtgtagacctggagctccggcaggcggcagggcagctcgtgacctgtcaggatgcacctcaccttgcgggcgtccgtctggagccgcaggctcgggtgctcccgcagaaacgcccgcacgtcgcccggcaactcgctcatggccgacgcgccccc

SEQ ID NO: 323012 - DNA, 1040 bp, Homo Sapiens
ttttttcgccctctccctggggaatatgggaccagcgcggaattttctgggcttggttccaccaaaagttttcctggtaaagtaaatttaagtttccaggaggcagataccgttccttccacttgggcccattcggaccttcttgggaactgttattaagaaagttgccgggttccctccaaagggttcactgtattttcggacccacatgatttaaaccaaggtctagctcatagaaagtaagtgtctgctgggtattagctgctgcttcccctgttggatcattgtctgtttcctcataatccatttccagacaagcaaacattggattttcaattcggacatttactccaacttccatgatccactaaaggtgtttgctttgtgggcttccagggggagatgaaattgtaagtcgggctgcagcatctctgttcaaaatatacaccaatttctgtttctcaatggcactaatcataacggctcgccctttgggatccacagctaagaactggccaggaacgatgcgacggcatccactcttgccaaaggtttcttggtgaatcttctcaaacatattcttagatggctggtattccaaaataacaattcgaccagagtcactgccaactacaatgtagtctttggtgccacctgtcagcctaaaggccatgagtgaccggataacaccgaatacttccacagtgagtagggtatgtactttgccagtgttggggtctgggcgaagcagctccaagatcttcccacgggaaacaacaatttcttgttgtttggttccagaaaagtttccatgaatggcaaagctgatgccagtggctctctgcaaggttaagttgtacagaaacatggctgcaggaaacctgagccacccagacctccaggccttggttacaccaacagtacggagtccaagaaagcctgcagcgagaaggatggtgtggatatccaacggatgctacctcccttcaaaacttaagccaccaccagctccaacatactggcgtccgccattagacccc

SEQ ID NO: 323013 - DNA, 958 bp, Homo Sapiens
gtttattaacccttttggttagttgagccacgcccccccaggggccttcgcggggggttccggttccccggtgaacgcaacggtttaacctggcttcgggacttagccccaggcgcctggggaaaagcccggagcccgagggcggggcccccggagcctttccggcgggctgtgggcggaaaacccaaaacttccgatgggaccaagccttccgtggcttcacacgcaccggaagggaatctgggtcagccctccctccaaaggagacagcacggatcctctttttgcataggcctgagggaagtacttccgcccatattcaagatggctgcccagggcagtgggaacgggtggagtttcgggatgtggagcgaaggtcactgggagggggcggagcttcccctgcccaagttccgatcccaccaggactggaagactcgcgtccagctggagctttgccgcatctgcgttgctgtgcccgcgctcttcgggcgaggaagtcccttcttaaaggagtccacaaactcgtcactcatcctccggagctcgcggccatagcgctgtgctgcccagaggttggggggcgccgagcgcgagcggccccgaaaggggctgggctcctcccccatcccttcgtcgtcctccgtccccgcggggtaggagctgtggcgactccggatctccacagccccagcgcctccatgatggctgctgctggttggctgctcctgctggtgactggcgtcccacaggaggcctggggcctggcgatgatgcttgccggagcctgagggcccgtcccctgcggggctggggcccaggcccctctctgcagagctggagtcttcctgctcactcggctcaaactctgggatctggaacatgctctgggcccaagcccgatctcgaggcgcctgacccgggcctgccgcctccctccagcaccccgggctccggg

SEQ ID NO: 323014 - DNA, 392 bp, Homo Sapiens
  misc_feature (34)..(34): n is a, c, g, or t
  misc_feature (56)..(56): n is a, c, g, or t
  misc_feature (146)..(146): n is a, c, g, or t
  misc_feature (205)..(269): n is a, c, g, or t
  misc_feature (280)..(280): n is a, c, g, or t
  misc_feature (335)..(335): n is a, c, g, or t
  misc_feature (371)..(371): n is a, c, g, or t
tttggcacagacgcgggctttattaacatttggnagtgagcacggcccccagggantcgcgggggttcgggtcccggtgacgcaacggttaaacctggctcgcgacttagccaggccttgggggaaagcccggagcctgagggcgnggccacggagccacttccggcggctgtgggcggaaaacccaaaacttccgatgggaccnnnnnnnnnnnnnnnnnnnnnnnnnnnnnnnnnnnnnnnnnnnnnnnnnnnnnnnnnnnnnnnnncacggatcctntttttgcataggcctgagggaagtacttccgcccatattcaagatgggctgcccngggcattggggaacgggtgggagttttcgggatttnggagcgaaggtcacttgggaa

SEQ ID NO: 323015 - DNA, 1755 bp, Homo Sapiens
  misc_feature (72)..(83): n is a, c, g, or t
aactgaagaattcttttatttagtgggaaagaagtaggtaaatgacagacagctcatattctgttaaacagnnnnnnnnnnnngaatacaaacatcacagtgatgaattttcacaaagctaacagatttgaactacagagcaatggaatatttataagcaagatgtcatggtattaatgaccaaattgcatctaactgggttttctaagctcaaaaacatttaaaatctcagacttaaaatttaaatctagacatgacaattgtaagcataccactcagtcatttaaaactattcagtgagtgctactcttcctgcataaatatttttttcctaacattattttttctcccaagatttagaatgtcacatctcatgttcctactagtaatcacacacaggattaaaagcccaaccaagaaagtattctttttataatatgttcttaaaagaagaaagaaaaattaaatgtgaacattttgtacaatagttgctgaagaacagtaaaaccaattccgaaatatcatgtgtactatacagaaaggcatggctcatggaaccaagtattcaacactacagcatttgaatatcagtctttaaaggttggtaatattacatcctgtacacagctctgtgtctctctacctggctagcgcatgcccaggatctgtctgcttttcagttggtaatttttctcaatatctgacagggcttgagcccgcagctgggcagcgtgaagccttttcttcaggtccttgcacttggacttagatgtgagctgactctcagaattctcactcctcatgatgttctctttactttccccactgaaatgaactttcttcttaattactgaggatggaagattaagaagttctggattacttgccagagacaggaacttccgttcctttagcaagctgtagttcttcaacagattttctgctctagccagtttgtcctctgctagtctctcacgaacacaaagctcctgttctttctgctccaatctttcttctcttgctttgagagctcgctctcgctcctgtaactgaatttccttcagtttcagctcactcaatacagggctggaatcctgcgatttttctggctctcctaattgtcgccctcttctctcaagatttcttctttgctcgtctgcaaccaaatctgctattaaagggttctcaagaatttcttcaacagaaggtcgatggtaatcctttaagtttaacatcctcgtaataatttcattcaattcatcagagtaacggtatggaattcgcctgaatttgccttctctgattttcccagcgagttctttctggctaaaagctgtaaatggaggcattaatgcacataactcatacagcaagcagcccaatgaccagatatctgatttctcattgtaggacatgcgattcatttgttcaggagacatgtaataaggtgtgccaacaaatgtttttgcaaaactcgtgtcatggtttaatattctagctagcccaaagtctccaagcttgacgttttgcttgccatccaggaaaacattggctggtttcagatcccgatgcaatacggtatgaccaccatcacttcgtctgtggcattccttcagggccagagtcaactgagtcatcactcgaagaacaaactcttcatctaagtattgcctttccttggttccctttgtaattacactagccagatcccctccttcacaatattccattacaatgtacagtgttgtatggtcc

SEQ ID NO: 323016 - DNA, 1050 bp, Homo Sapiens
  misc_feature (159)..(159): n is a, c, g, or t
  misc_feature (161)..(161): n is a, c, g, or t
  misc_feature (277)..(277): n is a, c, g, or t
  misc_feature (381)..(381): n is a, c, g, or t
atgaccattttccaatttgagagccaaaaggatgaaggtgcttcaaagtatgggcattccggtctcacttaaagaacagaatttcaaaacttttctgccaaaagaaaaaagtcccctccattttcttgggtgtgctccagggaccttccatattctttntnagatttggaggccaccgccccattgagggagctggctgcagtgtcagcgtgagaaggagggaggaactccaggcccagggggcggggtactccagatcccactggcctcaaggacncttcagatgggagtcagtgtgggagcacagagcctggcagctcgggaggcctgggtggaggggaaaagaacagtgctgctctaagaccccagcccccctcgtgnggggagagagcagcagggcttggctctcagctgcatggcaggtgtggaaaagctccttgtgacggggtggctctcatggcctctcccagggcctccagcgttgttagcatctctaccagctcctcttgttgcctggagagtctggaggatgtctcttctttcagttcttgaacgagggtggtaaatttctccatcagcatctcgttggtgctattcaccttcttgtaggcatctacaaagccgggggtgttgaaagactttttctgtaccctgacatcttttaaagatgcctcagtctctacaatctgttttcttgccaatgagctgggatttctccttcacctgtgaatgcagtgtttctgcaagctgcctttcacctcttacacagagttggttcctaacagacaaagtcaataaaagtaagagacccagcagtaagcccatgaagtgtggacacaccactgtcttcccatcgaggctgtggaaagtgacttgaggactcgcgtcatggggtggcagccccaccatctcctcatccagcttccctggagtcagctcagggtccagctccacagaagatcgcagcccctccatggcaccacagccaccacagggctccgcccagtaaccgtggatcccacagccacaacagacaccagagaacaccct

SEQ ID NO: 323017 - DNA, 1028 bp, Homo Sapiens
  misc_feature (995)..(995): n is a, c, g, or t
ggactctgggactctgggacttgtgggactgtggccgttttcgcaatttgggctggacgaaaaagacggtcttgctttcccggtcgccgctgtcgggaagggctgcagggtgtccgcgagacccgcggcccggcgagctgaccccgcctcgcctttcctgcctagccctcattccacggagccggtcgcgcccggtccttgcgcgacgcttcccggcccaggccgcctggtctggcgctggaggccggagtcccgcggcctgtgctggatccgcgcacacccagtggcggcggatgggcggccggggcggccggggcggccggtcctgagcgcggcccgggctgtcagggctggctgctggcgggatggacaccctggaggaggtgacttgggccaatgggagcacagcgctacccccacccctggcaccaaacatcagtgtgcctcatcgctgcctgctgctgctctacgaagacattggcacctccagggtccggtactgggacctcttgctgctcatccccaatgtgctcttcctcatcttcctgctctggaagcttccatctgctcgggcgaagatccgcatcacctccagccccatttttatcaccttctacatcctggtgtttgtggtggcgctggtgggcattgcccgggccgtggtatccatgacggtgagcacctcgaacgctgcaactgttgctgataagatcctgtgggagatcacccgcttcttcctgctgggcatccgagctgagtgtgatcatcctggggcctggccctttggcccacctggagaagtaagtccagcagtcaagcggggtgctgggccatcaccaccagagcttggcccctgggcctactcctggccccccaggggaaacctgggaagatccttgtaccccctgaaggccccatctcctcaaccggaagggaccttttaattttcttaatggcccataggggggggcccgcccaagtttcttggtgttggncaaagacaacctgggctttctctgctttcccgg

SEQ ID NO: 323018 - DNA, 1029 bp, Homo Sapiens
gtgtgggtgttcgtgttgtcggtcgggttgttgtgttgtctttcttggtttgtttttgggtggctgttgtgggtgttgttagtatgtgctcttcgtcatgttttcggtccttgctgccactggtgcatcggcggtgcgctgctcagtaccgctaggctatcgagcgcgtctggttccgtgacttgcggtcgacggtcctcagggaacagtgagcctcccaggtctgagtcagccctagtctggcggctcctaggggcgcatggggctctttcctgtgcctaggtccccccgggccgtcccactgaatgtgcagtgagtggcaagaagcgctggtcccctggccgcatgtccctcctgctgccggtgggcggcccgctacacagccgtctcgggtcctccgctggatcatctggtagtgctgccggttctccaggtaggcggccagctcggtgtcctgagccttctcagcccgctgccggggagtgtcgtcctgctggtctgtcttcatgagcgaggccccggcctccacgatgtagtggcagatggtgcgctggcccagggccgctgcttggtgcaaacaggtctccccgttttcctccaccgcatcaaggatctctgggggggcgtggtccagcaggtagcggaccacatccttgctgccagtgctgactgcgtggtgcaggagcgtgcgactctgctcgtctcggtgcatgaggtcgcccccagctcggtgcagctcctggagctaacagaagtcgttcctcttggcagcctcaatcagctcttcaccttgagggggtgcagcatccccttgcagtgaccggggcgtgggtgagcagggtgaggtggggagaggggaagtgggggttgggaggtcaggccgggccgatgcccccagcagctcagggtccaggatataaatctcatcctgtgcgatctcagtcacatagttgagcggacgcgtgggtcgacgatatcccgaggattccgggccgtacagcctgcttataaccggcttaagttacaagc

SEQ ID NO: 323019 - DNA, 485 bp, Homo Sapiens
taattaccagttgattctgatttgtgaagacctttgcagactgcagcgggcttggcaatgtctttccgctctgtctcctggaattgggtgtctgggatgacggacttcgtggagatggattctcagccttccgtttggctgccatggccaacaaccagtttttattctctggggaactattctctttgcctaccatttcagacccttctccacaaggtctcaaaggaagaggtagcgttccacagctttctgaagcatacggactgataggagacggaggctctgagatactggtaccagctccttcaattttgcttgatttggtaggacctagagagtccttactaaggtcttcctggttaccagcaaggcagcacagatccaaatgaagattttcaacttggccatcaagctcagtcacacagttacaactcttcacacacttttgtttcacactctccagacagcttgagtctagcctcctc

SEQ ID NO: 323020 - DNA, 271 bp, Homo Sapiens
atgaaaaagctttataaaaataagctttaagaaacctcatttcttctatttaaaaaaaagcctctttcagtgcaagtggggtgccaaggatgtagaataaataagagggggccaggatcagtgcacagggaggaagcgctcacggacgctccgctccagcccgggcatcctggccacgcgcagcgcctgcagcagccgcaccagcagcgccccgtcctgcgcccccaggagctccgtgagccgccgacgcagcttcagctgcaaggccgcg

SEQ ID NO: 323021 - DNA, 983 bp, Homo Sapiens
  misc_feature (41)..(41): n is a, c, g, or t
  misc_feature (120)..(120): n is a, c, g, or t
  misc_feature (143)..(143): n is a, c, g, or t
gctgctccagctccgcgagttcagcctttaagggcctccancggcacagtctgtgatcctctgctcttgctgcagggcctcggcgtgctgcctgttctcgctgtgccacatctgcagctncattctgcatggcatccacgtcnttcctggatgtagtccatgatcttccccagggggaagtgcgctcttgcacaggggtctggatggacgtgcggagcttctctatctccttggaaacgatgtccttctccttcttccatgccgactcaaagagagatcgctccttctccccaggtttgggtgactgctgcaatttctcataatctttcttcgtctccaaaatttttttcacaagtccaccatgcttctcctcttcttctagttccactgctgttaccatttcaatttctgacatttcagagagctgaggggcagcttccaccacaaattgatcatcctcttcattgtcagaattgtgtgactctgtaatcacatttgaaacggttttaccactccctgacctatccatttgtagcgcctccatgctgtcttgccgtttgacccggggaggggctggtcttgcactcccaggccgaggaattcttctgatgttggatgaaagctcattaggaatttctggagtctctggcacctcagacttatcttggccagcaggtccagcatctccttctgcatcactggtggagtcacctaaagaaaaagcacatcagaaaattagctttcgtgtagtcaacctcaatacattaaatgatgagaacagaattggagaaaaaacacactgtacataattttggatgtctgctaagaaaaaaagatcatttcctcatagccgcttttctaatgtccctattgccattttgttttattttcaaagatagaaaaacaaagagcaaacaaactgtgcatcataaaatggtactaaatagaaacaggacacagggatgtggagaaagcacatcgga

SEQ ID NO: 323022 - DNA, 996 bp, Homo Sapiens
agtcttttagcggcacccatactcgtggggagaacctccccgtgtttttttgcttgcaacatttctcttctttcttgttcctcgctcatttttgtatgctcctgaaaagacgcatgcagtgccttgtgggggggatcctttttccccttagccttttttcacccataggctccgggatttgttgggaataattatttttcctattttttcttctaggtgcacatggctcagcagtccttgtgtccattcccctggttcaaccacctcagagccgaatttagttgtcataatttccggccttttctgtagctggtgtggaaggaggtgccttccagccagggtgccattttagtgttagcggacttattcgccgtcctggcccatgcggggtcagtggggcgggcgcagcaattgtgctcaccttcacggtttcttccttgttccacacatccagcagaaccacatcgaagtagagggtggcatccggtggaatgagccccgccaggccgatgctcccatagcccaggtggggagtcacaatgaggcgtcgcctctcgttgacacacatgcccatgaggcctcggttcatgccagtgatgaggcgccccacacccaccacgatgtccaccaaggtgttgcgatcatagcttgaatcaatcttcttgccatcttcaaaagtgccgttgtagtggtagcgcacaaaatcccccatttgcacttcccggggacaggccctggggatgtggtacctctcgatgaccacatcttccagggggcccccggccgggctggcgcggcccagccccctccccacggcctgcaccaccagtagcagcaactgcagcagggggagccggaggaggctgtggctgggggggcccgcggggaacatggtgcctggagttgggaccgccggcagtgagggcgagcgagggagtcgccaccaacctccttccccccgcctcccagaactggctccccctcttcctgtcctct

SEQ ID NO: 323023 - DNA, 878 bp, Homo Sapiens
ccccaaaagaaagggaacaacaaggacacacttccttcaactaatatgaaaaaacccctggcctcaacaaaccttcctggcggttccgtaacatggccgtctgtaaacagctgccatgtttggtggtggaacttctttcccttttaacaagcatttctgtggactttctgtacattcacaggcacattttcccaggatttaggggttgatttctggggcaggttcttttacatacacactggcatgtgttttcatcaaattctcggttggccccacattggctggggaagagtttgtttttacagacacactggcatgagtttctgtctagttctttgtggggtccacagctggcagccgaagccccctctgcagacacactgacaggtctcttcatccagctccttgtttggtccacagatgtcatggaatccatctgttgagtcatctccagcatccgaggaaaacataaaatcttcctgagccaggcatctgcagatgtgattattccacatgtaattggtggggcaggtcttgttcgctgcctgacactgtggtagtgttgctggcagggaacgtctaataatggaatgaacttgtctgtaaacatccagtttagacatgcatcggcaggaagtgtgattggcaaaactgattgttactggtttggggccttgagagagaggcactgtaatttcaaataacgtcttgctgaggtagctcgtgctggtgttcatgcactgcagcccctcactattgcagcaacccccacatctgtagacggacacacatggaggtttaaagaaggtgtttgtcgcgactccaaactccttccccacatctatacacacctcccgtggcatgcattgagtctttct

SEQ ID NO: 323024 - DNA, 980 bp, Homo Sapiens
  misc_feature (97)..(97): n is a, c, g, or t
ttaaagggggatgcctgcttcgccttctgtggcttttgtttggaaaagggagttggattggaggatttagatttgaggtcatgatgtcagagcacanccagaaacttcccaaggcttgttgctgaagatgcccacgctgtcaaagtaggtggtgggggagacagcgagggcagttcagacaccaggcactcccttgtctggtagagaggaggaggggaaatggagctattccaggatacaagggatggcactgagggatgcataagtcccctgcctcccttgtctcaacatgttctcctctgccagcccagtcagcttggggagctaggtatcagaaacctgtaggattcagcccgcgtttgtcctactagtgtctagtatagtctctgtcctgagatcctggggctcctcctatttcgtagaagggatgaggtgccatcaaaaataacttggctggtgttacaggtttagagaaggaagtcacacctgtagcctggattggcaggcagggtggacatgaggcctgagaagggaagccagagtgtcagaacatgactaggctagcatgcctgcttctagactttcaggacccaatgtacacatacacatgtgtatcatgtatgtatatgcatggacactcaagcacaggaggggttatgtgctctgatctttgataccagagaagggaggtaaagccttatggaggtccctcccccaccctaataggttgctaccctcaattgccatctgcccaccaaggcccctgcccagtgctaggcagatagccaagtggtaggggtgacatgactccactaaagcagcagcccaaggaagtgagggaggggacagaggctgaccctcctcaaagccccttgttgtagtagaccacttcaacgctggggttttgctcatggatctgagctctcagctctggttccaggttgcttatgtgtatggagctcttctgggggaatagggca

SEQ ID NO: 323025 - DNA, 1307 bp, Homo Sapiens
  misc_feature (303)..(361): n is a, c, g, or t
ggggggggagaagaggcgcgtgtgtagtggcgcaaaggggagtttttgttgaaaaaggaaaattggggggctcaccaccttctctcttatgggcggggcggccgcccaccaaaagcgtttaaaaaatattcttagtggcggggggagcccgcgacgccacgaagtttattttgtttggtttgatgttcttggcgtggagtttatgcgtgtcatttttgccttttagagttttgtgtattactatttttagtctttcatgtctgtcttgcaggggtttacttctagacctttatttctctgtgnnnnnnnnnnnnnnnnnnnnnnnnnnnnnnnnnnnnnnnnnnnnnnnnnnnnnnnnnnnccaatgatggggaggacgggaggtggagaagtaaatgggggaggggttcccattacagcagcaggatccagtgacccgggatgctcacatctctccctgacgtgggcggagtagccccttcctcccaaggtcactgtcctgtccaaccccgtgctcccctagcccgttgggaggtggacagtgagacatcttcccaggctggggagaggaggaaccgtgctgggggaaggggcctggggtcagaccatgcacagggagtgacagccaaaggccccccagtgtctccccaaagagggacttgtgggggttggagggtggacaccagaggccagtgtttgctcctcttccagcatcaggcgagagacagaacagtcagagcctcctgggcaaagtatttgacgtccacatcctggtcctgggtcagcttctctaggatgggcttgacttcactctgcaaggtgctgttgtccaggatgggccctatcttctgcagagacttggccacattgaagcggacattggcaaccgggtccccagccatgcgcagaaccgtgggtagcatgtgcttggtggtgatgtcctgcccacagacctcagacagcacattgatgcagaagagcgtagtcatgcggtgcaggtagttggggtctccggacatggccaagaccttggggatgattgtggcatgggcccactccttcccaaacttttccactagcttcttcaggttgctggtggctgcctcgcggatggcatatacatgatccacaagccaggccatgcacaaggagttaagtttctcatcaaagaactccactcccagctgtccagccaggaggggcatgtactcaatgatggccagccgcacccgccacttggcgtcctcagccagctccacaatggcagggagcagggactgggacagctgccggatgccaatcacctc

SEQ ID NO: 323026 - DNA, 916 bp, Homo Sapiens
tgcctttactggggccatgtggctgagctttgtgcccagtgccaggggacaggaacagaagacgggatccctatccctgtgaaggggctgcctgctctccctcctttccagggtcctttcaaggatcttggcgggggatgggaggttggtgcagggagcactaaaggtcctagcagccattcataagtccatctatgtctccagccccacatggtatcagccgcttccctcatcctcataggcgatggcaatccctcgtcttccactcacagcttctgtcactggcgtctgacccaggcggggctccagcccttgccagctccgggaactaaggaatgaggctgcaggactgctctcagccagctccagctggggccgtggggtcagagccaagcttccatgatcatttgatgacttccaggcaggtgggggtcggagatctccagtaatgagtgacacgtctggggtttcccacagctctgactcaggtggtgggagagccacgtggaagggagagccaggcaataagtccgcataatgtgtgaggtggggagccaggcctggaggtggccaggcagggttgcaggcagcttccagctcacatggtgccagtataggctggaagaagctaccagaaagctggggggctagagcacccagaggacaggctaatagcacaaagacatccacctcagggaagttggcaagcttggcaggggtgggccgccccagggccaacacatagctacgcttgccagcagcctgagtcaggttccgcaagtgggccagtgcctcacggtgttgggctacacccagtgtgcctgccagcagccctaccacgcgggcatctctggccctctctaccagatatcgtcttcgtgcccttagccgtccagcccgggcaccctcatcctga

SEQ ID NO: 323027 - DNA, 1215 bp, Homo Sapiens
  misc_feature (817)..(1063): n is a, c, g, or t
  misc_feature (1072)..(1106): n is a, c, g, or t
gggcaagatgggcaggcgccgttggctcctcctctccagcgacatcggtggtcaccgggctagcggctagttagccgcccgcgccttttcgcgttacatttttcgcggttaggctacataactaggaatgcccaggggcaagtatcaggttgtctgtacacgggaaaaacgccggattttgtttgccatgatttatgtcgactgtagtcatacccccccaatcgatgcgggcgaggggtccacccaccgtcggggaggggctggggttgggttgggcctgccaagggagatttttttctgcatcagtgcaggcgagaggctggggaagggggttcctcttggcagactggccgggggcaggacttgaagaccttgaagcatggccgtgagaccccatgggtgctccatcctggctgccgtccatcgagacaccatggccgccttcgggcacccagcggcattccgtaccagcgaggggactggctcacatcctggggaagggctccaggggcagcaggcgtcctacagcaacagcatcctgggggtgaacgggtggggaggggtggcagccttggggtgtccaaagttgtggtcagcgagtgcaggaaatgatgaaggaaaagtttctttttggcccaaccgttgtgaatggtgctgtgaaaatgtcttgcctgggagaggtgttccagggggagttggggggtgaggggacaagacaattgtggccgctgccggacccctccataaggcacagatttgacgggtcccctctcataaaaggccactccaggctgggtgcggtggctgacacctattnnnnnnnnnnnnnnnnnnnnnnnnnnnnnnnnnnnnnnnnnnnnnnnnnnnnnnnnnnnnnnnnnnnnnnnnnnnnnnnnnnnnnnnnnnnnnnnnnnnnnnnnnnnnnnnnnnnnnnnnnnnnnnnnnnnnnnnnnnnnnnnnnnnnnnnnnnnnnnnnnnnnnnnnnnnnnnnnnnnnnnnnnnnnnnnnnnnnnnnnnnnnnnnnnnnnnnnnnnnnnnnnnnnnnnnnnnnnnnnnnnnnnnntctgtctcnnnnnnnnnnnnnnnnnnnnnnnnnnnnnnnnnnngcctctcctgcagggctccggctgctgggaaaccggctctctgccggtttgctgggtttggggagcggctgtgctcccgacctggcgtggatccccgactctgaactca

SEQ ID NO: 323028 - DNA, 1142 bp, Homo Sapiens
ttttgatggttcaacaagtgtttattgagcagccacatctgccaggtcttgggatagccagtccctgtgctcatgggcttagatcctggcagaggcctagtggagaggcttggggtgggggtcggggcatggaaggctgtgctattggccagggactcagaacacaggagagtgcaagggtgacagaagtttctttcttgggcaaagaggcctggaatggtggcttgaatctcagccatgccttagccttcccctctcagccagagaagacccaggtctccctgcccagaggtccatgcatagccattcattcgttgattcattccttaacgcaagaattaatggagtgctactctgtgcagggcctgtaagagcatgggctggaggaggcagctcaggggccgggcaggggtgttggctgcaaggttacaagagaagggtagcactctcagaggcctgcttgacgggcgcctgggactgggctgatggggggcctttctggggcacagggtggtgggaatgtaattggagaggcttccagaggcacttggacttgagaggcctccatggagcctctgacagagtccccagggggaacacctgctccaagagtctgggctctgctttcccctgcccccaccacggaagacatgtcaagctgggaagccatggaggagaaggggagggcaaaaaagttgttgagccactgggataaatgggaggagccccggagggagcggctgcgggatcgcacagcccctcgtatccggtggggtgggctgatgcccctttgcagctgggcaggatgttcctgggcattggcaggatggttgaggggccctgtgatggcaggagtgctggcttggaccacatggggagaccaagtccgaataggggcccgatgcaattgagggtgcaagcggagggcatggcgaaggcggatggctctctgtgctctgtacaacaggtagcggatcccgcggtggacggcagggcgctcctggtgatcaggaggctcgctgtgaggctcagcatcgggggtggcagcctgctcagcgggctggtggggaggccaagctggggggtggtatgtgccacagggcaggctggaggctcctgtgctctcagcagagactggactg

SEQ ID NO: 323029 - DNA, 1398 bp, Homo Sapiens
  misc_feature (130)..(130): n is a, c, g, or t
  misc_feature (1287)..(1309): n is a, c, g, or t
ggtggcgtgttcttggggggaatttattgtgtggcgttcttgtttagtgtctctttcttctttggtgctaggggcgctctggggatgtttgtatgccggtggggggtgtcttccctttggagagacttangagtgtggcctgctcccgggggcttgggtgtcgccgtgtatccgccttcgatgttgtgtcatggaggtctgggggactgctctcaagggtgcaggcgggtccctgtgcgggtcggcgcgttttcctcctgtgtgttgctgtccgggggctttgtccaggggctgtgttttccaaacccattttgttcccaggttgtccgccctttctttcttgttgccgacacaggcctcgctccatggtagccgggggaggtccggtggcactttcccggttggaccggaggaccggagtttctccccccttttttcgccagggaggcagacactggtggcccttggatggagcggcttgtgcatggaggcgcaggaggtccgctcgctccacatcggataaaatggtggtgaaaacagatcttcgccagaagattctggaaggacatccgaatgccatcgactttgattgagctcatgctcaagtccccagactccagcaacttagcaaaggcgtcactgtagcagggagtggtgatcaagtaggagctgcagctgaagtgcagcctgaagtccagcttctcgtgggtcgcaccctcgtcattcttggcaatgaaggacagggtccccttgagcttctgcgccatgacgatgctctggatggtgaacacatactgggcttcgttggagacgcctgggggcagctggaaaggcacggggacgccatcgtggacagaggagccctgcggccgggccatcctggcattgagtgagtccagcacgctgagctccatgcccttgaggatgctgctgctcctgttctccagcacgatggccacagtgacctggctgtcctcctgcagactgccccggatgtcacaggtcattttaacataggaattttcagcgaggagggagtagctggactcaggcgggagctgctcctcctctggcgcgccattctgcaccggctcccccgctgcctcctcgctgcctggaggctgcttcttggacttcttcttgcctttggtccgctcctccttctccttcctgtgcttcttcttcttaggcttgggagatttcttgtcctggtcttgcccctcggcatcgtcctcctcgccctgcgcctccgtcttggcgtcctcacactcgtccgtggatggaacnnnnnnnnnnnnnnnnnnnnnnncaggcggtggggtggtagacagccagaagtccaggtcctcagccttcttctccttctccttcttctcctcgtgccgaattcgccaccca

SEQ ID NO: 323030 - DNA, 1021 bp, Homo Sapiens
gagttgaccagagggttacacagccagccctttccttttggtccggggtcccatgcaatctacacctgggtcgcaaagtcttctgcagcccacagttttgcacacgtggggcacagaacggcattgggtgcatgcctgtcgggctggggccacactggggaaggggcctcatggcaacatgcactggaagctcctcgtggcggaccatcctcaggccgccgacaggaatgggaagaaaaagaagtcgaaggcgaacttcacggcgccatgcacggtgctgcgccagtcgtgctcgatcttcacgtgccgcctggtgggcgagagctgggccatgcagttgaggcagctgatggccttgagctcgaagacaggccacttgctgcccaggcggccctccaggatggtgctgaactcgatgaggctgccctggcgcaggctgagcagcacgcttttgaactcgctgctggcccgcagcacgatgtccttggtgacgtcgtcctcctcgcggctgcgcgagccgtcagcgccgctgctgaatggcatgcccacggtaatctcaaacttgtagcggtcgaacttcttgatgtggcaggggtgcttggccagcagcttaaggcgacagagctcctcctcggccgtggaggtgttgccagggctgcaggcagggtaggcctcgccgtagaggcagcgcatccagtcgccgatgaagaacgggagcatgttgatggcagactcggcgctgttgtcgatgtcagtcacgcggacgtacttgaagcggccggtccacgtgaccctgtggccctccaggtggctgcagaggatctgggtgcgcgccatgttggtctccttccaggcgcgtggcccgcacagcgcaccatactgctgccaggtcagtgtggagttgtagaccttcatgccctctgagcggtacacatagaaccagcagaacagcacgatggccgtgagccacaccaggatgagcttgaccatggagcctcgtgccgaattcgccactcaggcc

SEQ ID NO: 323031 - DNA, 1114 bp, Homo Sapiens
  misc_feature (623)..(623): n is a, c, g, or t
  misc_feature (625)..(625): n is a, c, g, or t
  misc_feature (668)..(730): n is a, c, g, or t
  misc_feature (828)..(881): n is a, c, g, or t
  misc_feature (910)..(921): n is a, c, g, or t
  misc_feature (957)..(966): n is a, c, g, or t
  misc_feature (990)..(1074): n is a, c, g, or t
ccgtttcttcgtggatggggactggtccgtgctcagtaccccatgggagagcctgtacagcttggccgggaacccagtggaccccctggcccaggtgactcagctattccgggaacatctcttagagcgagcactgaactgtgtgacccagcccaaccccagccctgggtcagctgatggggacaaggaattctcggatgccctcgggtacctgcagctgctgaacagctgttctgatgctgcgggggctcctgcctacagcttctccatcagttccagcatggccaccaccaccggcgtagacccggtggccaagtggtgggcctctctgacagctgtggtgatccactggctgcggcgggatgaggaggcggctgagcggctgtgcccgctggtggagcacctgccccgggtgctgcaggagtctgagagacccctgcccagggcagctctgcactccttcaaggctgcccgggccctgctgggctgtgccaaggcagagtctggtccagccagcctgaccatctgtgagaaggccagtgggtacctgcaggacagcctggctaccacaccagccagcagctccattgacaaggccgtgcagctgttcctgtgtgacctgncntttcttgtggtgcgcaaccagccctgttggcggccagccaacnnnnnnnnnnnnnnnnnnnnnnnnnnnnnnnnnnnnnnnnnnnnnnnnnnnnnnnnnnnnnnnagggctttcccgcccccttttgaaccttgccttgggcctttcccaaaccggggaaccctggaaaacccaccccctttaaaaagcccgggccttttggnnnnnnnnnnnnnnnnnnnnnnnnnnnnnnnnnnnnnnnnnnnnnnnnnnnnnnaaattgtcctaataaagggcgggggtctnnnnnnnnnnnnaaccattttgcgagaggggccccccaccgggggctnnnnnnnnnnaacccctccttaaaaaataaaacnnnnnnnnnnnnnnnnnnnnnnnnnnnnnnnnnnnnnnnnnnnnnnnnnnnnnnnnnnnnnnnnnnnnnnnnnnnnnnnnnnnnnaaatctttttttaaaaaacactctcctctacccaaaaaaa

SEQ ID NO: 323032 - DNA, 1035 bp, Homo Sapiens
  misc_feature (14)..(14): n is a, c, g, or t
ttcgagggccgtcnaggcgagagcatcccccagggcgacggctttttcccccacgcgggtggtccccgtggcgggaggtttggggccatgggaaattttccgggggagaccgtgggccaagccgagagttttcaaatcgccgggcccgggttttgggggggagaagggccccttcgctcttcctggataggtcaggcccacccggggcctgccccctgtcgcccggccccccattaaagccccccgttagagcctttcaccggccacactttgtttctctggagaactgggggcagggaatcggggaactggcctgatggaaggcgggggtcggggggacaatgttgtttttttaaaaagcatctaccaacatcacactactgggtctgatgtcccctttaaccaacgcttgatacaggttacagcataaataaaaactcaaggaaaataaatacatcggctcctatgaggttggaagtggtgtggacgcagggtgtggatgggccggcagggaggcgggcgggcggggtgcttacacatggcgggcaggcgggtgggcgaccgaggagcagacctggcaggaggcgcctgtggagttgagagtcttaagtgtcctcgtgcatgtctgggctgtcggtccgcgccaccttgcggggaggtgcggagctctcgccttccagctccacttgctcctggtctctcttcttggcagcgttctttttgtcccattgctgatgcaggtagcgcaggaggatgtttgtcttttctgtcacgatgatctgttcagacgggtactcgcgggtaggcaggtagactgagggccgtcggttcgaggctttgcacacggagtccgcgtgaaatcgactaaaattgcttttgttgtagacaggcagtcctttcaaaaaatctgccatcttctgtttcctccgtcgccgcctcggccgccgcctcagcctccaccgccgccaccagagccgccttcttagccgccgcctcacagtaacttcccctcgtgccgaattcgccacccaggcc

SEQ ID NO: 323033 - DNA, 928 bp, Homo Sapiens
ttcgaattccgccttggtttatttgggatcgttcccaagattttttgtgttggaaatttcctggccccgttgttggtttttttccgaagattgtgggcctttcccttttcgagggcctttaggtttccgtttattggaaaatgggggagaacctgtcccccatccttcttcttccccctgggaatcaaagggtagtactccctttccctgagaaagaaaagtcagcttttggatgagtcacgcctcccatctttcaccttcccgctggggcccagacacccaacccagacactgacctgtcagtcccctcttgactctaaccttgctccctcttgctgcagctggggaacaagggccgcctcacctctccgcagggggcagcttggtgaagaagccacgcctggagcccacgctggacttcaggggcatctgcccgactcgctggcccagggcccagaagtgaatgtagacatactgatccaaatttactgtcacctggacctcatcctgagggtggtggaccaccagcgcgtaggccagggtgtcctcagacagcggggagaagttggcctgggccagcaggggctccagagcccgaagcacctcctgctcattagacagacgctggggatccgttagtgatggctgatcgagggtctccctgtattaggaggcggagcagctgctccttggagaagggaatgaagcgctcgcggtactgctgggcccagtcgcggggctccctggggttccacatcttgcgatactcccccattttggctgccagcgatgagagggcccgggggggcccgaggagcgcgggcaacagtggccatactcggaccctggacccccagaccccccgggtcacatgcagcatggctagaccctttccccggagccttagccaaagctcgactgtcattga

SEQ ID NO: 323034 - DNA, 1357 bp, Homo Sapiens
  misc_feature (443)..(902): n is a, c, g, or t
  misc_feature (910)..(910): n is a, c, g, or t
  misc_feature (919)..(921): n is a, c, g, or t
  misc_feature (923)..(924): n is a, c, g, or t
  misc_feature (926)..(926): n is a, c, g, or t
  misc_feature (928)..(930): n is a, c, g, or t
  misc_feature (934)..(943): n is a, c, g, or t
cgaagtgcatggctgcctgtgactcctcatttgcgcccctccagagctggatatcgatacacgttgtccgggcgtgatactgcggccgttaggactcagatacgcccggctcaccgggcgtcgcctggagccctgcgccacacatatctctcttagaatgtcggctccactcggggatccgcaacggcggcgtcccttccactcgccccggcggctcgcgcgagcgcagccgctctcgcaccctgccgtgacatactttcgtctctcagctgagggagcccaagagtacagggcagagtctcgcgagcgggagaggacgggtagtttaccatatctcaccggtactttgccctacgtggaccttacgtgtggcccacggcgttcgcccaattcgcccggcgcacatctcccctctacactccatccgccttctcactcactannnnnnnnnnnnnnnnnnnnnnnnnnnnnnnnnnnnnnnnnnnnnnnnnnnnnnnnnnnnnnnnnnnnnnnnnnnnnnnnnnnnnnnnnnnnnnnnnnnnnnnnnnnnnnnnnnnnnnnnnnnnnnnnnnnnnnnnnnnnnnnnnnnnnnnnnnnnnnnnnnnnnnnnnnnnnnnnnnnnnnnnnnnnnnnnnnnnnnnnnnnnnnnnnnnnnnnnnnnnnnnnnnnnnnnnnnnnnnnnnnnnnnnnnnnnnnnnnnnnnnnnnnnnnnnnnnnnnnnnnnnnnnnnnnnnnnnnnnnnnnnnnnnnnnnnnnnnnnnnnnnnnnnnnnnnnnnnnnnnnnnnnnnnnnnnnnnnnnnnnnnnnnnnnnnnnnnnnnnnnnnnnnnnnnnnnnnnnnnnnnnnnnnnnnnnnnnnnnnnnnnnnnnnnnnnnnnnnnnnnnnnnnnnnnnnnnnnnnnncatatccnataaataannnannanannnacannnnnnnnnnccaccctcctctttccctggggctggggcactgacgccagaatcctctgggtggcccaggttgggggtggagtgggcagagccactggcctgggcccggagcttgccaatctcagcttgtacttctcgaagcttccgcttgtatcgctgggcgtccccttttagctggtggttgtggttttgaagactactaatcaggtggcgcatctcacggttgatgggccccgcctgctcgttggccgccagattctgctcaaactcgatgcgcagcatctcatactccttgcgtacctgggccagcgtgtcctccagctgaatgacctctgtgcgtagcttcttctgcagccccagctcgtcgctctccatgtgctcgatgtgtcgcaggtgggagttctttgtggccagcagcaggccc

SEQ ID NO: 323035 - DNA, 1051 bp, Homo Sapiens
  misc_feature (498)..(498): n is a, c, g, or t
tttccaagaataaagtcgtttattattttcagagcggcgggagtagggctggggaccctagggccgctccagtgggacttccctgaacccggttgtagaggatgatggcgcctttgccgaggggcagagttcagcccacatctccgtctcgggcaatctccgcacgttctgtgtctccacaaagaagattcctgtagactcgtgggcctcgggtcccccactcaggtagtgcttcctcacctgctcagaagtcaggctgcactggacatagaactcggcactggctcggccagcactggtctcatttcgggcgatgccaaacagcaggggctggctcagggtgagcagcggcaggttcacctcatcacagatctcctgaaggacactggaaaagagttcatgtaccaccagctgcccagcgaggtccctggtgttgggggttgccaccagggcacagggcttgaggctcagggtgcccaccaggtacgtccaccagcncaggggcctcagccacctgccgggagcggcgcaggaagacaaggaagtcatcggctgtggctagtgcagcgcccacccccagtgggtccgccagataggcctgcgtgtcaccccagtcggtggacaccctgctgtcgcagccaggcagctgagctggaccagttggtgcccaggaagtctcggtaggaagtaaggcccaggcgcaggagcagctgtggcccccgagagccaataggcgccagggtggctgagtgcaggcggaacttgggggcgtcgaagagccagggttgggcctttagccgggtctcccagatggcagtgatggcctcgtccccacctggcagtgggcgacggtcatgggcggggctcagctcggcctgtatctgctcctggggcaggcccccgccagggcactgcagcagcaaggtcacctcaggatccatggtctgaacggggcagctcatccagaggtcttgggttcaggcgccccaaatgcccatgtcccccaaacccaggggtctgcctccgacccggggcgcgcggggaccccttt

SEQ ID NO: 323036 - DNA, 968 bp, Homo Sapiens
cagaacagcggggaataagagctcggggccccctaaggccccccccaaggggggactttcccggaacccccgtttttaagaggaagaaggcccccttttgccggagggggcagaagtttaagcccccatttccgttttttgggcaatttccgccacttttggtgtctccccaaagaaagattcctgtagactggtgggccttggggttccccactccaggtagtgtttcctcacctgctcagaagtcaggttgccctggacatagaactcggcatggctcgggcagcactggtctcattcgggggatgcccaacagcaggggctggctcagggtgagcagcggcaggttcacctggggctcaggggtgcccaaccaggtaggttccccaggccaggggcctcagccccctgccgggagcggcgcaggaagacaaggaagtcctcggctctgggtagtgcagcgcccacccccagtgggtccgccagataggcctgcgtgtcaccccagtcggtggcaccctgctgtcgcagccaggcagctgagctggaccagttggtgcccaggaagtctcggtaggaagtaaggcccaggcgcaggagcagctgtggcccccgagagccaataggcgccagggtggctgagtgcaggcggaacttgggggcgtcgaagagccagggttgggcctttagccgggtctcccagatggcagtgatggcctcgtccccacctggcagtgggcgacggtcatgggcggggctcagctcggcctgtatctgctcctggggcaggcccccgccagggcactgcagcagcaaggtcacctcaggatccatggtctgaacggggcagctcatccagaggtcttgggttcaggcgccccaaatgcccatgtcccccaaacccaggggtctgcctccgacccggggcgcgcggggaccccttccgcccacccaggcctcgcttcctt

SEQ ID NO: 323037 - DNA, 1146 bp, Homo Sapiens
  misc_feature (146)..(146): n is a, c, g, or t
aggaggacttgaagggatggtggagttttgttctccggaaggggggctcccagtccctggtgccccagttctgacacctgcccctcctgagttcaccactggagttccttgcagtcctggaaaccacaaggcccttgcctgaaccntggggtcaggagagaaacacttggggaggggaaaggacggcgtgggctacccatgacgggctctgagttcttcctggggcttgtgtctttccttggcagaagagggcacagccaaggcaaggaggggctgaaggctgcggggccatcccggcctgccagagccatgcccctgactcctcagcttcaaaatcaggggtctcaggacagaggatgctgggtgggctcagagctcatcaggggggctgtgtgtgagaggggatgccttctggatgccctcatcctcctcggggctggggtctccctcaaggccacccagctccttcctttgtttgctgctgctactcctgccgcctgctgccttggccctgctgctcttcttcttggacttcttccctcccagggcagctgtgtctcccttcttgccggaccactgctctgccaggcaactggtgtcttttcccttcagcacgtggttggcgcagaggaattcagtcaggtcttcctcctggtggttcctgtaccagtcctcgatcacctcctcaaactcttccaccagcacatcacactgcttcttgaggtcagccacctctgcagaagtctcgttccacagctcataggggatgtccatcaccaccttgacccctttgtgtaccaggttgtgtaatgtctcaaaggtctctgacatgcccttggcaaatcgattgctgccggtcctctccttgtgcaggctataatccaggagcctcttgcaaatggtctcagtgacttcgattaaccgcaagtccgacttggtgtatttgactccagaggccttctggtccaggatgccagtagcccgtgccaatcacctccttggtcttgccggtttcctcaaaggctgacttcagctccacagcaacatatttacacacgggaccagatctctcgtccgccgcagcgtcccggcgcaagccttcgcatttgctgggcaggcgaacccagtcgttctccggacgcgtgg

SEQ ID NO: 323038 - DNA, 1678 bp, Homo Sapiens
tgtcccctcctggcggacgtgaaattacctgtgccccgggggtcccgcttgtgttggcccggccgaagcgggcgcagggtctccccacggggttatcagcatgggccccggttcccttcctcagaaggaaaccgggggcccccgggggtggcagaacccattgcagggccgggcggccctgagcccctttgttccaggcagggcctggcgggcactggctcaggaagaaagggtgtcagaaaaatgcaaggccccgtgggagactggttttcacttttcaatgcagccgcccacatagatctcgggccagcgtcgccacagaccagggcatccccctgcacactctgccaggttcagggcactcagcgccaggttggtggcagtgaggtgcccgcctgtgtgcttccccatggtgtgcagctggtgcagcttatggtagaccagggctgcgtctcgggcgctggcgctagcatccactcgcagagcacagtcctgctgcaggccccctgcccggcctgccagccagcggcccacccagagacgctgcagcaggtgacggatgaggttccagaggaggctacaagccaggtccaggtgggaggtgggcaggggccggcccagtgcccgcagggccagccacagctgctgggcagcctgggcaaagtctccccgggccaggtccaggtcagcctgcttgcgatgcctccagaagtacacggcggggcctgagtggggccgtgtgactggctcaccgtagacaaagagaagcaccaaggagacgagcaccaacagcccattgagcagccagaccactgggggcagcagccactgggcccagccagggccatctctgctctcggtgcccagcacgttgcgcccagggctatggtagacgctggtggtatctgaggggctgggaagcccccgggcccccagcaaggaggccaaggggttgcaggacaggcagaggaagacgagcgtgcacagggccaggcgggagcggtccagcatgccccggctgtgcagagacggccgctgctctggctttgccttgctgtcctcaaagactgggctgtcaggctccgagtcactgccactgccaccgctgccactgcccctgctgccaagggacaaggggctgctctggaaaggtgagccagcatccgaggggggtggggtcagtgtgtcctccacctcagtcttcacgccctccatgagcacgtctgtgttccctccactgccacaggccgacaccagatccttcagagatttgcttttgtggacagcagtgcgcagacttaggttctcctgcttgagtttctggttgctgtgttgcagaaagcgaatgtagtcgatggccttgcgcaagacagcagatttattcagctttgcctcagtgcccaccaccagatccttgagctcaatgattttgtcattgatggaggagcggtagcgcttctcaatggcgttgtgggctgtgcgcttctctccacggctctgggcagaggccggggccttgctgccagctgcgagccggttgataggcagcttctccgcatctacgaccagtgggactgttgccaagatggttccgccactcaccagggtcggcaaaggccctgtctgcacagtggtccagagaccaggggaccctcgtgccgaattcgccacccaggcc

SEQ ID NO: 323039 - DNA, 1009 bp, Homo Sapiens
cgctcatagcgcacagattgttgatccagcaggagaagccagtactagtgcatagagtgggcgcggggagggggatgtcccatctgggtattatcctgggcctggggcggggagtcttccttcagcaggtgatcctccgggatctccaggggcacccggcgcacctgcatgccctgcagaaccacaggcctcggctgcagcaggttcaggccgcctgtagcctcagggacatcagccgagtggaagctggaggaatgcgagtgtcggtcccaggctccattagctgtctgctccccttgctgccctacagggttctcgtagccgcctccagccaggccaaaggtgtaggaacgccgcaccccgctctcatcgtagaaatagtgcacagcaccctcagaagtgtcatcaaagggtgcaggcttcatgcacattggcaccggcccgggtgagcaacagtgaagaggcgaaatgcagcgcagagggcagcgtcagcgcccgggagtgggaggcagcccggccccgctgagcttcctgcaggctgggcggcgagcccatgacagaggctggaggggtggggttgctgcctgcattgtggcgtctccgaatggcctgggtccgcctcacactgcttgagcggtcccgcctgccagtctcctcggccgctccccccacagcaccttcctcctgcagctccccccgccagccgggctggttggcagcgggtccccttcgcgcctcagcaggcagcacaacaggctcactagcagcctgctccaccccaacctgggcctccagctctgccttgcagccagccagtgggggcctcagaacatcacccccagccccatccatgctcagcacacgggcatgtgttttagcgctggcggtactaggcgtccgctgggtcccatatggccgcttggggggcacagcagttccctcctcagccccatggggggccctccgcttccggggtccccgtgagcaccccggcagctctcagatcccg

SEQ ID NO: 323040 - DNA, 917 bp, Homo Sapiens
tttgtatagtttcgtcggttgctgtgtttttagctatccgtgtgtggtatgccgaggcgccggctggcgactatttggaaactcataccaggaaagtctttacactgccaggggaattcggttgctgggcggtctagatgttgtctcaaagaccgcaattccagcgcaatacagggcaaaagcggggcaaatccatccaggaacatggggcaggggccagtccgggctccccagacctcgggggtctgcatacgcaggtgctgtcagtgtcctccagctggttggcgagctcccgggcaaacagtacattagccagcttagtgtcagcatatgcccgcagctcctgccgccagcccaccactgggcggtccaggcgtttgaagtcaagacgtccccgacagtgggcagctgaggctaccaccaccacgcggctaggggcacatccttcaggcaaggcagcagcagatgtgtcagcagaaagggaccgatatggttcacccgaagcagcaggttaaacgcctcacgggtccggccacaggaactgataccggcattgtggatgaggatgtccaaccgtggctcagagctcagaaaggcagtggcaaaggcccgcaccgcggccagactggccaagtccaaggccatgaagatgacctcattgttcccactctcctggcggaggtcgaaggcagccgcctccccgcgctcctggctgcggcaggccagcaccacgcgcgctccccggcgcgccagctccagcgccgtcatctttccgatgccgctgttggcgcccgtgaccacggccgtgcggccccgcaggttgcccatgccgccgcacggcggggccttcaccaggttgtagtagacaagcacgtaagcgcccagcagcaaccccgcgcccagcagcagcgatcccg

SEQ ID NO: 323041 - DNA, 920 bp, Homo Sapiens
  misc_feature (415)..(472): n is a, c, g, or t
gctttaaaaatgtttattcagcgcctgcaatgtagaaggcactgtgtttggcaccatgaggaatacagaaaccaacaaggcatgattcttgccttaggaagctcacagtctagcgtgggaaattagaaattgcacatgcacacaggtaactgtcacaccaggcaggaagcactaaatgctgtgagattgataccaacattataagaacccagaggaagaaaacactatttggggatgaggataagagattagagaagttcccttagaagtagggggtttaaacatgacagatcaaatgtagataggaaaaaattcagaggaaaatgtaatcggggaaggctctaattaaaaccagaagcaggaggtacttctgtgatgtgatggaggcaggagaagccccgctgggctgattcannnnnnnnnnnnnnnnnnnnnnnnnnnnnnnnnnnnnnnnnnnnnnnnnnnnnnnnnnaggggaggctggaaagatgtgtggggatcaagacgggaaggtgagtatgtgagtatgtgtgccagacaatggtgtttccatgtcaatggaggtttctcagagagaggtgatctggctggagaaagcttaatctggtggcaatggacaggtgactttaagaagtggggaacgagggaaggaggccagtttgaaaatgataacaagggtccagactcagtgatgcagcagtgaccatgagaacagagcagctgcaggtagaagatggagacagaactggggagatctggtggaggtaagccgggtggaaagatgatgtcaggtttatacctagagacacatgatccattcacaaagccagggaaacctaaagagaaaacacttagaatttgaggagaagaggctagggctgggcctgagacatgggctggcctccaggtggaggggtcca

SEQ ID NO: 323042 - DNA, 914 bp, Homo Sapiens
  misc_feature (155)..(238): n is a, c, g, or t
gggtttaaaacatgacaggattcaaatgtagattgggaaaaaatttcagagggaaaaatgtaatcgggggaaggctttaatttaaaaccagaagccaggagggtacttctgtgatgtgatggaggcaggagaagcccccgctgggctggattcannnnnnnnnnnnnnnnnnnnnnnnnnnnnnnnnnnnnnnnnnnnnnnnnnnnnnnnnnnnnnnnnnnnnnnnnnnnnnnnnnnnatcaagacgggaaggtgaagtatgtgagtatgtgtgcccagacaatggtgtttcccatgtcaatggaggtttcctcagagagaggtgatctggctggagaaagcttaatctggtggcaatggacaggtgactttaagaagtggggaacgagggaaggaggccagtttgaaaatgataacaagggtccagactcagtgatgcagcagtgaccatgagaacagagcagctgcaggtagaagatggagacagaactggggagatctggtggaggtaagccgggtggaaagatgatgtcaggtttatacctagagacacatgatccattcacaaagccagggaaacctaaagagaaaacacttagaatttgaggagaagaggctagggctggcctccaggtggaggggtccagcaggcaggtacaagccggatgagagttcagggcagagggcagagccggaaacagaccaaaagctgccatggagtggcgagggtggaagcagcggcacaggccgagggccatctcgccggggaagggtgggtacagcacaaccctgtggccacgttttcctcacacaggaaattcccacagaacacccaggagggtgacgatgcctcccatgaacaatgccgtgtgtctctgttgtccttttcccgggaatccggaccggtccagcct

SEQ ID NO: 323043 - DNA, 862 bp, Homo Sapiens; identical to SEQ ID NO: 155071

SEQ ID NO: 323044 - DNA, 1139 bp, Homo Sapiens
  misc_feature (28)..(28): n is a, c, g, or t
  misc_feature (192)..(192): n is a, c, g, or t
  misc_feature (954)..(995): n is a, c, g, or t
ttctgtccctggcctggttcatgtactncctggaaccaggttttaaaactctccccagctggtgcggggctcgattaactacctgtgaagcgcaaagcaggtctccacagcgcatgcagtagtaaattagcgcccacacaggatggccttccacctctccatcctgtagtccaggcaagggagctggcagtntaatgttcaggaaacttcgaaccaattgtaagtcccaggcaccccgcccagctgggcctgatgcaaatttccaaagacagtcacaagggtgtaattcttataactctgctcaaggtacgccaaggcctgcttgacaaacttccatgcgcacttccacgctgctgcgtttcttcagggcatccgttgccggtgtcaacaacacgtctgtcatttgttttaccatggtccacatgtcggaaatgctcttatcatccagctctgcgacggaagcacaaaggtccaccaggttaggctgcaggtgtccatttacaattttctcattatagatataaatttgccgcgcataggccatctcgatgttatccagagagcttcgaccagggggtcccacatcactgatgtagcttggctcgctttcttgagtaaagtcaagggcgtcttctcctgatgccagcagtgtgtgcagaattcgctgtttcacttgctcccactcaaccaacattgactcccgatggtactcctcagccatgccgaaggtcctcttccgggactcttcgatggcagacagcagggcattgtccttctcattcttcaggaagccctgcagctcttaaatttaaggagttacagaacggtcgatgctgtcgatcactgcagctcttccaaaccttcttatatgagatgagctctgtcggaaccagtgctcaagtttttcccaccccaaactgcctgaattgagggatgggggtggggagaaggacnnnnnnnnnnnnnnnnnnnnnnnnnnnnnnnnnnnnnnnnnncaacccctctgcaagtgctgatgtgactgaagcactaaagagtcaaattaaacaatgagattgcagggtccctttaaaaagggtgcactgcagcccccggagcacagcatcaccattcgttgtgcgctacacaaattcagagaa

SEQ ID NO: 323045 - DNA, 1002 bp, Homo Sapiens
  misc_feature (25)..(25): n is a, c, g, or t
  misc_feature (33)..(33): n is a, c, g, or t
  misc_feature (96)..(96): n is a, c, g, or t
  misc_feature (124)..(124): n is a, c, g, or t
aatttccccaaaaaagttgtctttnatgaaacnggttctttcaatcgttttccaaaaacccaagaattcccttgggttgtccccttagggcttggngggttgggaagaaaaaaagacaaaggcnattgtccaaagtccctggccccaggcaacatccttggagaccctcgggctgaggttaggggcaagggcaacactgatgactccacgtcctcgtccaaggcctcagaggagccctgcccaggacctcagtgctttggaggaggtggtgagagcaggccaggctgaggggcctgccttggaaggcgagggtctgagggttggggctgtaaagacagccctttcatcaggaagctggagctgaaaagccctaatacccctaatccccaaactcttggatcccgtcccacagacgagagtccctgctcggcatcctccagcacaggtgctctgggtgggtcccatgcccaggcactagagaaggaaagggttggttgtgccagtggcctgggctgctgatgggggtatacccacactgcccaccatgttcatcattgcagggcccagtggtgtcagagaggaaccagtggcccccagagctggctgtggggccgcggaggtcatcgaggccacagccatggactccactcctgggccaggcccaaaggatgtgctggtccccaggactgggctcccccgaagctggttcagtgtcagcggctggggctggttcacctggaaagggttaacaggggccgaggtggcgggagcacctggggagacagaaggaggggcagaggctgagccgtcagggtgtggctttctgagctcccaggtcagggactgcatgcgggtgttctggtccctgctgtgccctcagagcccgtgacagtgccggccgagtccatggcagacactagcaaatatctgctgactgcatgaatctgcactttaaggatgaggagattgaggctgtgagaagcccaagtgatttgtccatcc

SEQ ID NO: 323046 - DNA, 1545 bp, Homo Sapiens
  misc_feature (1180)..(1180): n is a, c, g, or t
  misc_feature (1309)..(1309): n is a, c, g, or t
cccgtttttttgttccccgcccccctgccctcgtcccccgctctcgaaaacccagcctgtggtggcgaattcggcacgagggttggagcctgcagagccaggccaggcatggggccgccagtccccccgacgtctggaggactcaagcaatggagagcggcgagcatgctgggcttggggtcccagttcccccaagcctggggaagcccagaatgggaggagaaggtcccgcatggacgaagccacatggtacctggattcagatgactcatcccccttaggatctccttccacacccccagcactcaatggtaaccccccgcggcctagcctggagcccgaggagcccaagaggcctgtccccgcagagcgcggtagcagctctgggacgcccaatctgatccagcgggcgctgctgcgcggcaccgccctgctcgcctcgctgggccttggccgcgacctgcagccgccgggaggcccaggacgcgagcgcggggagtccccgacaacaccccccacgccaacgcccgcgccctgcccgaccgagccgcccccttccccgctcatctgcttctcgctcaagacgcccgactccccgcccactcctgcacccctgttgctggacctgggtatccctgtgggccagcggtcagtcaagagccccggacgtgagggaggagccccgcggaggcactgtctcacccccaccggggacatcacgctctgctcctggcgccccaggcaccccacgttcaccacccctgggactcatcagccgagctccgccctcgccccttcgcagccggattgatccctgcagctttgtgtccaggtgagccaaggaagttctccccctgcggaaccaccccacgcgtgcacaccggcgaagcgagctgggacccttggctccgcgcgacctcacaccccccgtgctcgggaaccccccccagccctagcctgaatcccgctctccacgtttggcccccccctatcttagcttctccattacaccaagagggggaaggaaagtgttgaaatagacacccaaggggcgccctaaacaccgccgaaccaccttgccaccacccaatccgtataccacagctctagtgccccccctgagcaaaagagctcgccgttatacaaatatatctctctctattaggagctcggtttgacngccgccgccgtctcccgaggtgttgagccgtcgaccgctagcacaccaacggaaatcctacgattcatacgcaccgcccgtcaacatcgaccgataaattattccgcagaaaaatctgaaaaatatgantacttctcgagatggctcagcaccggcacaactgagtccacgtgcaccatgccgctcgacgtcgaccacgtggacccttaatcgacgccccttctctccccgctttctcttccatcgatgtaactccatcggctgcgacagatgctctagtcttgatagcgaaatccttcgtagggccacccagagcgacttgccacgcccctactcatattttgtccccacccactaaccccgcg

SEQ ID NO: 323047 - DNA, 1554 bp, Homo Sapiens
gccagatccgttgaaaggagtgcagagaggtctcattgcgctcccgaacagacctgacgtagatcctgaagtggcccgcgccatctcaactatgaggggacacccgtaggcggcgggagagggacgccgcgaggagccaataaagctccgcaaccggaagtgtcttctgggaggggtcgtacccggaagtgtggcacctcccgggccgctacccgtgaagtgtgatgccacctgccgctacggggaagtaatggtatccggccaattgagattctggagttaaaacagggatgtgcagatggaggtcggaggagacactgctgccccggcccccgggggcgcggaggacttggaggacacgcagttccccagtgaggaagctagagaaggtggaggggttcactgcggtccctgccggatcccgaatgactgatgggcctggaggaaacaggatccaatggacaaggaccagccacccagcccatcaccaccggcccagtcagaggccctgtcaagcacctctcggctctggagtcctgcagcccctgagaatagtcccacatgtagccctgagagtagctctggaggccagggcggggaccccagtgatgaggagtggcgcagccagcggaagcatgtgtttgtgctgagtgaggctggcaagcccatctactcgcggtatggtagtgtggaggcgctgtcggctaccatgggtgtaatgaccgccctggtgtcctttgtgcagagtgcgggagatgccatccgtgccatctacgctgaggaccacaagctggtgttcctacaacagggcccactgttgctcgtggccatgtcacggacttctcagtcagcagcccagctgcggggggagctgctagctgtgcacgcacagatcgtgagcacacttacacgtgcaagtgtcgcccgcatcttcgcacacaagcagaactatgacctccgccgcctgctggctggttcagagcgcacactggaccgacttctggacagtatggagcaggacccaggagccctgctcctgggtgccgtgcgctgtgtgccccttgcccgcccgctgcgagacgcactaggtgcgctcctccgacgttgcacagcgcctggcctggcgctgtcagtgctggcagtaggcggtcgacttataacagcagcccaggagcgggaatgtgctggccgagtgccggctggacccagctgacctgcagttgctgctcgactggggggggtggaaccagccctttgcggcgggttgaggctttgggcaccctggggtggcctgcccccgctttcaaccctgaatgggttttttcctaccccctacgtgggcccccgcctgggaaggccttggcctggtccggcctgcctgccgcccttggcacccccaacggggaaagcctttccatggccaagggcccggcccggcccggggcccccgggtcccaaaaaaaggggatttcgatggcccccctgggggcccagggccggggccccctttgggggaagggttcgccccgcccttttccctctaagggccccccc

SEQ ID NO: 323048 - DNA, 852 bp, Homo Sapiens
ggtgttggttttctcgaacacattggccgaatattggatcttcagttggaggacaacaaatgggcctgcaattgtgacttattgcagttaaaaacttggttggagaacatgcctccacagtctataattggtgatgttgtctgcaacagccctccattttttaaaggaagtatactcagtagactaaagaaggaatctatttgccctactccaccagtgtatgaagaacatgaggatccttcaggatcattacatctggcagcaacatcttcaataaatgatagtcgcatgtcaactaagaccacgtccattctaaaactacccaccaaagcaccaggtttgataccttatattacaaagccatccactcaacttccaggaccttactgccctattccttgtaactgcaaagtcctatccccatcaggacttctaatacattgtcaggagcgcaacattgaaagcttatcagatctgagacctcctccgcaaaatcctagaaagctcattctagcgggaaatattattcacagtttaatgaagtctgatctagtggaatatttcactttggaaatgcttcacttgggaaacaatcgtattgaagttcttgaaaaaggatcgtttatgaacctaacgagattacaaaaactctatctaaatggtaaccccctggaccaattaagtaaaggcatgttcccttggtctccataatcttgaatactttattcttgaatacaatgccattaagggaaatactgccaggaaaccctttaattccaatggcctaaaactttaaggcccgggattttaaaataaccaaccctccctctcaaagtttttacccccccccca

SEQ ID NO: 323049 - DNA, 1548 bp, Homo Sapiens
  misc_feature (17)..(17): n is a, c, g, or t
  misc_feature (43)..(43): n is a, c, g, or t
  misc_feature (46)..(47): n is a, c, g, or t
  misc_feature (51)..(51): n is a, c, g, or t
  misc_feature (78)..(78): n is a, c, g, or t
  misc_feature (84)..(84): n is a, c, g, or t
  misc_feature (93)..(93): n is a, c, g, or t
  misc_feature (111)..(112): n is a, c, g, or t
  misc_feature (141)..(141): n is a, c, g, or t
  misc_feature (156)..(156): n is a, c, g, or t
  misc_feature (166)..(166): n is a, c, g, or t
  misc_feature (198)..(199): n is a, c, g, or t
  misc_feature (241)..(241): n is a, c, g, or t
  misc_feature (260)..(260): n is a, c, g, or t
  misc_feature (271)..(271): n is a, c, g, or t
  misc_feature (273)..(273): n is a, c, g, or t
  misc_feature (280)..(280): n is a, c, g, or t
  misc_feature (310)..(310): n is a, c, g, or t
  misc_feature (328)..(328): n is a, c, g, or t
  misc_feature (331)..(331): n is a, c, g, or t
  misc_feature (372)..(372): n is a, c, g, or t
  misc_feature (374)..(374): n is a, c, g, or t
  misc_feature (379)..(379): n is a, c, g, or t
  misc_feature (394)..(395): n is a, c, g, or t
  misc_feature (398)..(410): n is a, c, g, or t
  misc_feature (412)..(412): n is a, c, g, or t
  misc_feature (414)..(414): n is a, c, g, or t
  misc_feature (425)..(425): n is a, c, g, or t
  misc_feature (431)..(431): n is a, c, g, or t
  misc_feature (433)..(433): n is a, c, g, or t
  misc_feature (445)..(445): n is a, c, g, or t
  misc_feature (455)..(455): n is a, c, g, or t
  misc_feature (463)..(463): n is a, c, g, or t
  misc_feature (465)..(465): n is a, c, g, or t
  misc_feature (470)..(470): n is a, c, g, or t
  misc_feature (474)..(474): n is a, c, g, or t
  misc_feature (481)..(481): n is a, c, g, or t
  misc_feature (490)..(490): n is a, c, g, or t
  misc_feature (494)..(495): n is a, c, g, or t
  misc_feature (503)..(504): n is a, c, g, or t
  misc_feature (508)..(508): n is a, c, g, or t
  misc_feature (520)..(521): n is a, c, g, or t
  misc_feature (525)..(525): n is a, c, g, or t
  misc_feature (528)..(529): n is a, c, g, or t
  misc_feature (545)..(547): n is a, c, g, or t
  misc_feature (551)..(608): n is a, c, g, or t
  misc_feature (627)..(662): n is a, c, g, or t
  misc_feature (1535)..(1535): n is a, c, g, or t
gcacccgcgggcgcccncccgggaagacggggggcggggcagnggnnccancggagcagggagaaagggccaaccganggaggngagggaacnggcgggcgagggcgggcnngcaaacacggggagcgcggggggggagcnccgccccgcaccgcngccaaaaganggggcgcccgggccagaccgcgggggcgaaannccagggagacaccacgagcgagaagcggggaaggacccccanacaaggaagggacagcacngcgggaaaggngnaaggcgnccaccccgcccaaaaaaaaccccaaggaancaacggccagaaaagggnaancaaaaaccagcagaaaaggcccaaaagccgcaaaccggcgnangcaanccgagacaccacaanngannnnnnnnnnnnncnanggaaacagagncccacncngacacccaggcnggaggccagnggcacaancncggcncacngcaaccnccacctcangagnncaaggaanncccngcctcggcctcnngagnagnngaggcaagagaaccannncaannnnnnnnnnnnnnnnnnnnnnnnnnnnnnnnnnnnnnnnnnnnnnnnnnnnnnnnnnaacaggtgagacgcgcctnnnnnnnnnnnnnnnnnnnnnnnnnnnnnnnnnnnntacccactcatgtttgagcaaacgaagaggtaaatatacacacattcctctacacagatctgtacacttgcaagcacattggctagagatacacaagtggtagaagtagtgaatgtaattaaaaagggtctacctggtcacttttatgggtaaaaatagtaagacccaaagatattattctgtgctaatattaaagaatctatagattaaaatttcattggcttcaagtaaaaaaggtcatatttgttttcaggcccgaatgtgtaaagcactaaaatgaagactgtagctctctaaatgccagctgaatactttcgggtggggtgtaagagaagaatttaaggcaatccagtagctaagatatttccaattaaagctttatctttcagagcatgttctatttctttctcttcaatcttgaaaaacacctttgtcaaacgggtttccttgtttctctttaatcctaaaatgcccctggcttccaagagccctgaaagtgacaaacactctgactggtccacagccgccacctgctgtttgcgacagactttactgtaggcttcatataacttccccagagtgacctctttgattttcaactgcctgatcaagagcatcaaagagcaaaccaagatcttctgctgaagagggaaggaatcttgtgctccttcttgggctcaaggtcatcctgttaccatcaatttctgaggatgacttggggatatgtggaataaggcccaaccctcttggggggaatcagaggggctcaggaggggtggattttaccattcaggacagtgggttttgagggaataggtctggggctttttggacatctggacttctaccattttccaataggctcttcctggncaaacatccagtg

SEQ ID NO: 323050 - DNA, 906 bp, Homo Sapiens
  misc_feature (751)..(751): n is a, c, g, or t
  misc_feature (846)..(846): n is a, c, g, or t
  misc_feature (862)..(862): n is a, c, g, or t
accaaattgtggcacctgggtgaaaaaccacgaccatgccgaccatcgcgagggggaccgtggcagcaagatggtctccgagatctacctgacacggctgctggccaccaagggcacactgcagaagttcgtggatgacctctttgagacagtgttcagcacagcccaccggggttcggccttgcccctggccatcaagtacatgttcgacttcctgggatgagcaggcgggaccagcgccagattcagcgaccccgatgtgcgccacacctgggaagagcaactgccttgccgctgcgtttttgggtgaatgtgatcaagaacccgcagtttcgtgtttcgacattccacaagaacagcttcacggatgcctgcctgtcggtggtagcccagaccttcatggactcctgctctacatccgagcaccgcctggggaaggactcgccctccaacaaactgctctacgccaaggacatccccaactacaagagctgggtggagaggtattatcgagacattgcaaagatggcatccatcagcgaccaggacatggatgcctacctggtggagcagtcccgcctccacgccagcgacttcagcgtcctgagtgcgctcaacgagctgtatttctatgtcaccaagtaccgccaggagattctcacggctctggaccgagatgcctcttgtcggaagcataagttgcggcagaaactggaacagatcatcagcctcgtgtccagcgacagctaanggtggtggaatccgttgaagaagggggcttctcagtcctgtgccgtcctcccatcccaggggagtggctggctcaagccctggtccccgggctgnagccctggattggggnatccgtgggggccagggtcaccctgggcccacgatgccccccgg

SEQ ID NO: 323051 - DNA, 1115 bp, Homo Sapiens
gatggctttgttcccgcgcactttcttggctggtacctgaagaccctgatgatccgagactggtggatgtgcatgatcatcagcgtgatgttcgagttcctggagtacagcctggagcaccagctgcccaacttcagcgagtgctggtgggatcactggatcatggacgtgctcgtctgcaacgggctgggcatctactgcggcatgaagacccttgagtggctgtccctgaagacgtacaagtggcagggcctctggaacattccgacctacaagggcaagatgaagaggatcgccttccagttcacgccgtacagctgggttcgcttcgagtggaagccggcctccagcctgcgtcgctggctggccgtgtgcggcatcatcctggtgttcctgttggcagaactgaacacgttctacctgaagtttgtgctgtggatgcccccggagcactacctggtcctcctgcggctcgtcttcttcgtgaacgtgggtggcgtggccatgcgtgagatctatgacttcatggatgacccgaagccccacaagaagctgggcccgcaggcctggctggtggcggccatcacggccacggagctgctcatcgtggtgaagtacgacccccacacgctcaccctgtccctgcccttctacatctcccagtgctggaccctcggctccgtcctggcgctcacctggaccgtctggcgcttcttcctgcgggacatcacattgaggtacaaggagacccggtgggcagaagtggcagaacaaggatgaccagggcagcaccgtcgggcaagggggaccagcacccactgggggctggacgaaagacctgctggggcctggggtggccgagggcgagggagcaccaactccaaactgacctgggccgtggctgcctcgtgagcctcccagagcccaggcctccgtggcctcctcctgtctcgtgtgggcgctcgtccacaaacactccgtggctgagaggcagcggatccaggcagcgatgctgagccacctcctccgagcttcctttcacacagaccaccccggaggacacgtggatgatggggtcagagatcactgagctgccctcaaggggggctgaaccg

SEQ ID NO: 323052 - DNA, 1265 bp, Homo Sapiens
tggtgtagaacatttatttatttttcccacaaatcactgaaagtttaggtcagtgggaaataattttaatcaaataattgtacatattcttcccacatatcctgccttgtattaggaaatgacattgtgatccatttcattacaagtaaaatattacaaaatatttgcaggagagtattaaaggtaactcaaacacaaaaggcgagatgaaataaactgttttttgtttctccagaaatctctactccagtgcccacagcacacaagagtcaaaacaaataagcaactaagatcccccgatcacaaatttccaaagaactggaggaggggaagaaacagggtgaaaatggtggtatgaaagggaatggatgttagcagcactgcttcaataactgatctattctggatgaaatacccttttttatgtgcagtaaattctgaacaaggctaaattttaggatattccttgaactgaaattagaaaataccctgacaatggaagcagctctttcatctaagtttaataagagcctctttcttccatgggccactgttgtgaacagaagccttttctggcatcaaaagctgtcacagtagcccttccatctctttcatgaaagcctcatagacatcatccttagtttgtactgagacaggaacagaaggaccagatttgggtgctgctttggcaagaggcacagcagaatcatcctctgactttctttggggagcagcagtagcccctttattctcccgacgtactctcagtgcagtgggcacaaatcgagtaatctctgccttgggattagtgatctgtggcttggcactgatggttgctgtggctttcttctcaatggtggctgcacttgtatcatccgccttgggtcgctgaatcaagttgggtggggcacttaaaaccccagggtttggcaagggagctggtgggaacagcccagggggggcaggtccaaggggaggcaccaaaggtgggcgcatcatgccaggacgaggtggaggaatacctggaggtgcagggggaggtagccttggtgggggtccacgaggagggggaccaggaggcagacctggaggtggacctgggggagggccagggggtcggcctggtggtggtcctggaggtaaaagtcggggtaagggccctcggagtcctggcattccaggtggtctcaggaatggaggagctcctggaggtggaccaggaggaaggccctcgtgccgaattcgccacccaggcctcgctacct

SEQ ID NO: 323053 - DNA, 1001 bp, Homo Sapiens
  misc_feature (785)..(872): n is a, c, g, or t
gacagcaggaagacgccagcggagaaataggcaatccgtacgcacgcgcccatcgggcggagaaggtttagtagttagggtgccactgcaatgcgggggcgagaagcaccggtggtgtgagcgggtgccctgttccacatgaagggccgtttgatcacccggcggagccggcggttggagtggcccggcccgtgaggttttgcggacgggcgcagggctttgcgccggcttcctccgggggccagctggtcgcattatgcccccctgcaggggcttccgccggcgggaagagcagccccagctgcagggcacgctccgccgcccggtgcccgatggtgttctccagggtgtctttcaaccagaaaggggcgatgatgcccagctgggtctcattgagtcctatgcagtacctggggttgtccgccaggatgcggtagtcacaggtcagggccaccaggcagcctccagcggggcaggctccgttgatggcggagaccagcaccaggttggactggtacaaccgcagccacagctcctgaacggccttccagtacccagcgtagtgggcggggctcctcccacacatctccgtcaggtccaggccggccgagaagacacccgggcggtccgaggtcagaatgacaccgcggaagctcttgtcattctccagcttctccaggctgatgaccagctccgtcagaaactccaggctcaggctgttcactggggggttcttgaatttcatcacagcgacccctgcgcccgcgtccggctccaccagcacnnnnnnnnnnnnnnnnnnnnnnnnnnnnnnnnnnnnnnnnnnnnnnnnnnnnnnnnnnnnnnnnnnnnnnnnnnnnnnnnnnnnnnnngcgaaggcagcgtgggggagcccgttagttcccggtcctggccccggccccggcccgatccctgcccaccccgggtttcgcacccgcgcggagcagaacgcgcctcgtgccgaattcgccacccaggcc

SEQ ID NO: 323054 - DNA, 1124 bp, Homo Sapiens
  misc_feature (815)..(831): n is a, c, g, or t
gggaagaaagctgacaatgaagagccaaagtgtcaaccagtgttttcctttgggaattcagagcaaaccaaagatgagaattcttcacagtccacatttagttttagtatgacaaaaccatctgagaaggaatctgaacagccagcaaaagccacttttgcctttggagctcaaactagtactacagctgatcaaggtgcagcagagccagtttttagtttcttgaacaacagttcctctagttcaagtacaccagccacttctgctggtggtgggcatatttggtagttccacctcttcctccaatccacctgtggcttacctttgtgtttgggacagttccagcaatcctgtgagcagctctgcctttggtaacactgctgaatccagcacctctcagtctttgctattttctcaagatagcaaactagcaaccacatccagcacaggtacagctgtcaccccatttgtctttggtccaggagccagcagtaataatactaccacctctggtttcggctttggagccacaaccacatctaactctgcaggatcctcctttgtatttggaactggaccctcagcaccatctgccagtccagcatttggtgctaaccagaccccaacatttgggacaaaggtcaaggtgcccagccagccccaatcccccccaggcttttgggatcctataatcaatcctttccacaagcaattaattttcccccaccggggatttccccaaacccctgggcaacccaaccctttacatttttttggggggaaaccgagcggggtcccaaggaccaaagttaagnnnnnnnnnnnnnnnnnttgggtggatttgtggggacacaagcaacacccctaaactcccagaggcctgggccattttttggggccttcttggggaaaacaagacttccccttaaattttctaaaaaattccgggccttttttccccagatttttggggcacaactcacgcccactaaacaaaaaatttttccaaaccttttcccgaaaaccaacaaagggtgccaatccaaggggaagtgggttcccactttttatgggtggcccaaatttcccaaaagcaacaccctgggacaacctttcagaaccct

SEQ ID NO: 323055 - DNA, 824 bp, Homo Sapiens
  misc_feature (51)..(51): n is a, c, g, or t
  misc_feature (188)..(188): n is a, c, g, or t
tatttctttttcctcccattcccccatgtttgattttggggtatagggggngagttggttagaaatgcatcaaaaatcttaaccaatcaccagccaagatgagctaggcttgggctttcggtgaagattgactgtgtctgtctgaatcaaatgatctgacctatcctcggtagcaagaactcttcganccgcttcctcaaaaggctggtgccacatttgtggcatcttttgcacttgtttcaaaataaggatagtcgccgttgtccctgcaccaagcttgggcttcttctgtagacacctgccgttcgcttatgtcaatcttgttacccagaatcacaaaaggaaagctctcaggctctttcacatctgcataatatatgaattctttcttccagttacttaagttctggaagctttgtgaatcatcgacactaaaagtaagcaggcagcagtcagaacctctgtaaaatggtgtcctcaggcttcggaatcgctccctgacctgccgtgtcccaaatctgcatggtaacaaaatgtccatccacttccaaatctttatttaaaaattccacacctattgtatggaagagctgggtatcaaacttattagttacatatctgttcataagtgaactcttcccaactccaccatctccaaggagaattactttaaaaagtgatgattttcctgccattgttaatctcaaaagcttcaagaaccctcgcggccacacgaaagacgacccgggagctctgggccggcccgtctgggcgcaatgaggacagagagagggtcggggacctgcacagcaggaggcagccgc

SEQ ID NO: 323056 - DNA, 1074 bp, Homo Sapiens
tggaccaacatattgactcccagcacgccaccgcgatgtccatcttggggaatccgttgctggaagggacccatctcgcccacccttaggggtcgaggtgggcgaagggggaggagagggctggcggggcggggcggggttgctccgcccccggaggctgggctgtgaccagcaggcggctccacagagcagcgggcgcgctcataaagggcacagccgagggtacgtggatcgcggtgcggagactgaggttagaaggcacaggtggcgagatgagccgggtaccagcgttcctgagcgcggccgaggtggaggaacacctccgcagctccagcctcctcatcccgcctctagagacggccctggccaacttctccagcggtcccgaaggaggggtcatgcagcccgtgcgcaccgtggtgccggtgaccaagcacaggggctacctgggggtcatgcccgcctacagtgctgcagaggatgcactgaccaccaagttggtcaccttctacgaggaccgcggcatcacctcggtcgtcccttcccaccaggctactgtgctactctttgagcccagcaatggcaccctgctggcggtcatggatggaaatgtcataactgcaaagagaacagctgcagtttctgccatttgccaccaagttttctgaaacctcccagcagtgaagtgctgtgcatccttggggctggggtccaggcctacagccattatgagatctttcacagagcagttctcctttaaggaggtgaggatatggaaccgcaccaaagaaaatgcagagaagtttgcagacacagtgcaaggagaggtacgggtctgttcttcggtccaggaggctgtggcaggtgcagatgtgatcatcacagtcaccctggcaacagagcccattttgtttggggaatgggtgaagccaagggctcacatcaatgggcctgttttgctgtctcttacctgttggagccagcagacctgactgggagagaactgggatgatgagcctcctggaagaaacctggggcttgtacgtgggattcccaaggaagggtggccccgaa

SEQ ID NO: 323057 - DNA, 1641 bp, Homo Sapiens
  misc_feature (21)..(21): n is a, c, g, or t
  misc_feature (29)..(29): n is a, c, g, or t
  misc_feature (73)..(73): n is a, c, g, or t
attaagggccccaaaaaaccnggttcaanccccaaccttcaaaaccccccttccaacaacgccaggaatgaancctccatggaaggttggatctgccccataagttgaaaggccctcgcctgaaaagagatctgggtcccttctgaaagaatgaaacaggtattcttcttcttgtgcctccactagcgctctgatgcagcaacgtgacatgttgagaaagggagctggctggcgcgggtgcccagggcggcctcaatgccacgcagcaggtcgttggtcttcaagatgagcagcatctggcgcggcacgtggttgaggagatggctgatctgggggaggtagttggccgcgttgttgcgaatctctaagtcctcagtggcagtgacgggagctttgctgatgcctctgttgaccgagtcccacgatcgcgccgtcagcatgcaggcaaacaaggggtagagatccccggctcccagtcgctggctgtactccttcactctcttcatgtcagtccagatcagagactgccagaggtggcagtaattcaggcggaattcttccgtgagcatctggtaaagcccatggtccaacaggacaatctccgcctttcccgtgccggggtgcttccgcaccagtacattgccggggtggggatcgcagtgcacgaagccattgacgaagatcatctcactatacatcttgcccaggtggcgtgagatctcattgacgtcgatcttgttcctctccatgtagtctctgtcattgacctgcccgccatccacaaactccatcaggaggacccgctccgtggacaggtcccagtggatttcgggggactttcaaggaagtccaaaatgcctgagcatctggggacaccttcttcagcatttcctcccttcattgaggaaatccagctccaaaggcaggttcttcttggcttcatccacaagcccacataaactcaaactctgggaacagctgcttcacagccagaacgagcacctccatcaggagaatgtccttcgagctctgagcccgcacctttgggtgctggaccttcacggccaccgtccgcccatcatgcagcactgccttgtggacctgggccagggaggccgtccccagaggggtgtcatcgaagctctggaacaaatcatggatctccttgcccagatcttctcggatgacctggcggatctcttgcatgctgctctgtggagcctggctgtgcagtaccttcagcgtgctggtgtactcctctggcaacaggtagtccagagcccccaggtgctggcccaccttgatgaaggtgccccggttggcacagcagagctcacagagacgcctggcagagcgaaggtgcaccttagatctcagctgcaagtactcctctgagccataagggacactcttcagggaagtgaggtagtcgtaactgatgacagccgtcgtagcaactgctctgcccaccctgacagcgccaaagtcattagggtccaagtacttgttactgtagaagtagatgccagaggcagcaagagccatgctggtccacgaagcaagcttgagagcctttctggccatgtcgccagatccccgagggaagcagagccgcggcgcccggcttccggccgcaacccg

SEQ ID NO: 323058 - DNA, 1065 bp, Homo Sapiens
  misc_feature (400)..(462): n is a, c, g, or t
gcttcacgtggggttgttggcattttcttcctctctgctgtcccccttatgtgtctggagctccggcgtgggatcccggatataggtaagtgtgactttttcccttcgacagtcacagctgggtaattttcacaggaatgttgcatagaacgaccgcctcttcggctgcgtggcttcggagcagctttgactacaactcccagactgcatcgcccctgcccccccacttccggagctgacttcacttcgaggaaccttttccctccaggaatcaaggattttcttttgctttgtggccggattttgctactgcttgctcttcttactttaattatttctgtgactacctcatggcttaactcatttaaatctccccaagtttatctgaaggaagaagaannnnnnnnnnnnnnnnnnnnnnnnnnnnnnnnnnnnnnnnnnnnnnnnnnnnnnnnnnnnnnngccagcagatacatagagaatgttttaaaacctcaccaggaaatgaaattgagaaaactggaggagcgcttttatcaaatgacgggtgaagcctggaaattaagcagtggtcacaaacttgggggtgatgaaggtacaagtcagacatcttttgaaacatcaaacagagaagcagcaaagagccagaacttgcctaaacctttaactgaatttccgtctcctgctgaacagcccacatgcaaggagattcctgatttacctgaagaaccttctcaaacagcagaagaagtagttactgttgctctccgatgtcccagtgggaaatgtcctgaggagaaggtttttgaagtcctacagctcacaggtcttatttgactggatgacgagaattgggtaccacatatctctatacagcctttctacttcctttcccagaacgcctctggcagtggaagggagccagtcgctggaggacataagaataactgtggacactgtactcatcctggaagaaaaggagcaaacccactaggaaagaaggggagagctccctgtttgcatgaagtcagttaatgctatgaaccttctgggcccattaaaggc

SEQ ID NO: 323059 - DNA, 1129 bp, Homo Sapiens
  misc_feature (571)..(643): n is a, c, g, or t
aaaatatatggatttaaatacaaagagtcaatataaagaaaaatagaggtcaccatacttggccacagttagaccgctcataggcccatggctgctgcaaccatgggcaggacacagagggagtccagcctctactgataaatctgggcaggttcaccttcgcaggccaagccaggggccatccctggtatgcgaaacctggaggttttccaggaagccggctgctccagagctagctgtcaagtctttagccccacaggctggtgcccagagccacttccacaggagcagcctcgggcttcacccacacccaaggagcttccgaggcagggaggcaagcaaaggtgaagggaggggttcagggtcccacaacagcagtgagcagggtccagccatcaggcctcagagcctctgtcatgccacctgcgagacgggctccctcctgtccccactgtgtcccccgcttcctcctcttacagcaggggggagttggagtcggagtcatggtggtggtgcctgggcctctcaggagatgtgggagaggaggtggcctcagctggccgcctgtgcnnnnnnnnnnnnnnnnnnnnnnnnnnnnnnnnnnnnnnnnnnnnnnnnnnnnnnnnnnnnnnnnnnnnnnnnntgtggctctcacaactgctttccgtctgatcctccgcccgcggcttcctcctggccgaggctgccgaggtcccgggcccgccgctctctacgcggtgatgcgtgaacacagacagccccagtttggcggcctccttgtcctctcgggacatcgccacgcggcccacggagccacttgcgctccccagccccagcagccggtccacgcccttctcctcggggtcgcctccttcccgcttgcagacctccgcgaagtcctccttgctcaggcccgtgggctgcttcttcacgttcttgtagccaagggcggccagcagcgcctcgcgctccgcctcccgcacggctgccagttcctcctcgcggctcgggcccgcgcatggcgcccggcccttggcgtaccaggtgaggtcgcggcccttctgccagcggcctaccggcgccatcagcgagttgcccaggtagttctcccgctgcttgtcagtcttca

SEQ ID NO: 323060 - DNA, 656 bp, Homo Sapiens
ttagccggtcagtccagaggtttattttgagcacaggtgggagggacagggggaggagagaagcgcaggggtcgtggcctcatcaggtccgaggtccagggaggcgggtccggtcctgttggtcctggtcccgaattggtagctgggtgtatctccggaccatgttgggggcgcaccatcccttcctcactgggacctcctgggctggtccacgcccttctcctcggggtcgcctccttcccgcttgcagacctccgcgaagtcctccttgctcaggcccgtgggctgcttcttcacgttcttgtagccaagggcggccagcagcgcctcgcgctccgcctcccgcacggctgccagttcctcctcgcggctcgggcccgcgcatggcgcccggcccttggcgtaccaggtgaggtcgcggcccttctgccagcggcctaccggcgccatcagcgagttgcccaggtagttctcccgctgcttgtcagtcttcacgtcctcccagttgaactggtcctgcccgccgcgcacgcctccacgactggagccgaacatggcgccgggaaggcagttgcctggggcctgcggcttgcaacctgcaacccgcaacccgagacccgctacccactaccgtcggacccaggcccgaccccccc

SEQ ID NO: 323061 - DNA, 445 bp, Homo Sapiens
  misc_feature (77)..(77): n is a, c, g, or t
aaaaggcaagggatcaaaatcgaacttttcccttgtatcctgtgtttctccccccctggcagtgcctaattcaaaanaaaggtagtcaactactggttgagtgcatgaaccaccctagagggccagaatttaagatgaacatctactggttctgggttaaagcggctaggccagtccatctagttggcagggtgtggcgtgaggggagtaggccctgggcgccagcatcccggggctcctagggtgactcgaatattcctacagcagtagggcctaaacaggggtttgacgccacagcagggagggtcaggcgcgtggggcctcggacttcaagagcatcctttctgcaggcccttccgcgtgagcggaggtttctgggttttacctgatctgcatcccttttctgcaggagcacatgtccttgcgcaggaagaggctgttcagc

SEQ ID NO: 323062 - DNA, 881 bp, Homo Sapiens
  misc_feature (19)..(19): n is a, c, g, or t
  misc_feature (38)..(38): n is a, c, g, or t
  misc_feature (102)..(102): n is a, c, g, or t
  misc_feature (556)..(590): n is a, c, g, or t
  misc_feature (594)..(636): n is a, c, g, or t
atttttgtaagggggggcnagagagatgcttgatggancccaattaggtggagtggaaccccccaaaaccctgccagcttccagcatcaccctggggaattngttaggggatgcaaattccccggactccaccagcagacttaccagatcacccagctctggggtggggcccagcagtttgtgttctaacaaggctctagttattctgatacactctagtttggaggaccacaacaattgaagaaatttaggatgtgtatcagctaactgcaatattcagtaccttacttggttcctgattccaaaaaactgcaaaaatttttgacatctatagacaacacattatattaaggaattgtccattttcttaggtgtaaaaatggtattcagattacacatattttttaaagtcctgaaatatttacagataaatgataagatttgcttcaaaataatacagaaagggcagaagcaggtggggttacagatgacacaaattagctaggagctgataattgtcgaaggtggaggatgggttacctaggtgttctttatnnnnnnnnnnnnnnnnnnnnnnnnnnnnnnnnnnnatannnnnnnnnnnnnnnnnnnnnnnnnnnnnnnnnnnnnnnnnnnttttgagatttttcattctaaaattttttaaaaactcaaactagaataaattaaaagactgacttaagcagaattaatctaaaaaaagagaaagtatatagtacttttacttaaagggcagtattgaaatacataaaataagtataaatagtctgaaaaaaacctactccatcctagtttgtggcaaaatgcttttgttttagaagggggatctagaagctctatcaattgtctgatgtaatttt

SEQ ID NO: 323063 - DNA, 742 bp, Homo Sapiens
tacagtttaactctttattctccttcacagcccagcagaccccaaggcgggcagagggtgcaggccgtccccaggatgctggtcatgggccagggtcatccttgcacctgcggcagtaggggcagcagccatgctgaagcaccagcaactcatagtcctcagaatggaacatctggaagcaggaggggcacatggtaatggaggcgtcaggcagcagtgagcggaagtattgccacctcaggggtgggggccatcgcttgatgaggacatcccggcggctcatggagcgcatcaccagccggctcaccaccactggcacgaactctgagccaccttgctcaaagctcagcttagctgtgaacgggtcctcatctccgatggagtccttggtctccactagccgcagaatctgggagctgttgtttgcaatctctagctgtctgtcatcccgcttgggtctcagcacctccaggtcgatgagggagatggcttcttcatcagtgatcccttcctccaggtagaactcaaccaggtgtagcacgtcgtaggaagaggcggagaagatgaagggctggcggcagttgatgcagacgttgcccaggttgttgagcagcgggttgttggtggagcagcggtagcacaagggcaccaactcctacaaaacagccacggactcccgaggggccggggcaggcacgtgtcctcctccccctggactctggcttcaggcccctggggcctg

SEQ ID NO: 323064 - DNA, 1855 bp, Homo Sapiens
  misc_feature (19)..(19): n is a, c, g, or t
  misc_feature (32)..(32): n is a, c, g, or t
  misc_feature (120)..(120): n is a, c, g, or t
  misc_feature (144)..(144): n is a, c, g, or t
  misc_feature (160)..(160): n is a, c, g, or t
  misc_feature (294)..(294): n is a, c, g, or t
  misc_feature (367)..(367): n is a, c, g, or t
acacaacttttgtttcaanagattacttaggncttattgcttcccttgattaccagttcttcccattcgcagagcacctacattgagcccccgaaggaagaggctcatcttcgggagctntaccttcgccaattaaggaccttngaaggccaggatgtgntggaagccatcttgcccacctgaatactgttcctcgaacacgcaagcagatcatccaccatctggtacagatgggactggctgacagtgtcaaggacttccaaaggaaaggaacccatattgtacttgtggacngggggatcaggagttggagcttgcagcggctttttgaggaattccgggacgtcagatgatgtccgtgggtcantatcatgaagaatatcacagccaaacgctcacgggcccgaatagtggataaactcttggctctggggctggtggctgagcggcgggagctgtacaagaaacggcagaaaaagttggcatcctccatcttgccaaatggagcggagtccctgaaagatttttgccaggaagatctggaagaagaggaaaacctgcctgaggaagacagcgaagaggaagaagaagggggctcagaagcagaacaagtccagggtagcttagtcctttcaaatgaaaaccttggtcaaagcctgcatcaggaaggcttttctatcctgctcctatggctccagaactgcctgatccgagcagctgatgatcgggaagaggatggtgagtggacaggctgctcccaggccgttccattggtgccactcacagaggaaaatgaggaagccatggaaaacgaacagtttcagcagctgttgcgcaagctaggggttcggccccctgcctctgggcaggaaaccttctggcgaattccagctaagctgagtcctacccagctccggagggcagcagcttctttgagtcaaccagaggaggaacagaagctgcagccagagctgcagcctaaagtccctggagagcaaggctctgatgaggagcactgtaaagagcaccgagcacaagccctgagggccctcttgctagcccacaagaagaaagggggcctggcatccccagaggaggaagacgctgttggtaaagagccgctgaaggcagcacccaagaaacgacaattgctggacagcgacgaggaacaggaagaagatgagggcaggaacagagcaccagagttgggagctccaggaatccaaaagaagaaacgataccagattgaggatgatgaggatgactgaagagctaagaagcctaggggtagagatagacacgtttttagatggtgcattcaagtcagagttggaagggtcatacaggacccagaagctcctcttactggacagagcagtagaatcccaggctctttcacggatttaggctgagaaacttcagcagcagtattggacttctctgctgtcagtctttgtttctcccagtttttatcggtatgccccagcagctctctggagatttagttctcttcttctaggaaccatttcttttggttattggagctccttagcaaataagaggagtgagtgaaatagagaaagcaccccggaccccttttattggtctgttcctttggctttctcttggaggtgggtcgcagcaccagatggggagctttatgacatgacaggcgggagttttgtaccacttttagaagataccagatgcctctgtcctcattttgtttcctatgatcatcctctagataccagatagaggcccattcctgcatttgagatagggttggaatatagtactctagatgatgaatgtgtttgctttgtgtttggtattaaacatgtccggtttcccc

SEQ ID NO: 323065 - DNA, 1496 bp, Homo Sapiens
  misc_feature (233)..(243): n is a, c, g, or t
cgtggggttgtttcttgggagcaccttcttttgccgccccgtcgagtttttcccaatctgacctatgcgtttaagaacgtcttccgcggagccatatggagaggatggtcatctgggctccaacctgttgggccgcacctgtaaacacaccccgcgttctcatacgctcatcttgctcattattggggctctcaggaggccacagcgccaccgttcgggtcgtttgggttggnnnnnnnnnnntccgaaatggttgggaaagcatgccgaaaatgccgatactggggaacttttacatatagatggagaacggcgaccacagtctcttcaaggtagggggaaaagtacgttgcagttaaaaacaaaaagctttctttgcaaaaagaagaaaagtttttttgatctccttgaatgtagcacacaaaaaaagtgatggttcccccaggctccatcagcaatagtaaagggcaggaacgtagagatttctttttccaggcccaggcctgtgaaaaacgatggctaagtgttagtccttagcagggccgacggatggtctccattcctggttaaccctctggaatctgggagcatgagtatctccaagaattcatttctattcagtaaagatggggaggggaatcccactgttacttgttgaactggaaagaatagaccccatgctctgagggtgcgtccactgccacttggttctgttggccgctgctctcctcgactgaaacactggaagaaggcacaggggtgtactgggagatgtaagctccttgcatagctgcagccgtcggcatatacgtgcctgtgctgctgagggagagatggcccagttgctgggtaaggggtcccatcatggaggcaggctggagagaaatgggatggtccatcctggtgtcagaactgaacctgaaggctgcatgaggtatgaatggtggtgcatccaggatgggttaggtacttgtagaggagatgtctgagtcactctctgatacgaagacacaggagaggaaaggtatggggagagtgcagactgagcaagcatcctgttgggggtgatgttatagggggctgggtaaaacccattctgaagagctgtggtggggtcataggtcaaggccatgacgcccatgtctgcattccttggccaagcccgtccattttgcacaaattttccttggttctgtcgtttctttggcccgccatcagcaaatttgcaaagcaagggatcggatggggctggtactccagggggtgtcttaatatattttccattaaagtgggtgatgatggcttcacacttctctgtggactccatccttgcaaagccaacacctctgctggtcccactggtatctcgaaggatacgggtggagataacctggccaaagggcttcagcatcccctccagttcctgctcatccattgacagtgggaggtttgagatgtataaatttggatcccgggaatccggaccggtccagcct

SEQ ID NO: 323066 - DNA, 767 bp, Homo Sapiens
ctaagtgtttatagcattgttgtacaattatggatttcgcttgtcaagagcatgcccgtgggcctgtgtcaggtgcagtggtgcagtatgtccgtcgccatgggtgcaggagcgttcggtaatgcctttgtggccagggtcgcgacatgcatgcatgtggtccgtgttatgaggcaaccatagtcaggtggtcctgtgctcaggtcagaccaggcatgtaactttggggaagtccaggatttctgaggccagggtgcttggtggagtaactggagttcagtcagtaggtgacagaaccttccacacagcataagtaaatcaaggcagttcgctccatacgggtcttggctttaatgtggttttctggtcaaacccagaatggctgaacattgctatgaacataggtcatgtatattgagacactgattccgttttatggagccctgtggctcctgacagtttaacgagagggcacgaaactccagtgcgacgtgctccatttttgaataggcatgatataagctcccctcatcagagtgaagaggaaagtagccgtgctggaataaggcaacaccgggccccctcaatacaccggcaccctgaccctggagtgcaagccactccacggacaccagcaggtccccgcctgggccccggcctcgctcgccacctccgcgacctctgctcccagcccacttctcggtcccgctcgcggcctctcccccgcggcactcgggcaggggctcactcgagaggttttgccgcca

SEQ ID NO: 323067 - DNA, 1519 bp, Homo Sapiens
  misc_feature (39)..(39): n is a, c, g, or t
acatcctgggcggtacatcttaagtagtgtggccacatncagggggcccatcaggggtcaccagtcactcaatagcctccgcggaggtccggagtccacacccacccggtgtagggtgtgctcaaattcttgggcttgggcgccccacctttgggagaaagggatatgctggcaccccacatgtcccacaaagccttgtgaactcgcccaaagaactttttgcagaccagcttgagcaaggggcggatgttcagcttcagctcctcctttcgtcaggtggatgccaagctcgtctagggtcccgtgggaggctggtgtccacgtcaccttacaaacctgggcgaggatcttataaagaggctccaagataaactccacgaaacttctctgggagctgctagttggggcctttttggtgaactttcgcgtcttagggttgaagtagatgtcaccccagagtcttttagcaaattcttggtaattaatgtcaccaaaggtgtcggcatagatcttggcaaaggagcccagcgtgaagcagatgctgtactgggagctggagaagcagacgttacccaggagtggggaaaggatcaggttctcatcagtggaatacatgcttattaatccattgacctcatccacaatgtggcgcagcttgtaataagcatcagttggaggcagcttcagctccaggatcagccggtcaatcttgttgatgcacacagtgactgccagcctctcctgcaccgcatgcttgatcagccgctctgtgttcagcatcaccccctcagcagcatcaatgaaaaggaccactccatctgagatgcgcaagccagctgtgacctcatcagagaaattcacatgtcctggagtgtccatgatattgaagagataagattttcctttggtgtctggcaagaccactgtcacaggagtgcttttgatgcctacacctctctcttgctctgtgaagaggatgtcagtatagcacagatcttggtcatagcgctttctgatttccgggtgagtctgttcaattaaacaatccacaaaacatgtcttgccatggtggagatgtccacaaagggtcacatttctgatgagctctgagttatccatcagatccgccaagaaatccatctcatacaccgtaacaggtaatgtctgctccatcagagtgaatttcttggttttcactggcttaataatgggttctgtgagaggctgagtgtcttcctcttgaactatggtctccacctcaggaccatacacctcctcggctgttgggtagtacttcttgtcctcatgcagcaccacctccatcccagggtggtcatcgtcatgatctcctacgtcatcgtcgtcgtcatcatcatccatctcatcaagatctttggtctctctactcaattcatcatcatcttcatcagaatcaagctctggtccaatataattcccaaactcatcatataagtcggtatccatgatgctctcgcctgctcagctaagagttcccccc

SEQ ID NO: 323068 - DNA, 963 bp, Homo Sapiens
  misc_feature (98)..(135): n is a, c, g, or t
  misc_feature (440)..(440): n is a, c, g, or t
  misc_feature (463)..(463): n is a, c, g, or t
ccatatcggcggccctagccgtgggtccaggggggagccccgcgcaaatccccgggagagaatgggcacagtcccccccggcaaggggcgaacatctnnnnnnnnnnnnnnnnnnnnnnnnnnnnnnnnnnnnnnaatctttcccaggccattgtgggggcgccaaggggcccccccggttctccttttgggaggggggccctcccaaggcaggccctgagcgcccggtccaagctcctcccccattctggctcaaaggccgagtgccccacccagctgggccttgcccatcagtcccccccatctgggggctcttctgcctccaacgggggctgctccagcagggagagggttagggcttgccgcagggcagcagcctcctcctgctcagccacctgaccttgaggctccagtgaccggtggagggccagctgcagagncggcctcctccttcccagccacntgggtgccacagtgctgggggccacaggctcctcttcctcatgccctggggtcgcctcctcctctggctgctcctgaggcccttcctcctccagctcccgaggcagccagtcctccccgtctaggtctaggccctccagggtggccagcagttctcggacctcctccaggctcacgtcctcctggtcaccacctgtactgtctggggtccacagggtgtgggcgttgccagggagcactgggagggcctcggtagggtccacctcttcaaggcctgtgtccaacgtggctgtggccaggcgctctgtcccaaagacacactggaactgagcctccagcccctggagaaggtgctgcccttctgggcccaggagaaacctggcgctgcccgggtgctccaggcacaacacatggcagctaatgctgcccagcaggctccgcagaaactcctcagccgcctggcaggaagcctgggcctcgtgccgaattcgccacccaggc

SEQ ID NO: 323069 - DNA, 964 bp, Homo Sapiens
gaaagggtgccacaccaaaggtggggcggggcaagcccccggcgccagggggtgggccccctgaaaaccccacgggagggaatggtgcaattcccccccgccaggggcaaacacttcaccgacatgggcacccgttcccagggggagcacggcagctttgcaagggcagtgtggcggcgcacagggcccccaccggtctctctgctggaggtggacctccaagggcagcccctgagcggccgggtccaggtctttccacatcctgctcaaaggccgagtgcaccaccagctgggccttgccatcagtccccccatctgggggctcttctgcctccaacgggggctgctccagcaggggagagggttagggcttgccgcagggcagcagcctcctcctgctcagccacctgaccttgaggctccagtgaccggtggagggccagctgcagagcggcctcctcctccagccacctgggtgccacagtgctgggggccacaggctcctcctcctcatgccctggggtcgcctcctcctctggctgctcctgaggcccttcctcctccagctcccgaggcagccagtcctccccgtctaggtctaggccctccagggtggccagcagttctcggacctcctccaggctcacgtcctcctggtcaccacctgtactgtctggggtccacagggtgtgggcgttgccagggagcactgggagggcctcggtagggtccacctcttcaaggcctgtgtccaacgtggctgtggccaggcgctctgtcccaaagacacactggaactgagcctccagcccctggagaaggtgctgcccttctgggcccaggagaaacctggcgctgcccgggtgctccaggcacaacacatggcagctaatgctgcccagcaggctccgcagaaactcctcagccgcctggcaggaagcctgggcctcgtgccgaattcgcc

SEQ ID NO: 323070 - DNA, 901 bp, Homo Sapiens
  misc_feature (52)..(95): n is a, c, g, or t
  misc_feature (97)..(102): n is a, c, g, or t
  misc_feature (104)..(107): n is a, c, g, or t
  misc_feature (346)..(346): n is a, c, g, or t
  misc_feature (705)..(705): n is a, c, g, or t
tctttaaaaaaccttcccaggcttttttggggggggcatttccctgcctggnnnnnnnnnnnnnnnnnnnnnnnnnnnnnnnnnnnnnnnnnnnnannnnnncnnnntgttgggtgcgaggtcactgctgctccaggcagtctcgggtcacccccctgggccagccagctcagccaggcacgttctgcaggtagttggggtcgggatagccgtggcccgtaatgttgcggtccatctctgtcttgtggtggatctcgttccataccacggtgtccgtctcacccgtggtgctggacgtgcccactgtgaagatgagccgcctcttcccaggccaccttcaggagcntctaggaccttgcggccctgggcgttgtctggaaggtagcactggcggggaaaccctctggcagtgaacggctttccgggattggggtgctcagggccctggataccatggggaatgctgtaaactatgaggatggtcccgcagtcctcgtggccggggagcgacatctggaaccgtaatacctccatctttccctggggctgggtccccgtcttctctccatagatggttttgcaggagggacactgcagacttccatccttattgccgttgcagtacatggccaggaggcacagcaggtggaaggcatggttgcacttggtgaggtggcccacagctagggacccgattgccttgcntgtcagtcacatcgctgtatccagacgctgtggacagcttctccattgcagatgatgcagtcctcatctgggggcactttcagctcttccgtgtagttttttatgacctgctctggctctggctctggcttcggggtcgcttctttcacggacattttcctcaatctcttaactgagccgtgacttttggaagcca

SEQ ID NO: 323071 - DNA, 895 bp, Homo Sapiens
agaaagccaggtgggttccaagggaaagttgggttgcccacggattaagcccccccggtgcttttttggctttaattaacgtggccaagggagaaaattccaaaattaaggtagttttcgaattctgttttgtggcagatggtggggcttctggagttccagccctcgggggccctgattcccaggggtccaagcccaccttcattttttgagtcagggttgggcagccacttgtgtcctgagaaggtgccagaaggcctgaagcccaggcaaggggaacgggcagtgcctgtgcctcgggggtacttccagcatggcctggagcacatccagccatccccttcccccaaactccagcccttctcagaggggctctgggggtcattcaagggggacttctagcttctctctggaaccctttgtccagagcaaagccaggtttccaaggtccccacggcaaggctgttgggtgctggcagcaagaggtacacagcagttctcccagctcacagcagtgacctcagatctccagcagcaagggccgcactctcggtcccacaagggccttgcagaaatgctccggtccctggcctcccccggcaggaggggcgggctcctgcctgcagtgaggccacagcactaagcggcttcagtcacatgcttttcaggtgaatcactccaaattcagtgaggagggccacgacaaggaagttcaggtagaagaggagcaggcagaagccatagactctgctgagctggaagcactgcaatgggactgagaccagggagaagacgaggctgagccccagggcgcctgccaggacccacaccagcagtccgtctggctccagcttcacttctgtgtggcttcgggagatctggagcaggcagccca

SEQ ID NO: 323072 - DNA, 637 bp, Homo Sapiens
atttggaaaagagacagttgaatcccttttctttaccagcataaggcagtcaggcaaacctaagagttgcttatttcggcaacattaaggcggggtcattgcatgacagcaagaaggcacgaggtcccctcatctgtcctttcccagctcgcaggccttggaaccccgcccagggccccgctgagggaggcacaggcacagtcctaccgactcctgcctggcagctggaggagcccaggttccagcacaaaggagtctgtggacaggcaggggcagaatcctgggagggagcgcctgagccaccatcccatgtggcagctgctggcgtagcagttgcctcgggctgggcatcgttttggaagcaagtgggttcagtgaagtgtgttgccacgaatagcacccgctgcttttggctttattaacgtggcaaggagaaattcaaaattaagtatgtctcgaattctgtttgtggcagatggtgcggctctggagctcagccctcggcggcctgattcccaggggtccaagccaccctcattctctgagtcagggttgggcagccacttgtgtcctgagaaggtgccagaaggcctgaagcccagctgtggaagaatgaggggagagaggctgagtcact

SEQ ID NO: 323073 - DNA, 1326 bp, Homo Sapiens
  misc_feature (821)..(860): n is a, c, g, or t
  misc_feature (1183)..(1229): n is a, c, g, or t
ttaactggccgagtcaatattttattaaaaaacacacaaacacatgcacactggtaacaaaggcagagatggagaggagacacaagatctccttggggacaggctgaccacatagtgtttctacaggcacgcctcacttcaggaaagagggtatctctaagaccggactgacaagctagataaattaggacagggctttgtttcttaaggcacttcactcccctgaggagtgaagtagaagggatttaggcgggagtattcacaaaccccttcagctgtgctaagtggggttcatcagtacctgaggtggttctagaagcaggaaggcagaaaacatttccctggaggctgctttcctttcccagaatgggagggatgttctccccggaaaggctggaggaagagtttcccggctggctcaggagctcagggagctggcttcctgggagagcaggaagagggtgcaggcttttcctggtgcccaccagcctgacaggactttggcacaggaacacaggtccagaggcctcgcctggagtacacgtcctcctctctgcaaagctccttgaggggcctagggggttgtggccttcatcagacgggtggcatctgtggactgggttacacacgagatcttataggacagccatatgcttgccatgcagaggaaggtggccatgaaaccaaagatcgctccggctaccagtccgctctggttgtaactcttggaagctgccacaatggaggcgatgaggaggagcagggtaccgattaaatagtgcagaagttccgacaggggccagctgatacaggtgagcacnnnnnnnnnnnnnnnnnnnnnnnnnnnnnnnnnnnnnnnnatcattatcaagtcgcaaatggtgaccacttcaaagtagctgtaggcgctgtagttggtccacagggagctccgcacacagatgaaggcaatcagcagggtgaccatttgcgccactttcagcagggccgcgtgggtgcgggggtagctgaggtccagcagcccctccaaggggctcgcgctgggctgggccgcgccggccccgggtccgagcgcgctgccgctgctgcacgtggtgcggacgagcccggctccgtgcgacattgcgcggccccagctcgctggccgcctccccgggcagctgcccaggggccagatacagannnnnnnnnnnnnnnnnnnnnnnnnnnnnnnnnnnnnnnnnnnnnnncccgggtccctgccccgctgctggagacgcggagccgcctctggcgggatccctccggtgactggccggccggcgccttcctcgtgccgaattcgcc

SEQ ID NO: 323074 - DNA, 909 bp, Homo Sapiens
  misc_feature (823)..(823): n is a, c, g, or t
gggttgatctacatctacatctaaatctgtggaggtagatcaacccaaagaagaaaagaaagaatgctactataatctcaatgacgccagtctctgtgataatgtgttggcccccaatgtcacgaaacaagaatgctgctgtacatcaggcgcgggatggggagataactgcgaaatcttcccctgcccggtcttgggaactgctgagttcactgaaatgtgtcccaaagggaaaggttttgtgcctgctggagaatcatcttctgaagctggtggtgagaactataaagatgcagatgaatgcctactttttggacaagaaatctgcaaaaatggtttctgtttgaacactcggcctgggtatgaatgctactgtaagcaagggacgtactatgatcctgtgaaactgcagtgctttgatatggatgaatgtcaagaccccagtagttgtattgatggccagtgtgttaatacagagggctcttacaactgcttctgtactcaccccatggtcctggatgcgtcagaaaaaagatgtatacgaccggctgagtcaaacgaacaaatagaagaaactgatgtctaccaagatttgtgctgggaacatctgagtgatgaatacgtgtgtagccggcctcttgtgggcaagcagacaacgtacactgagtgctgctgtctgtatggagaggcctggggcatgcagtgcgccctctgccccctgaaggattcagatgactatgctcagctgtgtaacatccccgtgacgggacgccggcagccatatggacgggacgccttggttgacttcagtgaacagtatacntccgaagccgatccctacttcatccaagaccgttttctaaatagcttttgaagagttacagggctggaggaatgcggcattcctca

SEQ ID NO: 323075 - DNA, 1130 bp, Homo Sapiens
  misc_feature (173)..(192): n is a, c, g, or t
  misc_feature (245)..(245): n is a, c, g, or t
  misc_feature (532)..(532): n is a, c, g, or t
taattgaggaccaaactttaatatttcaagggcaccccaaatgagttactggtggggttacataacctttcattcatgccaccaaaccaagattcatgaattctgaaagttaaagttgattacctctttggatccataaaaaatatatatattaaagcatgtcacacagtgcnnnnnnnnnnnnnnnnnnnngaggcatccagcagatgaaaaataggctcttggaaaagccccaagcagcaggnctgattgtcctaaccaagaggacagagaaactctttctgtaggaaataaagctgcttcagccaaagagagatccagacatgggttttgatggattcttattccacccaaagacaagctcaaagaaagtggaagttcagatttcccatgggtgcagttggatcttgcatccaagagaatgcttggttgacttctcatatgccaggctgagcaagaagcaagcagcaagacttagccagtgattctgattccaggctgacatctctgtgcttgagctctgagctcctcngggcaggacagcctggaattgctcctgcaccagcatttccacagtctgctcctttgtgtggatatcaggtctcagccaccaccgtccagcaaggtcctagagatgcctgaggacatccctggggccagctgcatcctcatagcagaacttcctgaacctctgccgggaggctttctagcatggtcttaaagtcttcaacagagtcttcactgagggtctctggtgggagcccagaaggctctcgtggaatctggacctggaaagcaggtagtaggacaatttctggctcctcggcctatcatttcattgggtagtgatctcatttgatcattctggacttctgtatttctttgtgtctctgggtacacttcagtctcaattctggaactctaagaaaaaaacgttccagacttcgtgcggagttttggatacattcttagcagctttttcgctccggagaagttctttatctttctgagccgcagtttgcccaactgcaaaatggaaagagatgaagcaggaattaagatactctaggagctcgcccacagctgattcagggccccattctgaggttacacccttaagcctttgcccc

SEQ ID NO: 323076 - DNA, 895 bp, Homo Sapiens
  misc_feature (721)..(721): n is a, c, g, or t
tcagaggaactgtgaccaagttgggagagattctgaggataagaactgggcccttaaagaacagctcaagtcctggcagcggctccggcatgacttggagcgagctcggctgctcgtggaattgatccgcaagcgggaaaaactcaaaagggagacgatcaaggttcagcagattgccatggagatgcagctgactcctttcctcatcctccttcgcaaaaccttggagcagctccaagagaaggacacaggcaacatcttcagcgagccggtccctctgtctgaggtaaccgaattggacgaggtacctgactacctagaccacatcaaaaagcccatggactttttcaccatgaagcagaacttggaggcttaccgctacctgaattttgatgattttgaggaggacttcaacctcatcgtcagcaactgcctcaagtataacgccaaggacaccatcttctaccgggcagcagtgcggcttcgtgagcagggtggtgctgtgctccgccaggcccggcgccaggcagaaaaaatgggcattgactttgagacgggcatgcatatcccccacagcctggctggagatgaggccacacaccacactgaagatgcagccgaggaagagcggctggtcttgctggagaaccagaagcacctgccagtggaagaacagctaaagctgcttctggagcggctggacgaagtgaatgccagcaangcagagtgtgggcccgctcacggccgtgcaaagatgatcaagaaaagagatgacgggactgcgggcggaagcttgcccatcagcgagagacgggacgtgatggcccctgagcggcatggcccctccaagccgggggtaatcttgacacccccaccccggaagcctggggacaag

SEQ ID NO: 323077 - DNA, 734 bp, Homo Sapiens
ttcagaactgcttctacatacataagtcatttggagacacacttgggcttcagcctgaaggatctctccaagctgccactcaatcagattcaagaacagcagaatgtttcgaaagtcctcaccaacaaaactctgggcccactgggggccaccgaggaagacttgggctccacattccaatgtaagctctgcaaccggacttttgcgagcaagcacgcagtcaaactgcaccttagtaagacccacggcaagtctcccgaggaccacctgatctatgtgactgagttggagaaacagtagcgtccaggtatgcaagagaccgcggaacattgcactaaacgtcgtcgagctgcactaggcctggcctgagcctctgaaatcagtctttcctttgttgctggcccgcctctctggaccttggttttcttacacatattttgtatatttatatgctctctgtccgatctgtgcatgttatttttctttttccgtgagtcaaagtctgacctttattttcaacatctgttcttggtgttaagctatcttttgtaggaaatagtggggcacactactcagagacattatttagcagtaaagaaagacacaaataacaatgataaaaagacatcctaaaatggtgaagttgccatgacaataaaggtcatagaacctggtagtgtcaaatttaaccctttgaggactgtaattgcatttctgtgcctttcacttgaaaa

SEQ ID NO: 323078 - DNA, 1043 bp, Homo Sapiens
gggatatgcgcggatgcacgcggagatgcgggggtaaggtggtgggtatacggtacgtgcgctaataggatctgggcgatacgacggatcttaatcttcggctcctcctcgattcgttgccgcccgcacgacggctcattcgaccgcgagcgggataggtcgcacagcgcgaggggtgtgcgtcggtaccagtgttgatctcgttcgggcactgttggggtggaatagagtggcgttggttgctgtgcaccgggctctcctgacggctccttacgccatgtttggtgcgggctcacgggcgcttggggggttcagcggaaaccgacgatctttgtgaggaggaggcatgggcgtgggggtccggggctctgcatgcccagccaggtgctgtgccacgtcactggcagtgcggcgtgtggttgtggctgtgaggcccaggaagcagtgcacgcccatgcgctcccgaagcaccttgcagacgcgcaggtagcagggccggaagttgtgggaccactgggagaggcagtgggcctcatcaatgcaggcaaaagcaactggaggcagctgtgcggctggagggaggcctcccgcccccaccagtgcctcaggtgtcagcatcagcacgtgtacctgggctgcccgaatcttctgcaggacagattcccgttgcttcctggtcatgcccgagtgtatgcaggccgccttgagacacggtggcaggccagacacctggtcatccatgagtgacagcaggggagagacgaccaacgtgaggcaggggctgcgccggctgtagagcagcgctgggagctggtagcacagggacttgccggcacctgtaggcagcaccagcagcgtggagatgccagacaggatccgcatgactgcacgctcctgcccagggcgaaaggcttggtgccccagctgctccagggcctggaacacctcagccggcgtctctgccaactgccctgagggccccagggagtagagtggcagcacggtgcctcgtgccgaattcgccacccaggcctcgctaccta

SEQ ID NO: 323079 - DNA, 1270 bp, Homo Sapiens
  misc_feature (1175)..(1225): n is a, c, g, or t
  misc_feature (1227)..(1227): n is a, c, g, or t
gcacggtacccaggcacattcccgaaagtccaggccgctttctccatacacggaggttctcggaaaatgagcccgcctggagcccgggacttagagggggatggcgggcatcctcgctgggggtggggggtttccaggtaggtggtggaggggctccgcggggctgcccggtgtggttgctgagcagtccccggcggcagtgctcctggaactcccggatgatgaccttgctcccgttcacattgccgtgcaggagcggcagcagctgggccaggatctgctcgtctctcctctcccgcttggaggccttgggcgtctgctcctcctgggccggcagggtctccaggaagcaggctgcgaactgctgcagtaccttcaggtcatcgcctgcgcagtttttgtcagccgccccacaggcaggccgattttcacaggttgcaggacgcgaaagcgcttccccttagccaggaactcgtcccactccttggccttcagtttctggcggaccttatggttctcagggtcggcacactcctctgtcacaccttcgtcctcagacaggtacccatggggcacaaagaaaccatcgtcctcatcttcatcctctcccatgtcgtcatcatcatccccctcactgtgggacagggactccccaggctcctcttcttcccactcctcatcactgtccacctcatagtccaggagcttcgtgtcctgggcccaggggtctcgcgcgcggatgagtgccgtcttcttattccaggtaccccagtaggcaggccggtggttctcacagaactgcaggagcttcatcctgccaaacttcctcctctcgggaacaccgtcgcccttcccacgctccacgatgacgacatcactgttaaaaatatctgcattccgggtggaaacgtgcgtgggtccggacctcaggggctgccggcctttgaggtctttcaagaaggagaactcgccgctctgctgctggaggagctggtccagctgactgcagaggtctggatggaaagcggtccgacgccgaggggccaggaccatgtgctctttaatttcaaagggggcaaacttcccacaggagccggccagggtcttgggggcctgtggagtctttggtttctggaagaacctcgtgatttcggccttctctgctttaatgcgcnnnnnnnnnnnnnnnnnnnnnnnnnnnnnnnnnnnnnnnnnnnnnnnnnnnangtttagcctccagggccctcgtgccgaattcgccacccaggcc

SEQ ID NO: 323080 - DNA, 975 bp, Homo Sapiens
  misc_feature (880)..(930): n is a, c, g, or t
gagccctggggtgttggttccttctggggccggccaggttttcccggaaagcaggttgggaaactggtgccggacccttcaggtcattgctgggccagtttttgttaagcggcccacaaggcaggggattctcacagtttgcaggacgcgaaagcgctttcccttaggccaggaactggtcccactccttgcctttcagtttctggcggaccttatggtctcaggggtcggcacactcttctgtcacaccttcgtcctcagacaggtacccatggggcacaaaggaaccatcgtcctcatcttcatcctctcccatgtcgtcatcatcatccccctcactgtgggacagggactccccaggctcctcttcttcccactcctcatcactgtccacctcatagtccaggagcttcgtgtcctgggcccaggggtctcgcgcgcggatgagtgccgtcttcttattccaggtaccccagtaggcaggccggtggttctcacagaactgcaggagcttcatcctgccaaacttcctcctctcgggaacaccgtcgcccttcccacgctccacgatgacgacatcactgttaaaaatatctgcattccgggtggaaacgtgcgtgggtccggacctcaggggctgccggcctttgaggtctttcaagaaggagaactcgccgctctgctgctggaggagctggtccagctgactgcagaggtctggatggaaagcggtccgacgccgaggggccaggaccatgtgctctttaatttcaaagggggcaaacttcccacaggagccggccagggtcttgggggcctgtggagtctttggtttctggaagaacctcgtgatttcggccttctctgctttaatgcgctnnnnnnnnnnnnnnnnnnnnnnnnnnnnnnnnnnnnnnnnnnnnnnnnnnnagtttagcctcccagggccctcgtgccgaattcgccacccaggcc

SEQ ID NO: 323081 - DNA, 994 bp, Homo Sapiens
ggtttggcctccctccctgggggcccggccagggtttttcccaggaagccagggcttgggaaactgttgccagttacctttcaggttcattcgcctggggcagttttttgtcaggcggcccaccaggcaagcggatttttcacagggttgcaggccgcgaaagccgcttcccccttagcccaggacttcgtccccacttccttggcctttcagtttctggcggaccttatggttctcagggtcggcacactcctctgtcacaccttcgtcctcagacaggtacccatggggcacaaagaaaccatcgtcctcatcttcatcctctcccatgtcgtcatcatcatccccctcactgtgggacagggactccccaggctcctcttcttcccactcctcatcactgtccacctcatagtccaggagcttcgtgtcctgggcccaggggtctcgcgcgcggatgagtgccgtcttcttattccaggtaccccagtaggcaggccggtggttctcacagaactgcaggagcttcatcctgccaaacttcctcctctcgggaacaccgtcgcccttcccacgctccacgatgacgacatcactgttaaaaatatctgcattccgggtggaaacgtgcgtgggtccggacctcaggggctgccggcctttgaggtctttcaagaaggagaactcgccgctctgctgctggaggagctggtccagctgactgcagaggtctggatggaaagcggtccgacgccgaggggccaggaccatgtgctctttaatttcaaagggggcaaacttcccacaggagccggccagggtcttgggggcctgtggagtctttggtttctggaagaacctcgtgatttcggccttctctgctttaatgcgcttctcttcttctcttaaccgtttctcttcttcctttttccttttttcctcaagtttagcctcccagggccctcgtgccgaattcgccacccaggcctcgcta

SEQ ID NO: 323082 - DNA, 1699 bp, Homo Sapiens
agggcagggcctttgggcgggggtcagccagttcctcccccgttcaagtttcatagtcaggttgttggatgtcctgagggatctccttggagccgaagccgggccagcatgagggggtcccttctccattccagggatggcgcaggccacaagcaggtgcagattggggccagggagcccctgtccacagcactccccacagccgaagggacatccggaagggggaattcccctcttgaaccagatgagcagccaccggaaacagaagcagagagagccggagtcctgggaatccaggaagtcgcagagcagggggtccagcaccctcaggagcagcagcagtcgcccgagttgccgcttcatggtctcctggctctcttcaaagttcccttgcacgagctccatgaagccacagaaacaccagaaagcatccacctcgttctgaatgacgtagaggatcggggagagaagatcactcatgccctggacgtagccgaggtcgaagtgatacatgcagtaggtgaggaggatatcgttcagcaggcccagccccgggttctcgggaccctcgtagaacttgttggtcctgtcagtgcggctcacatccctttcgatgaggctgcggtatccatgcagaagtgagtttctccgctcctgctcagggctcacagatttccactgcagcttcatgcggaaatactcatccgttttcttgcgtatgtgggccttgtgctcctcagctgtgccttcccagctgaggtaccctaggaggaacttccaggcctcgcgccgcaggctggggctcagaccccccgagaagatccggttcttcagctcagggacctgctgcaggcgaccttcagggcccacgtggcgtgcccactcctcctctgtaactggagggccccgctccacggttggccgaggccccagctccacacaggaaatgacctcgaatccaggctcgggctcatcgtcgggtggcgggggaaggtcggaggcggctccctcaggctgtggctgcagggcaccccggaagaagttggtcactcgggagaagctgctgaaggtggtggagtagggatcctggaggaagcgtgacaccacattggagctgtcctggtcaaagagctgcaggtggtggaaggagttggagagagcagaggagtcgtgggggaagacaaggtagaggcgggagtcctgcggggagctggccaacagcaggtagcggctgaggacgcggagcagggcgcgggtgcccccgcggtggaagtgcagtgcgggcagggaacctccagcctgggtcaccagaaccaggtaggcccagctgaggcctggcttggagcggcggatggactttagctcccccagactcactgagaaggcccaggagccctgggggcagctgggctctgcacctctcgtgggctctgagtggcagggctgtggccgcacagtgctgatgacagcccagtcaggttcatagccggggtcaaaggttggttcctcctcagaagcacatgagtcacccccactggagtccttcttggagaagaggatttgggtggaatctccagcctcctctacaggagcccagtgcaggaggacgtcattgtccttttccacgacacggatgacaccagcgatgagagagtctcggtcctgatcttcttagcgcaggtgtgcaggtacactccgc

SEQ ID NO: 323083 - DNA, 1101 bp, Homo Sapiens
atgcgatcagaattttattttattttttgtttacacatgaatataaaaatatagaaaaaggcttaattcatgaagttgctataggtttctctttctcaaaagtgctcacatgagggtcacaagagcacttatttgtcagacatttgtacactatatactaattctagaaatagcatcttcaggagaccccaaacctgaggatcacatggacccaatcatatcatctgtgtgaagagaccaatcctcagaaatatcaagaaagtgagatggctgcagaggttgagcctcctgagcccctgcttggtgacaagggacctgggtatgctcttcttcactgaagacacaaggtggacaatcgcagttggggcctttgactggactgtgacaagctgaacacctcgtagcatttctcatccttctgggctgtggccctgctcttgctggctactctcatggagcagggcttggtgagccatggggacttttggggggcagcacatgacactgggatcacaaacttagatggcgtgcccttagaagagtagtgtatctcagtgctgtagataaccatgtcctgagagacagctttggccctgatgccacattcagtaacacggtaggtgaactggtaggcgtgtggctgaacatggtttggggggcaacccaggcccaagtgtagttcatgaaagtgtacacacacatcgttgtttagcatgaaggggtgcactgtgaccatgaaccagtctatggagcacagcacagtcattggactttgtcctgaaccggctgaaaacgcagaggtgaggaggatcatcagtcctatgaacttaaaaactttcatccctgcagccaatcagataatgaaccacaggaaacaggaagccgtccagtgaggatttcttcttctggcagctggggataatttgtcagtttcctttgaaatgtggctttgtgctcactggtgaaggcagctgccaaatttccaaagggaagaaggaacttgctgtgtctgtatttgcccccaggattggaaaaatgtatctcagtcactggaactgaagaggggtggcctttaccttcataggagagtcactctttata

SEQ ID NO: 323084 - DNA, 450 bp, Homo Sapiens
  misc_feature (412)..(412): n is a, c, g, or t
tttatgcgatcagaattttattttattttttgtttacacatgaatataaaaatatagaaaaaggcttaattcatgaagttgctataggtttctctttctcaaaagtgctcacatgagggtcacaagagcacttatttgtcagacatttgtacactatatactaattctagaaatagcatcttcaggagaccccaaacctgaggatcacatgggacccaatcatatcatctgtgtgaagagaccaatcctcagaaatatcaagaaagtgaggatgggctgcagaggttgagcctcctgaggcccctgcttgggtgaccaggggacctgggggtatggctcttcttcactgaaggacaccagggtgggaccaatcgcagtttggggcctttgactgggcctgtggaccaggctngaaccacctcgtgggcatttctacatccttctggggct

SEQ ID NO: 323085 - DNA, 884 bp, Homo Sapiens
gtggccagtagcggtccaaggatcctcgcacgtttgaggccaaagtcccatggtgcggggcaggtagtcagggtctgcgttcaccccgcccgatgatctcgcacaggaccgatcccaaaggagcacacatccactttctcatcatagctgcggccgttgatcatctcaggtgccatccagtaggggttgcccaccacggtgtagcgcttcttgcggtctggcttcttgaggctccgcaggccctcaggctgagtcttctcgtccaccatgagacgcgccagcccgaagtcagccaccaccacattcttgttctcgcggaccaggcagttgtgggagttgaggtctcggtggatgatgttcatggagtggaggtaggccatccctgatgcgatgtccttggcaaagctcactctctggctccatgggtactggctgtccatgctcttgatgatgccccggagcgtgccgcccttgatgtactcagtgatgaagttgagcctcttgtccttgtagagcaccccgatgaacttgagcacgttggggtgttccaggcatcgcatgaccttcacctccttgaggaacgtcctctgggtctcctcgtcgaaccggatcagctccttcatcaccatcacctcacctgtctcacggtgtgtcaccttgatagcctggccgaagcagcccttgcccagcacctccccgtggatgaggtccgacggccggaagatgcggtgtgtgccggcagactacgcggagggactcagagcgacccaggtccttgcgctgggaggccggggagcccagtgagccagcgcccggagacctgtcgatgctgcagctcctcaagacaggtttctgccgggcagagctgcccgcctccccgctgg

SEQ ID NO: 323086 - DNA, 1288 bp, Homo Sapiens
  misc_feature (1186)..(1186): n is a, c, g, or t
ttccgcagacggctccaggctctgacaagcgggtggagcgtggctgccagctttcagagacagagggagctgctaatgtacaaacggatcctcctccgcctgccttcgtctgtcctctgcggcagcagtttccaggcagaacagcccatcactgccagatgcgagcagttcttccacttggtcaactctgagatgagaaacttctgctcccacggaggtgccctggacacaggacatcactgcccacttcttcaggggcctcctgaacgcctgtctgcggagcagagacccctccctgatggtcgacttcatactggccaagtgccagacgaaatgccccttaattttgacctctgctctggtgtggtggccgagcctggagcctgtgctgctctgccggtggaggagacactgccagagcccgctgccccgggaactgcagaagctacaagaaggccggcagtttgccagcgactattggttttccttttcttcttctccttgatgggcctgctgtcgtcacatctgacctcaaatagcaccacagacctgccaaaggctttccacgtttgtgcagcaatcctcgagtgtttagagaagaggaagatatcctggctggcactctttcagttgacagagagtggtaagaaacacgctgctgaggcacaaatgcggagggccgctcttttcagaggcatcttgcaaatggttaagaacgagccctccttgaggttccttgctaagtaagtttataagctccattttagttgggacagattaagcacaaacttgtttaaagcaataagataatttactggctcactggtcaaccccaggaccaatgggcctatcatggggactgcctctctctgcaccacacccaccctcctgcaagaggtcgacccccccatcctctcccagctgctgacaggtacctgggtatcctcagctcaggctgttcgccccacactatccccacagccaggcctcccagggtacacgtcccgacccccaggggtgtccccagcactgataataggcagagatgtccagagttgcctgagccacttcttggtgttgcagacctcaggctggggcggctcctcctccgtgtggccccggatcagcacaccaggctgctgcctttcgctttttacaggtacctccacccacggggctgggtcanggcctggggcagtgttttcccagacccccatctcaggcacctctgggtccgccccaaataggggaaagggtttgtcggtgccctctggctccacagaatgaa

SEQ ID NO: 323087 - DNA, 922 bp, Homo Sapiens
  misc_feature (145)..(145): n is a, c, g, or t
  misc_feature (600)..(600): n is a, c, g, or t
  misc_feature (673)..(673): n is a, c, g, or t
aaaggcccctgggaaaaaccaacttttcggaggttagttatccaggcgttagaccatggatgccagaggccggccctgctgcccagggtactgccctcaacaattggggggaccatgcagaagtactttttaaaaacggttgcanccattcacaggcagggcagctgggagcagaggctgcggggaccctcagggcttacctgggctagggggctgctgggctgagcaagacgggcgctcctctcccatcacttccctcagttggtgacaatctggcacacaaaagctttcctgatgttggcgggcacaggctcgggaacgtgcacgggtacgggcatgggcacggctattgatacgaggatggcggagtttaggagaagcatgggcttttgtctggttgtagatcaggaagttgagcacagcaaactccaacagagcgcagaagcagaagacgaagcagatggcgatatagaaatccaaggctgtgatataggagacacgcgggaaattcttacgagaaaaggtgcccagcgtggtcatggtcagaacagaggtgatccctagagaggtccgggctggagcagactctgtcttgatccnaaaaggaaacccagggagagcatcgtgggtcacggaagaagggacatagttttgaaaggcaccatagccaaanccgcctgctcacattgaagaaaatcgtcatgaccatgaagtcactgcaagaccaatggccagttgagagctaagccaaggccagaatcttaatagcttccttctcagttcactgtcctacacccaatgtctgtctctgcaggttggcaagagagtcaggtgaaagtgaaaaaatcaattagccttctagatatcatgcccacgcagctgatatccagatgcatcccgggaatccggaccggtccagcct

SEQ ID NO: 323088 - DNA, 1270 bp, Homo Sapiens
  misc_feature (1104)..(1112): n is a, c, g, or t
aaactcactgcgcaccccctgacggaattttttatgcccgaggcctgggtggcgatttcggcacgaggcaggagtctgtgtgggatgaagccatgagacggctgcaggagcggatggggcggcttctgagtggccgagggctggatggggccgtggacatgggggcccggggggctgccgcatgtgacctggtccagcgctttgtgcgtgaggtccagagccagggtgcacaggtgttccaggctggtgatgtgccttcggaacgcccattctatcccccaaccttggtctccaacctgcccccagcctccccatgtgcccaggtggaggtgccgtggcctgtggtcgtggcctcccccttccgcacagccaaggaggcactgttggtggccaacgggacgccccgcgggggcagcgccagtgtgtggagcgagaggcctggggcaggcgctggagctgggctatgggctccaggtgggcactgtctggatcaacgcccacggtctcagagacccttcggtgcccacaggcggctgcaaggagagtgggtgttcctggcacgggggggcccagacgggctgtatgagtatctgcggccctcagggacccctgcccggctttcctgcctctccaagaacctgaactatgacacctttggcctcgctgttccctcaaccctgccggctgggcctgaaatagggcccagcccagcacccccctatgggctcttcgttgggggccgtttccaggctcctggggcccgaagctccaggcccatccgggattcgtctggcaacctccatggctacgtggctgagggtggagccaaggacatccgaggtgctgtggaggccgctcacccagctttccctggctgggcgggcccttccccaggagcccgggcagccctgctgggggccctggcggctgcactggaaccgcccgaaattccaccctggcccccaaggctggaaaagcaaggaagcggaacctccaaggctcccggaggctgaaggtggaatttgaaccgcacgaaaaactttctggccgggcgcggcgccccgggcgcgagggccccatggtccacaaccctttccacgtatnnnnnnnnnttaccatagcccccgcgctacgcctccttcccgctatcccccattgcgtcgcgccccgaattccccgtagtttcccccctcacacacgcgtcccacttcacctctgctatgccaccccttacccgctgtgggttgcaggcgctacgcatttttacccc

SEQ ID NO: 323089 - DNA, 885 bp, Homo Sapiens
  misc_feature (77)..(77): n is a, c, g, or t
tgcagccatgcattcccataagctccggaaaggtagggcctgcccctttgggccataggttcctccacaaaattctnccagggcatagcaggctttggctaggtggtgtgtgtgtccaagaggcaccgacttcaagtaggcgaggagcagtggcattacctcccttgaatagctgctgatatggggctgtaggttttctgagaactggcccagggcaaacagcgcagcattgcgtacaacttgcgaggggtcctccaggcccttgcacacaatctgcagcagtgggggcagcagtctctgcctgatgtggtcgccagctccgtcagacagcacggccagcaccaggagtccagctttgcgctggtatgggctctcgctccgcaaagcctcttccaacatgggcatcagctggggacagagcttctcggggggcaggtgtagtgccagcatgtccacaacttgtacagcgaaatgcttgggagtctcccccatcagctcaatctccaactcttcctcttctgaatcctggtcctcgggatccaactggcctggtgggggctcagcagccacaatggggaaaagggtgtgcagcaagggtggcaggagacgattcgttcagtaaggccttgctcttgactttgaccaagaaagtgaggcagcagagaatacgtatgcgtatcgcattgcccagggccacatttctagctacctccaggcagaatgtgaggacttcagagaggtagggggtgatgaccggcacctctgactccaacagttcatccaaagcctcaagggcctcacaggcctttgcctcatctatggggatcagagtctgcatggccatgatcagcttgggcaccaacatccgagcgagaggcacatttc

SEQ ID NO: 323090 - DNA, 954 bp, Homo Sapiens
ggtccgtgtgttgcgcggtatgtctgttgtcggtcctgttgttgggctatgccactggtccgtggtgtggttgcctatgtgtgtgcttttctcttctgttgtttgtgagtgcctttcatgccacgacgtgctagtggatctgcttacaggcttgtccgtctggagtccatggtagttgtgttcatcatgcggtatgttgtggtatgcctcgctctaatgagatgtgtccggagatgtgccttgttaagattagctttcctgcagataacagcgaccgagcttcgtgtcgaagcctgttctgccatgcaggtgttcccctcctctctcaccagatcgtctgtgtctcaaagggccaggttgaatgatatgtctgtgtgtgctctgccatgttgtatctgtaacgggccgtctgatatcatgtcgttgtttgctgtcccctgtggagtatggtacagaggacgatgttttttaaccatatagattgcccagtgggtctactgctgcctcagacgtttttaggagtagagctaatttggggcatctggatctagaggctgctcatctgattcatgcgtgacaagtgttctagccactttgaggaatgactgaagatgttctgaagataagtctgtcctcttgttatttacgagatccatttggagatgtagttgtttgctgccttcctgcagccccagcttgcacagtgatggggtcagcgaggagcaagcgtggggatctttttccagagttggtgagggcaccggtctgccagtgtaagttcatcggagaggagttctcatagatggttttcccgtctggggcgaaggcgacaggctgaggctcagttttttcactcgccacatcttcaaccagaaggcaggtctatcatcgtctcagaccaagtcgagtaccctgacgccgtggtcgacgatatcccataattccggccgacca

SEQ ID NO: 323091 - DNA, 546 bp, Homo Sapiens
  misc_feature (74)..(74): n is a, c, g, or t
  misc_feature (91)..(91): n is a, c, g, or t
  misc_feature (112)..(112): n is a, c, g, or t
  misc_feature (122)..(122): n is a, c, g, or t
  misc_feature (137)..(137): n is a, c, g, or t
  misc_feature (187)..(187): n is a, c, g, or t
aagccccccgtttagaatccccatggccagaagacaaaacagcaatacctttaaaagggaccctttgaagaaanaagacgatctggtgaanaaaaggagggtgggcaccccntgcaatgggnagaacagggttttcnaagaaagttgcctgcctgtatcctgaagaaaacccctatcctttccaggnaatcctcccgtcccccatctccttagagggagtctccccacccaaatcccctgttcctgaacaacctacattgctcccaaggaaagcctgagcagtagaactgaggctgtgccgtgaggaccttagtaccttctgaaagtaacgccttcttgccttcctctgttctctggctttccccttcaaactgccttggcagcagatttccgtgtcaatcatgtggacccagaggaggaaattgtagagcatggagctatggaggaaagagaaatgaggtttcccacacatcctaaggagtctgaaacagaagatcaagcacttgtctcaagtgtggaagatattctgtccacatgcctgacacc

SEQ ID NO: 323092 - DNA, 1281 bp, Homo Sapiens
ataacccccactccccctccaatgttgtgtacaagagattggtagttgctgtaaaaccccttctttttttgttatcatgccagggccgcgttgggggacccctttgggcttggtttctttcagcaaaggaagcttaaaagggcccagacggagttagcttctttccaggcttcttggccccccatcccagagttggttagtgcaagggccccctatctcgggaagtcccaccaaacccttgggtatccttgcggaaagtagccaaaggcaccaggccaccgtctgaggatcagagagcggtagcttgcctggcaaactcttcctggctgatcattcgactccggcctggctctgccccagcgtccacatagccagcggacagcccagccttccgaagcacttttcccagttcccagagctgtggttccaacgccaccttcagccggcccaccacaatcacaggtaagctccctacaaactcacattcggtggctggaatgcccagagcctgtgccatgaccctctgaacattgttggcatagagggtggggtccctgctctcctcagggctggggtgatacacaggaaggaactccacatccacaatgctgcagggctgagaggctgtgagccagaggactttgagtactccagggacccctccatggcccagctggtggtgtccagactgttggggtagcggatgaggacaggctgcacaggcacccctgcgatgaaggctcctggtttgaacttaagcaaagccttcttgttggaacaggtgccctcaggaaagaatagcacctgcggccacttgcctcctgaggtggcccgccttcggacctcctccaccactctgcgtcgagaagccgggtcatgccgggataccaggatggcttggttgaatcgaagaagggctccaatgacaggaacggaaaggttctcagctcgggacacaactttgggcaggtcacagggcagcagaacaatggggtcaaagaaagtggagtgtggggcagcaacaaggacaggggcttgaaggcgagaggctcgctggccacgaacgcgaatccggaggaagcccagcaggaaaaacagcaggcggctcaggcctagcaccccgttgtggcacacagtcttcctccatcctgtaattggctcctgaagctgctcctcactaagaccggccacttgaagccaggcaaagggccagaggagaaagaggacgataaaggccagaagcactcggatgggggccagcaatgcccccaggaggcagaa

SEQ ID NO: 323093 - DNA, 1196 bp, Homo Sapiens
  misc_feature (102)..(152): n is a, c, g, or t
  misc_feature (181)..(181): n is a, c, g, or t
ctctggaaaatgctggggtccagaggccaagtgtttggggagcaagccccggttttccttctgtccttccaggggagcagctgggcctgaggagaaaagcannnnnnnnnnnnnnnnnnnnnnnnnnnnnnnnnnnnnnnnnnnnnnnnnnnggggcagttggttgcccctccctgacccntgggctctggaaggtcagagcagcagagcagactgcccgttttccccccatctcagggcctggctgaggcagggcaggcaggagagaggcccctgagggcgggtttcaggccctgggccaggcactcagatggggtgcacgaactggtagacgaggcgctgggagatgtctgggttccgggatgatggcctttttgtaatactggcggatggagcggctcagcttgtcgtagttcatggcgggacggttcttgcggatgcccccacagccggggccacctgggctgagtcctcaattttgaagatgcccttctccttgttgagccacctaatgaagcggccatagctgtggggcctgagtagcaactccttgaggaactgccacaggtggatgggctgcccggagcatgatgagtccacctcgctgtcggtccagctctcctcactggtcgaggcacagtagtgaatcgccccaggtgaagtccgctctttcatccaggccgctgacttccagatgtccaggtgggcgtgcagcacatccccacccaggggcgagcgctggcggaactgctcctccgacatggcgcacagctccttgcccgccagctcctggaaggccttgcccatggggggcagccggtattggtgctctgtccacaggagccacttctgcacattgctggggctccagtccatgggatctgcggtgatgttgagcagcttgcaggccgtctcgatgtccttgagcacttcgcccaccaccatggactgcacctgctccagcgagtgctcctccaaggtcagcccgccgggcaccaagtccaggctgcccgctggggcttggctgtcaatgaccgggcactgctcaggctcctcaggtggctcctcccgactgctggccccaggggccttggctgcccagctgctgtcctcagggtacagcatgtcaaagtaggagaggtagaaggcggacaggccctgctcgggcgtggcgggtggactgggactccagtccc

SEQ ID NO: 323094 - DNA, 1484 bp, Homo Sapiens
  misc_feature (208)..(230): n is a, c, g, or t
tgggcgggaaagggggccctcccggcccgttgagggaccagggaggcagggaccccgccagtttagagaggagggcgtttcaggtgaaacggtaggtaagggttcctccgggcggtgagccatgccctgggtccattgaaagaaaatgaggtgggccttggctgccctgtgccggggggccccggtgcctgcggttgttgggcccacnnnnnnnnnnnnnnnnnnnnnnncccgccagagggtgccatctgctggtacatgggctgctgcccccgcgatgtagggctgctggggtggcagaaacccatcctggcttggaggggtggtcatgagattctgcatgttgtaaggctggtagcccatggagactgactggctccccatgtagcccatggtgctggactgcggaggctgagagatggccgggaggctctgtggggcctgggaggccacgttctggtagcccgctgtgggagtaggctggtaggatgagtaagcggggctggcggtgggtccggcctgggcctggggggccgcctgcgccccagtggcccctgctgggtacatgtaggcactcaccatgctgggatcagccgcagtgctgggcatgctggggtaggggccagcggcaggggccggctggctcatgtacacgccgtgcattggggagccctccaccgagcccggcagggctgaaggtgctggggaagctggctggtcccgagggctggtagagcacacctccggctgcgggcatggcctggagctgggcgtagggcagggggaaggcgggcatctgcgcgcgcatctggaccgtctgcttctgctgctccagccgcatctgccgctccttctcctgctcctgcaggcgctggatggccagctgcctctgcacctccaggtactcctgcttcttctgccgcattatctccagcttctgggccagctggatctggcgctggcgctctgcctcctcggctgcccggcgaagcttctcccggtgctcttcgcgcagggcactcagcgccccccgggcatcgcggatctgtgccagcttgtcctgcagcccctcatagtacagcctgcgctcgtccagctggttgagcagctccagcagctgcgggtgcatgccgttgatggactcactaaaggggccaccagagggaggaatgggctgagagtctgtctccgggagggggttctccaccacgttggtgggggctgcgtgcccttccccaggctgtgcagccggctccgtcaggggcacgggcgcagatggcgtggggctcttgcgagcctcctcctgcttcttctcccagtagttccggttgagataccgtgcgagctcagggtcgatgtcctcagccagaggcgccgacgagttcacaggtgaagagtacaggctgctggcggggggcgctgaggaggccgagggcatgggctccgccttggggtacgaagtgtacgtggacttctgtctcagc

SEQ ID NO: 323095 - DNA, 2194 bp, Homo Sapiens
  misc_feature (23)..(23): n is a, c, g, or t
  misc_feature (69)..(69): n is a, c, g, or t
  misc_feature (1294)..(1294): n is a, c, g, or t
ctaaaggccaattaccctggggnctccccctaatagctgtcaagcagtgtaagcaaaagcccctctgcntgccccctaaagccccaaactccatgccctgccctcaatccatggtttgtttttgccttctggaaggggtaagatggagggtgggaaatgctttggagctaacatgggatgaaacagggagggttacccaacctgccattttttatccaaactctgcaggcaaatccagacagagtctcagcaagactgaaaaccagggaccaaaccaaactctgggagcttcccacagacatgtcacatgtgaccaagggttcctgcacatagtagtagcaaaggtatggtgttcatggaactctaaaggcaggaacaaaaacagccctgaagatcaatccctccgtgacaggcattcacttctgccctaagtgtgtcagaaagatcccattttgtttcctaactcaggccaaccctcctttgcctccaaaattcagtgttaactaaccaattacttaagagacggatccctcttccttctgtggatagttcatctgttaaggatccattatcacctgtctcactcctcctaaggagtcctagtataaaagggccagggtaggagtagggaagctggttggcatggagggtcacaagatccagaatggctagggatggaaaaagaataccctggttctttgggggattctgccaaaggagctttattgaccatttttttaaaggaaaaacactgaatgatcttgaggatggtaaactgtctcctcttctgggttccagaagcccttatgctacgttcagtattaagaaaagccctgaacaagtggaggatgctgcttctggcagcagggagggagggtagatgccacagccaacccagagaatggcaaacagtgccaatccaaacaaggcagggaacctctgtgtggtgtgaatgggcatgtgactgtgatgcaaagtgcctggggctcacaggctcccaacagccagttctcgcagataggactgggtaaggctgcgcagttcgtccatggcatagtcctcaggcatgggaagccggccaatgtggggagccaagaggcgcaaagggactcgctgagggtctggtgttgagtcggaggttctatcaggaggatgatgcagactcagcaccacgcgcagcaggttggctacacgtttggccatgtctgactgagccaggcgatctttagcactgtaacactgaatctgctctatcccgactgcccagtgaagtcactttgatgtgtaactgctnccaggtcattacctgagcaatccaccagaaagctaagtgtcggatgatgagcttgtggcagcggtttccagtgctcagccctaaataagcaaagggcctctaagtgcttgtcagattccatgtgtgctcgcacagctttggcctcgtggatccatttggcaggtacacggaagcttctgggtaaggaaagtcttctttagcccaagattccaggggtctccaacagctggcagtgccgggtaagcagctctcgaacagccttctcacgtatgcctgagttgtcaatgtgcaggaggacaaagatggcccactcccagagcccctcactttcaagctggccagcgtaactggcctgtagcacaccttcacactgcgctgagagatgggtgtagttaagagccctcagcacttcccacaagtgccagcttaggcggtagtccaaaggatctgctgttatgcttcgaggctccagcagctggttgagatcataatgtctgtcactgtagagttttagaaggtgaaagcagacatctcgaagtggtgtctgtgagttttgctcctccgctatcacacagccagaaccctccagatacgaaggaagtggggagcaggcatatctgtcactgtcagaggtattctgaaatgcttcttcatacatgctgagtgccctagaaatggaggctgttggtggaagcaaataccaaagatggatagccagggagcgtttccaatccaactgggagcacacgtttatttgcttcttttctgagagctgccacaccggttttccagccaacagagcaaagatgcgcagtctctcatcctggatgaaggagtctgcttggagccgacgcgtggtcgacgatatcccgtaaattccggaccggtaccagcctgctt

SEQ ID NO: 323096 - DNA, 668 bp, Homo Sapiens
ccaggaatcgctataaacattttatttattttttaagaaagtagcttcagaaaaagaggaaaatatctagatcatttatttatacatatatatattttttaataaaaacctttacattatcttcatgcataaagacccaggtgtggccatattgcctgagatagccctaacaccagctatctcatgccattacctggggctccctatagctgtcagcagtgtagcaaaggccctctgcctgcccctaacgcccaactccatgcctgcctcagtcatggtttgtttttgcttctggaaggggtagatggagggtgggaaatgctttggagctaacatgggatgaacagggagggttacccaacctgccattttttatccaaactctgcaggcaaatccagacagagttttcaggcaagactgaaaaccaggggaccaaaccaaactctggggagtttcccacagacatgtcacatgtggcccaagggttcctgcacatagtagtagcaaaggtatggtgttcatggaactctaaaggcaggaacaaaaacagccctgaagatcaatccctccgtgacaggcattcacttctgccctaagtgtgtcagaaagatcccattttgtttcctaactcaggccaaccctcctttgcctccaaaattcagtgtta

SEQ ID NO: 323097 - DNA, 1571 bp, Homo Sapiens
  misc_feature (569)..(583): n is a, c, g, or t
  misc_feature (1407)..(1407): n is a, c, g, or t
  misc_feature (1461)..(1461): n is a, c, g, or t
ttaatcttatcatctttacatacaacaaacatgtcaagaccccctattgtctttgaaaaggtcccccctcccccgccaaaatctgtagaccataagtcttggcctacactgacctggtttgtaaaatatcttcctctgtgtacttttcccttcagcctcaggctcttggctgattcgctcacaacagaagcagcttggctttcctctggaagtaccaatttgaaagcccaccagcctgcaaacctagagtgtattctccacccctgggtcacagaacttcgttctccccggctctgtaacccaaggaccctacagcctctgaggcctaacacccaagctcttccttgcagaagagctgagatgctaaggagaccatctggagtgtcataataagcccttgggatttgctgagctcccacatggctttcttcaaccacctggcccactttcttcaaccacattccactttggaatgcgtgtctttaaggcaccaagtgatcttaagaatgggctctgtttttgaattcagcaatccaagttcctatctatctatctcggtgggacctccnnnnnnnnnnnnnnnggattggcttggcttctaatgtaaggcctgccttttacacaccagttgtgtgtttgttagtggctgctggatgccagtccacaccctcaaacacctcacagtcccaaacggggtgctcctacaggtcccagggtcctgttagtggaagaaaggcagttccaggaagtcttcctctagccttcatgacaggaagtagttaatcctctgggaaatagacttgcagccctgggaagaaaagagttgttcctccttggggacatacaccatcatctgggctatttcatccagtgtctcttctttatacaggagctcctggctcaggaaggcatcccgtgcacacagcctcacgtgacggtactccaaaggcaggaaggggatgaagtagtcaatcaggttttccttcacaagacggctgtggccaaagccattgtctatggtctccacaatctccgcctggaggtggggctccaggtgttccatcgtaatttcttcccgggaccatccagccttgagcaactttaggaccacctcattgattatatcgcccctgagattactgagaaacagaaagatagtccatggagactcagccctgtggccctcaggggcccggcgttctaagtgtggcccaaggacctccaggcagccctgggtgcagcttcttcggttcattgaagatgaacagggtctggtggcagagctgctgcgtctcccggttctggctcatcagctgctccttgtacaggtccacatatttggggtgaggaaagtggaacgtggcgatgaacatcctgacaccagtcactcatcaaagcccgttcccngatacaggttctccaccagccatccgtgccacgaagtttcttgcctgtgccagnaccagccgtggaacgacagagcaagggccttttctggctggggcgtctctaagtagcccctcactgttcttaggaccagctgctggaccaaatgctggccatgcagccgc

SEQ ID NO: 323098 - DNA, 276 bp, Homo Sapiens; identical to SEQ ID NO: 125470

SEQ ID NO: 323099 - DNA, 864 bp, Homo Sapiens
cctgtgccccctgaggcggcttctggcggctgcacccatgtcccaagtgacaggcatcacctcccttgtgccccagagtttcctctaagtcccggccaggccaccgtccctttccgatccggataaccagcgaatactctaattccgttaggcgtgtcctgagccaccctctggaggaggcggcatgcagtttcatatgcgtctaacggcctccatccaacaggacaggcgggagaacggcggacggcctgggcgtgtggcaggggctgcttccctcattttaaacgcgcctacagggtcactatagcaaacaaaattcaggagagaaggggccgggccacgcgtccggcgggctctagggcgcctgtcacctgaggctcacacccaaggtctgtccctacaggtggtcccacttcgacaggaagttcctcagcagggtcctcatgagacggtcggcccagaagtctcgagaccggatcctgaatgtcttccacgagctgaacctgaaggatgccatcagctacgtggctgaggtagcagagccgcttgctctgccgggtcggggttgcagcaggctcgggcactggctgattcagttctggacatgaggccaatggagttttagggtctcctcctgtatgtggccatggtcatgcagcttccctggggaagagcccagcctcgggagctgagagtcacagacagggctgtggtggctcctggcctgggggtggcatggaagaggggagaggtgcagaaagagggggtgggtgtctcctcccacaagccctcctatattaggccgtggccagactcccttagtgctggacggaaggtgaaagggaggggcagcagcggactggg

SEQ ID NO: 323100 - DNA, 838 bp, Homo Sapiens
  misc_feature (141)..(141): n is a, c, g, or t
tttaaaaaatctcaacttccttttcatcctgacaggatttccccaagcgtgctgcagaaaaagcagcatttaaatagagtcctgaggtaacagttttccgagtgcccaggcactcgaggcggggcggggctggccctttgnttgacagtgtcccacagagccagcctgccactagtcctctagcactgagctcttggcctccacatactccagggccttggccttgactgcctgcacatccttctcagtgccatgctgcttctcgtagtccaggtagcgcttgaagaagaacttcattctcttgggggccaagctcagatgaatgacccgctcaaagatgtcccggacgtccttctggtctgcctgtgcttgatggtcatgtcgatatatgaccgaccagacatctgtgcgctttgggtaggtgctcacgcgtgttctcactaaatggctttggcccgctctgcatccacccagctgaaactcaagctgggcaaacttggcaatgacatccacatggctccttgctaggcaggcactccagggctcgctgcaagcacgcggtgcactggctgcagcctggctcctccgcagaaggaaggcgccgtatttgatccacacagctttctcctgccggaaacgcttcagcatccggttgtagagttcaccagcttcctggaatttctctgacttggcgtagatgtcagccaggtggagaaagactttgagaggctcgttgtactgcacggctcgctcaaagaccttggtcagggactcctgagagccgtacatgttctccaggttcagcagagccacccacacgttcagcttctcctgctcc

SEQ ID NO: 323101 - DNA, 648 bp, Homo Sapiens
gtggccacccatcgcggtaaggctcgggatggagacagcatggacagggaccttcgcacaaaaggcagtcgggagggcttccttcccaaaggcacagccccacctggtctttctcagcccacgacgggagcagagccatgtcgaagccgtgccccacacagggtggacaaggacatggcctgacagctcctcagaaatccttagagatttttccaaacgcaggttaccagggcttttgcagagagaggggcagcagggacgtgttgctgaacagtccctggggactttacactgacttgccagtgagagcccacatctgcccaccaggatggctccccagcaccacggcgtcacaagcaccacactctccaccgtggggacgcccagatggctcggcaggcaggccgggctggggagctgacagcagacgcctgggactctgcccaggcgtcctcacccacaaccttttaactgtaactggcagaggagacagcagggagggcagaaggtacagtgatggctaggatgcagttctaggttttgccagacatactttcaggggccactcctggctacctaattaatctacctgtgtataagaattttttagcttattaaatattccaagaggccaggcatggtggctca

SEQ ID NO: 323102 - DNA, 619 bp, Homo Sapiens
  misc_feature (67)..(67): n is a, c, g, or t
  misc_feature (103)..(103): n is a, c, g, or t
  misc_feature (140)..(140): n is a, c, g, or t
  misc_feature (181)..(475): n is a, c, g, or t
ggcttaaaaagactgcttcccattaacttactggctatacccatctgtatactaataaaaaaccagntttgatttggaaggactgacctcaaactaccgaaantatgaaacctgtctttctgctttggagatatttaccntaatcatgttctgcagtagaataatttagttcttttgtctnnnnnnnnnnnnnnnnnnnnnnnnnnnnnnnnnnnnnnnnnnnnnnnnnnnnnnnnnnnnnnnnnnnnnnnnnnnnnnnnnnnnnnnnnnnnnnnnnnnnnnnnnnnnnnnnnnnnnnnnnnnnnnnnnnnnnnnnnnnnnnnnnnnnnnnnnnnnnnnnnnnnnnnnnnnnnnnnnnnnnnnnnnnnnnnnnnnnnnnnnnnnnnnnnnnnnnnnnnnnnnnnnnnnnnnnnnnnnnnnnnnnnnnnnnnnnnnnnnnnnnnnnnnnnnnnnnnnnnnnnnnnnnnnnnnnnnnaaaaatttttttagagatgggacatggaatgatcttgaatagtgttggtgccacctatgttgtggcatcattttgaaaccaatcattcagagtgctttttttggtaaggcattattttttaatgcaggtatgccactactggga

SEQ ID NO: 323103 - DNA, 1408 bp, Homo Sapiens
  misc_feature (166)..(166): n is a, c, g, or t
  misc_feature (795)..(795): n is a, c, g, or t
tccccccctcggtgacaccacacaggagctttcagacccagaaaataaaggttaacccttaccaggaaccaagagctcctggaggacacagaatacggcctttaactggtatttaaccccactttaactaactcaacagactgggctcttccaggggttgggggcnaccaggatatggaaaatgatgggatgacacagggggaatctggctgggccagacaggcaggacacccacaccatctttcccatggacagcacctgaggcctccagcaggccctcagcccggcaggcccataggcagctggcttcaggcctcgaaaggcaagggaggtagcaggactggcgcaggcccctcactggtcctgcagccggctacagagctcccgccggctccgctccccagcccagctgcgagtcttgagcggaaggtctttagctcatccttgaagcctcgtggttcatggccggtagtccctggggttcacagaagttcgggtgctgagggaagaactccttgtagccgcctttcaggatatacatctcagggtagtagaggctggggtagtcgttgacagcacggtctcgttccctgatgaaacggcacatgcggggcccacgctcagatgagaattcacagtggaaaatgaggatgactctcttgtccaggctacagggcgcgatggggctcttcagtaggaagctctcggcgtcgcgttccaggggcaagttcaccgcagtcttgatgtgcccgccttcatattcataggggtatctgcagtctacaatcaccaaancttatcccacgatgttgctgaacttgcccgtcaatagggccaccatcgttttctggtgagatgtacttgaggtcttggtgctttccgtctactgtctgtaggaggaaggccttagagtaatctccaatcagctctcggtggtcactgtccaggaggttctcgatctcatcgtgacacagtgattttgagcggaggacgcgggctttaggttcctcagcctcctgctgctcctcaggaggggtcacgctccgcctccgcttattctgcacgggcgtgtccctgtcctggggccgctccagcctcttgaggatgggccggatcacgctgcagggcatggacggagagcggaagagccgctggcacttgctgtacatgacgaggtccttttcctcttccttttccaaggtcttgaccagtggggcactaatgagactctccatgcctgggggaactgcatcatcatcctttaagtcactctctaggatgtccacaaatccatcatcttcctcagtatccccctctgcaggggtcagagagaagcgacctagggccagggggctgagctcctccacttccatcttccggtcaggactgagacacatcaggtcggggg

SEQ ID NO: 323104 - DNA, 1258 bp, Homo Sapiens
cggggtcttgaacacccccaggggcccaagttcacgggaccgggacctgggaagacagggggtgtccaccaagggggcagggccccggccggttggtcctgcgggggattctgggtcccgcgggggcgggaaccggttcgccggtggcgcgcatgcgccgagtttcgggcgggaagggccaccttggtgcagaagaggccgagcagcagctggcgctggcactcctcccctttggccagggggtccccccagcgaggaggttgttgcgcatccagccggggcagtgcctctctgtaggcggcgcaggacagcggcacggacggcagcgactggacgcggcgcagctccacctgctccggcagcctggagggcaggtgcctgcccagcttcctcttggcgcgcatcaccaggtactggcagatgctgcccgtctgctccttcatccaccggatgtcctcgggaacgtcgggcagccactccagcaagcggatggtgaaggacagagcgctctccagcggcagcgtgtagggcaccatcatggccgtggccagacgcacaggcagcatgttggagagggtggtcagcaggtccgtgggctccacgcaggcctccagcagggcctcattgagccgggcgggcaggtgctccaggatgtgatcttctccgggcagctgcgagtaatcctccgcttgggcgctctccactgcctggtccttgtcctctgggccgtgggggcgggcggggggcaacgccagcaaggggttgggccggttcaggaggccgttccgctgcagaaagcgcaggccatcccggtatccctgcttgcacatctctcgcagcaccaggggctccggcgggaagagggccttggagaggcggtagaggttgcgcaggttgaactggatgctggtgttggtgacccgcagctcgtggatgttggtggagctgtcctgcggacagatgtcactctcgcccgagaagggggacactgtgatggtgttcttaagctcatagagtggcaggttgtctgaaatgccaccatccacgtagcgcaccccctggagggagggagggatgagcccacagtacacggggatgaaaccgctgcagacattggcctggatgagctcgtccttggagttgaagtgggatataatgacattttcgccgtctgacacgcgggtcagggagatgcccaggcgcccactggcatgctcatggctatcagcaggcaggaccctcgtgccgaattcgccac

SEQ ID NO: 323105 - DNA, 1851 bp, Homo Sapiens
attatagcggggttagcctcgggttttcggaaatttatgaggactcactttaggggggtcggggcaagtttttccccttgtgtccaagaaaggtgggtcaggaaacaggttatggcccagtggccatttcattacctttttttccgccccccgaccatgaatgcctggagtgttttgtgtgtttttttggagatggtattcaactttattaaaaattaaaactacagaaaccaaaccgaatgcacaaataagagagtggggaaacagacagggagcaatggcagctgataactgtggcgagtggataatccgcatgactcacatcccacccctgcgactgaggagcccagaacgctgcgctggcactgtcgtgccctcttccaccacaggggcacagaaacctgcaggagactgaaaacgattacaaacatcttcaaccagctctctggccaaaggcagcaaaagcagcctgaatacgcaactcacgccaagagggcagcagctctcctgacatccatgtaagaaggctaacacctaaaccacacgcaggcatcctgaactcagcagctctgatccaaggtactgagtggagacaaagcactcggaggtggcaagatgttcagcaaccaagtaagacacactggcaaggcatcccacccaaaggtgagaagcacaaagcaggcttggagaaacaaacagtcatgccaggtgcagccagacatcctgctataagccctgaccctagtaccccgagttcatcaagtgctctggttttgtgtccataaagcacagagggcactgaccaccccaaaccagaatcccaaggaatccttatggatggcatagggcctcagaactgctgcaggatcattttccttttcaggtcgtggctgaacttgttcatcctgaagagctcactgtcataaaatgcagagaggttgtggatgttgatctgacgagccttatccaccaagtccttctcagggacctcaatagtgtcctgctgggccccaaagcggttgcgctgatatgtcacctgctctgccactaactgcttcagtatgaagagcaacagctcattgttgtcacgccggaatgaaaggtagcgggcaaaagtcttgcgcatgctgcgcatgacgctgaacttctgtgtgtctatgaagctctccagcatcacgcggatggccatgttgacgtcgtcttcgatcacatagtcccgcagatggatgcgcgcgtgggcctccgccatgcggatcatggactcgatgtgccgcaccgtaatggggatgctgcctgtcgccatagattctttcctcaggtcactgtacatcttggccaccttgtcctggtccatctggttgagcttcgggtggaccctctccttggcgtagatgatgtacttcttcaggacctcctggggcaggggctccacgccatacgtgttgggcatggcgggctcagcagcgctgccattggccagcccctcctcctccttgttgctggggtggtgtctgacgtggctgcccaccacgaagcgggccagcatctcgtcctggactgggtccacggtgtccctcaccacacacaggatgtcaaagcgtgagatgatgggctctgtgaggtccacgttctcagagaaagtcagcgaggggtcgtagcgccctcctatggggttggcggcagcaatgaccgtgcagcgagcctgcagggaggtgacgatgccagccttcgagatggagatgctctgttgctccatggcctcatggatgctggttctgtcctggtcattcatcttgtcaaattcatcaatgagcctcgtgccgaattcgccacccaggcctcgtaccttgg

SEQ ID NO: 323106 - DNA, 755 bp, Homo Sapiens
cttcttttcagtccgcgccctttttgccgggtaatccaacttttattaaaaaattaaaaacttccgggaacccaaactcggattgcacaaatagaggagtgggggaaccaagccggggagccaatggcaggttgataactgtggggagtggataatccggcatgactcacatccccacccctgcgattgaggaagcccagaacggttgcgctggcactgtcgtgccttcttcccccacaggggcacagaaaacctgcaggagactgaaaacgatttacaaacatcttcaaccagctctttggccaaaggcagcaaaagcagcctgaatacgcaactcacgccaagaggggcagcagctctcctgacatccatgtaagaaggctaacacctaaaccacacgcaggcatcctgaactcagcagctctgatccaaggtactgagtggagacaaagcactcggaggtggcaagatgttcagcaaccaagtaagacacactggcaaggcatcccacccaaaggtgagaagcacaaagcaggcttggagaaacaaacagtcatgccaggtgcagccagacatcctgctataagccctgaccctagtaccccgagttcatcaagtgctctggttttgtgtccataaagcacagagggcactgaccaccccaaaccagaatcccaaggaatccttatggatggcatagggcctcagaactgctgcaggatcattttccttttcaggtcgtggctgaacttgtt

SEQ ID NO: 323107 - DNA, 821 bp, Homo Sapiens
  misc_feature (25)..(25): n is a, c, g, or t
  misc_feature (50)..(50): n is a, c, g, or t
  misc_feature (69)..(69): n is a, c, g, or t
aaaaaccacaaaaggccactgaccnaccccaaaacccaaaaatccccaangaaacccttaagggaaggncaatagggccctccagaaactgcctgccaggatccattttcccttttccaggttcgtggctgaaacttgttccatcctgaaagagctccactgtcataaaatgccagagaggttgtggatgttgcatctgacgagccttatccaccaagtccttctcagggacctcaatagtgtcctgctgggccccaaagcggttgcgctgatatgtcacctgctctgccactaactgcttcagtatgaagagcaacagctcattgttgtcacgccggaatgaaaggtagcgggcaaaagtcctttcgatctgcgcatgacgctgaacttctgtgtgtctatgaagctctccagcatcacgcggatggccatgttgacgtcgtcttcgatcacatagtcccgcagatggatgcgcgcgctgggcctccgccatgcggatcatggactcgatgtgccgcaccgtaatggggatgctgcctgtcgccatagattctttcctcaggtcactgtacatcttggccaccttgtcctggtccatctggttgagcttcgggtggaccctctccttggcgtagatgatgtacttcttcaggacctcctggggcaggggctccacgccatacgtgttgggcatggcgggctcagcagcgctgccattggccagcccctcctcctccttgttgctggggtggtgtctgacgtggctgcccaccacgaagcgggccagcatctcgtcctggactgggtccacggtgtccccc

SEQ ID NO: 323108 - DNA, 376 bp, Homo Sapiens
  misc_feature (351)..(351): n is a, c, g, or t
ttatattttattcaactttattaaaaattaaaactacagaaaccaaaccgaatgcacaaataagagagtggggaaacagacagggagcaatggcagctgataactgtggcgagtggataatccgcatgactcacatcccacccctgcgactgaggagcccagaaacgctgcgctggcactgtcgtgccctcttccaccacagggggcacagaaacctgcaggagactgaaaacgattacaaacatcttcaaccagctctctgggccaaaggaggcaaaagcaggcctggaatacggcaacttcacggccaagaggggcaggcagcttcttcctggacattccatgttaggngggctaacaccttaaaccacacgga

SEQ ID NO: 323109 - DNA, 442 bp, Homo Sapiens
  misc_feature (424)..(424): n is a, c, g, or t
ttatattttattcaactttattaaaaattaaaactacagaaaccaaaccgaatgcacaaataagagagtggggaaacagacagggagcaatggcagctgataactgtggcgagtggataatccgcatgactcacatcccacccctgcgactgaggagcccagaacgctgcgctggcactgtcgtgcctcttccaccacaggggcacagaaacctgcaggagactgaaaacgattacaaacatcttcaaccagctctctgggccaaaggaggcaaaagcagcctgaatacggcaactcacgccaagaggggcaggcagctctcctggacatccatggtaaggaagggctaacacctaaaccacacggcagggcattccttgaacttcaggcagcttttgattcccaggtactgaggttggggggncaaaggcattcgggaggt

SEQ ID NO: 323110 - DNA, 1260 bp, Homo Sapiens
  misc_feature (59)..(82): n is a, c, g, or t
  misc_feature (552)..(552): n is a, c, g, or t
tttttttaaaagggagaaggggctcttttcttatttccaatttaaagaatttcaggttnnnnnnnnnnnnnnnnnnnnnnnnttacctttgcaaaacaccatggaagagggctggacacccgggaggaaggtcaggctgtttggaggaagcgagggaaggccaaagttgaagatctgccctccagggaccatctccgccttcccacgggaggcttggaagcaagaggtgaagggctcccccctgatgagtccgattctgcataacgaccatgcagcggccccaagggctcccctcaaatgtttggcaaggataagttaaccgcttcccctggcttagttttcggatccccactttcgagtggggaggtgcaggatctagggcacgaagttgggagttccccagccccagggatcgtgagctcttgggccagggaggagagcccaggcaagactggggaagccccaaggggggttctgtggactcagggcagacgggggaagggataagaggcactacagccgggtacggcctgctctggggactgaatcccnccatggaggctgtcatgagggatccacccagggagtcccctttggtggggaggctgccggcagtggctgcgtctggctggcgactggcccagtagcggtgttaggtgtcctggaagaggtccctgcaggcgatgtgggctcggaggtgggcacaggccaggaaagcccctgccagcttgcggtgcagggcataggtctcctcgggtgggggacacagccggtgccgcagcagcaccgggatgaggtcctgtatgcggcgggccgtttcccccgacccaaagtcataagggccctgggtggcgaaaggctcccccaggatcatcactgcctccacgtgggcgtcggagaatgccttggtttcaaagcctgtgaggaatttgaggtccctggacttctgcaggacacagtctctgtctccatcagctgcagccttcaccacctcgatgtaatggtctgtgaactctgtcccaaactcccggcttgcaccaaagtccagcagggtcacctggtggctggaggcatcatacaggaagttggcccagttggggtcagtctgcatgaatcggaactcaaacagctcccgcagacacagcgtcaggagctggaagcaaatctggttccgcaggtcctggcttaggccctggcactggtccagggggacccctccagccagctccatgatcccgggaatccggaccggtccagcct

SEQ ID NO: 323111 - DNA, 1504 bp, Homo Sapiens
ttttgcagtgcagacgggctttattagtgatatcaatacagcagaggtgcccatggagcagggggaagggacccatgcctggaccagtcccttcctccttctgcccctgctgggtccaggaggatgaggcctggcctggaccagttcctcctgttccacctgaaacacatggggatggagaaccagggctggccttgcttcctgctcctcttgttaccactccagtgttatcacttccttgaagggattagatctctccctccccagctcctaggcagggaaccgtagctactggggaggggcatatttgggaggcctgaggcctaggaatagcctctagacccctccctgacccacaccctttagttccctggggcccaacacaagcaggtggagggaaggtgggggcttcttcatggggtatgggcccccagccgtttgggcttcagggagccccacagcgactgaacacccctgcggacagtccaccctacacgccgtgccacagactcagcagggggtgctgggaggcaggaggtggaggcctgggaacgggcatccagacacttctggtagcgaagcatgcacgcagcctgcacagcctctgagaggctggcagcattgggctcgcaccagaacatgtggcagcagaaggaggctgggccggcagccatgatgaatgcaaacgtgtggacatctctgcccacggccaggaaggagaggaaacgcacccgacactctcccagcactgcctctgtctgctggtgcaagatggtgagggtagcaggggccacactgacatgacttggggtccattgttcacggctgctggaggacaggactgactcgagggccccattaatcacatctaccccaacaggtttagcaacaggtacattccccaggtaatagacttggaacttctggaccaactcattcttaggcgctgggaattccacttggaaagggacatccacaagtttagagtggtccagggagagtccatttaccaagcagcgggcattacgccgttcggccatgatcttagagcagatctcatgcaggctggtggcgatgttcttggcaggtgcctcacagcgaaacacgtggcacttgagcatctgggtcagcttatcacgagctacgtaggcaaagtcccttccactgtcccgcccgacgccccacacgcggatgctgatgatgggttgggcgtgcagcagtgcctggctctgtggctccactagctttagctgtctcatcctccagctgcagtagcagatcctttccttccccccagcccccagacatggggtcatgcaggttgtttttgtggtaagagagctgacggatgcaattgttgactgccacactgctgcgtccaggggccagctcctcctcggtcatctctacccacgctctagggagcgcacgtcagaaacacttgatccctgggttggtattccgtgggggaagcttctcctcctcttggggcaacggctctggg

SEQ ID NO: 323112 - DNA, 981 bp, Homo Sapiens
ggggagagagggcgcggccaactccaggggggacggcaggccgagagcgcggcgcccgggcctggcgcggagcctgagcccgccggacgggaggcggtcccgccgcgggctcggccccggccccagccccgccagcatggccggccggactgtacgggccgagacccggagccgggccaaggatgacatcaagaaggtgatggcgaccatcgagaaggtccggagatggtagaagcgatgggtgactgtgggcgacacttcccttcgtatcttcaagtgggtgccagtggtggatccccaggaggaggagcgaaggcgggcaggtggcggggcagagagatcccgtggccgggaacgtcggggcaggggcgccagtccccgagggggtggccctctcatcctgctggatcttaatgatgagaacagcaaccagagtttccattcggaaggttccctgcaaaagggcacagagcccagtcctggggggcaccccccagcccagccgccctgtgtcacctgccggaacccccagaaggggtcccctgaggaggctcagcccccaccggctgggcccagagagagatcccggggggcataactgcgtggcagcaccgacgaacccccaatgctgaccaaggaggagcctgttccagaactgctggaagctgaggcccccgaagcttaccctgtctttgagccagtgccacctgtccctgaggcagcccagggtgacacagaggactcggagggtgcccccccactcaagcgcatctgcccaaatgcccctgacccctgagaagccggcctgcctgtcctgttggccccaggggcccctttgggtttttttcaaataaagaccccttttggtaaccacacaaagtgatgtacattaactcctatcccccccgggggcgcgcggctcttagaaaatccccccagagggggcccaagcttaacgcgataccccagcttttcttgtgg

SEQ ID NO: 323113 - DNA, 1241 bp, Homo Sapiens
tcacggtggacgcccacacagtcgtcagccacccggacaagtactgcttctactgccgggcgctgctgatgaccgtggctgggctgaagctcgtgcgctcagccttctgctgccccccacagcagtacctgacgttggccttcaccgtcctgctcttccactttgactacccgcgcctctcccagggctttctgcttgactacttcctcatgtccctgctttgcagcaagctgtgggacttgctgtacaagctgcgtttcgtgctgacctacatcgcgccctggcagatcacctggggctcggctttccacgcttttgcccagccgtttgccgtgccacactcggccatgctgttcgtccaggccctgctctcggggctcttctccacgcctctcaacccactgctaggcagtgccgtcttcatcatgtcctacgctcggcccctcaagttctgggagcgcgactacaacactaaacgtgtggatcattccaacacccgcctggtcacacagctggacaggaaccctggcgctgatgacaacaacctcaactccatcttctatgagcacttgacacgttcgctgcagcacacactgtgtggggacctggtgctgggccgctggggcaactatggccctggtgactgcttcgtcctggcctctgactacctcaacgccctggtgcacctcatcgaggttggcaatggcctcgtcaccttccagctgcgtggccttgagttccggggcacttactgccagcagcgcgaggtggaggctatcaccgagggtgtggaggaggacgagggctgttgctgctgtgaacctggccacctgccacgggtcctgtccttcaatgctgcctttgggcagcgctggctggcttgggaggtaacagccagcaagtacgtgctggagggctatagcattagtgacaataatgctgcctccatgctgcagggtttcgacctccgcaagatcctcatcacctactatgtcaagagcatcatctactacgtgagccgctcacaaagactggaggtgtggctcagccatgagggcatcacggcagccctgaagcctgtgcgggtgcccggctatgccgactcggatccaccttctccttgaatgtggatgaggactatgacctccgcctggctggcctctcgctggccctccttttgtgctgtggcacctcgagggggatccagtaatgcgccttccggcggcagcccagccggggga

SEQ ID NO: 323114 - DNA, 1134 bp, Homo Sapiens
gtagcgaggcctgggtggcgaattcggcacgaggcgaggacggttaccgcacggtggtgcagggcaccaagaaggagggctgcaccatcctcttcatgatgctctacttcttcagcatggccagctccatctggtgggtcatcctgtcgctcacctggttcctggcggccggcatgaagtggggccacgaggccatcgaggccaactctcagtacttccacctggccgcctgggctgtgccggccgtcaagaccatcaccatcctggcgctgggccaggtggacggcgatgtgctgagcggcgtgtgcttcgtggggcttaacagcgtggacgcgctgcgtggcttcgtgctggcgccgctcttcgtgtacctgtttatcggcacgtcctttctgctggccggctttgtgtcgctcttccgcatccgcaccatcatgaagcacgatggcaccaagaccgagaagctggagaagctcatggtgcgcattggcgtcttcagcgtgctgtacactgtgccagccaccatcgtcatcgcctgctacttctacgagcaggccttccgggaccagtgggaacgcagctgggtggcccagagctgcaagagctacgctatcccctgccctcacctccaggcgggcggaggcgccccgccgcacccgcccatgagcccggacttcacggtcttcatgattaagtaccttatgacgctgatcgtgggcatcacgtcgggcttctggatctggtccggcaagaccctcaactccctggaggaagttctacacgaggctcaccaacagcaaacaaggggagactacagtctgagacccggggctcagcccatgcccaggcctcggccggggcgcagcgatcccccaaagccagcgccgtggagttcgtgccaatcctgacatctcgaggtttcctcactagacaactctcttttcgcaggctcctttgaacaactcagctcctgcaaaagcttccgtccctgaggcaaaaggacacgagggcccgactgccagagggaggatggacagacctcttgccctcacactctggtaccaggactgttcgcttttatgattgtaaatagcctgtgtaagatttttgtaagtatatttgtatttaaatgac

SEQ ID NO: 323115 - DNA, 569 bp, Homo Sapiens
  misc_feature (66)..(66): n is a, c, g, or t
  misc_feature (149)..(149): n is a, c, g, or t
  misc_feature (446)..(446): n is a, c, g, or t
tcggagctgtgcgagccttcgccatggagcaacgggaagaggagcgctatggggcagagctggaanctgcgctgccgggcagaggagctgggccgcggcatcgcttgttccaagggctttccaacatcgccttcaactgcatggtcttnggtaccctatttattgggggctcccttgtggccggacagcagctgacagggggagacctcatgtccttcctggtggccctccccagacagtgcaaagcttccctccgtgttgcaccctgtcctaattccccttccgctgcaggctgtgacactccatgcatggaaggacccatccttgacaggctgtgtgagctgcccttccccatgcctgcccacttcccagggatgacaagctgacccctgtccccacacaccccacccttatagcttattgctttgcgttggtccaaaaccacnccgctcagctgagcctctgggatgaccagagctgatcaccagacagctcaaggcgggcctcccccctcctatctctttccaagctaaacacaagcagttctacataaatatgttatggtctat

SEQ ID NO: 323116 - DNA, 1293 bp, Homo Sapiens
  misc_feature (137)..(137): n is a, c, g, or t
ttttactttagaaactttattgaggacaaaagtgggcggctcccagtcccatgggcagaccgacaataaataagggctaaaaggaagaagtacggcagggcaggagtggttgtctcatcatggagagccctgggggnatgcagaaccaactggaatgaaacacagggcatcctgccattcgagtaatgtagccacagggttggtgcagacccgggtggggcctgagggaggggctcggctggtgtaaaaggcacactcatcgtccagacgagcctcgtggaagcagtggatggcggttaaacacgatttgaaggcgctccctcagggctagggtttcgaagggggccagatttgctgaaggcctgcctggccttgctgggggtctcaaagactggagtgagcagataggggggctggcacaaagcgggtgttgggaagagaagatcaggctggtggttgctggagcccactgactgcagcagggtggtagactggactctagacttctatgttccagggtgcagggctctgatgcccccagctctaccttagggcagggccctgggggtccagactgcccctgggtgctgggctgaaggggcccgggttctgctggagggcagggctcaggtacctcaagctgttcctggcgagaggactccggtatctcaggctcaatcctacagtaggactctaggggcctgggttctgctggagggcagggctcaggtacctcaagctgttcctggcgagaggactccggtatctcaggctcactcctacagcaggactctaggggcctgggttctgctggagggtagggctctggtacttcaagctgttcctggagggagggctctggtatctcaggctcactcctacagaaggcctctgggggcccaggctctgccggagggcagggctgtggttccccgcactcctctggaagacagggctttggcagccctgagtgttttaacagtccaggaaggtgggaagtcccagagttatgctctgtggcattcagagttctagaaatctcagtcagcaggggctgaagttcaaccatatccagagaagagcctccattaagagggacacactggccccctaccagcccctctacttcctgtctcaacagctgttgcaggataccgatgcgttgaatcttcacctcctggaggctgggggttctgttagagtggggtccagaaggagtggccaccggtggtttcccagaaccctccagtgaccttatacaactctcctggtcaaacaaccggacggcaacct

SEQ ID NO: 323117 - DNA, 721 bp, Homo Sapiens
  misc_feature (458)..(458): n is a, c, g, or t
tactttagaaactttattgaggacaaaagtgggcggctcccagtcccatgggcagaccgacaataaataagggctaaaaggaagaagtacggcagggcaggagtggttgtctcatcatggagagccctggggggcagcagaaccaactggaatgaaacacagggcatcctgccattcgagtaatgtagccacagggttggtgcagacccgggtggggcctgagggaggggctcggctggtgtaaaaggcacactcatcgtccagacgagcctcgtggaagcagtggatggcggttaaacacgatttgaggcgctccctcagggcttagggttcgaggggccagattgcagaacccaggcccctagagtcctgctgtaggagtgagcctgagataccggagtcctctcgccaggaacagcttgaggtacctgatccctgcccttccagcagaacccagngcccttagagttctactgtaggattgaggctgagataccggagtcctctcggcaggaacagcttgaggtacctgagccctgccctccagcagaacccgggccccttcagcccagcacccaggggcagtctggacccccagccctgccctagggtagagctgggggcatcagagccctgcaccctggaacatagaagtctagagtccagtctaccaccctgctgcagtcagtgggctccagcaaccaccgagccctatgcagtc

SEQ ID NO: 323118 - DNA, 628 bp, Homo Sapiens
  misc_feature (342)..(342): n is a, c, g, or t
  misc_feature (430)..(430): n is a, c, g, or t
  misc_feature (448)..(448): n is a, c, g, or t
  misc_feature (592)..(592): n is a, c, g, or t
  misc_feature (604)..(604): n is a, c, g, or t
  misc_feature (611)..(611): n is a, c, g, or t
tcgtctccactaaaattttaaaaattagaaagtgctctctggaaaagctgcctaactctcactgcttctctgctgcccctcctaatgtacatctagggcctctcagttaggggcttcaatccattcctcatgagggtgggactcaggctggtctttctcctgccccagcctggcttgcttgtgtgccttgttccttggtgacaggagcaggttgccgtccggttgtttgaccaggagagttgtataaggtcactggagggttctgggaaaccaccggtggccactccttctggaccccactctaacagaacccccagcctccaggaggtgaagattcaagtngagtctgtgtggccaacagctttgatgtctattgaacagtgactgggctgaaggaaagagggaaaagagatgggggatcaggaaatanggacagtgtgggtagacnactgaacgcacatcttgatgtcacactgggggtgctctcttcccaccacagcggatcgggtaatcctggaacaagctgttgagacaggaggtagaggggctggtaagggggccagtgtgtcccccttaatggaggctcttctcnggatatggttgnaatttangcccctgcgaatgagat

SEQ ID NO: 323119 - DNA, 395 bp, Homo Sapiens
agaaactttattgaggacaaaagtgggcggctcccagtcccatgggcagaccgacaataaataagggctaaaaggaagaagtacggcagggcaggagtggttgtctcatcatggagagccctggggggcagcagaaccaactggaatgaaacacagggcatcctgccattcgagtaatgtagccacagggttggtgcagacccgggtggggcctgagggaggggctcggctggtgtaaaaggcacactcatcgtccagacgagcctcgtggaagcagtggatggcggttaaacacgatttgaggcgctccctcagggctagggttcgaggggccagattgctgaggcctgaggggcatggaaaatttagagggaggtctggggtcctagacttcc

SEQ ID NO: 323120 - DNA, 911 bp, Homo Sapiens
  misc_feature (62)..(62): n is a, c, g, or t
  misc_feature (64)..(64): n is a, c, g, or t
gcagttttattattgatttcctctgttctgatggatttatatattaaagtaacattttcttngngttctttccttgagtacaaatttatctggaaaaaatcttcaataactttagatcccagcaaaacttttttctgagaatccttaaaacctactgctttaacaaaagctgctcgggagccagtgttgcggacagaaaaaaacaattttactttctttgccaggtactaagccattcactgttaccatgtaactgtcagataattttttaacgccttccaaaataagattgcttgttcctccatatccagacaaaggtattgtgaacttaatgcctggttgtgatcgatttccaagttgtttgatttctagtctagccaacatgcaagataatcgagtaggtgcaaataatacagagatgaaaatgtcttcctttgggtgaattctgatctcacagttactggtcaatcgctgttctgaaccaaaagtgttctgaagctgaaagcagtcctgatcttgtcctctaataagcagtcgtaaatgttgagttgtagatgcagaattatttcttaaagctagtttctgaagctgtgttctacctagagggactcctccccaagccagaaattgtttgttggacaaaatcgatggaatatctaagcaaggtccaggtgacagaggtttacttcctgaagaaatgacttcgccttttaacactacctcatactgaggtccaaatggctgcacaaatattttcaagatcctttcctcgcaggcttcaggatcctttggagtaaatgaaacaataacctcatgttcttctccaggtttaaggagtagattctttggatccactgaaaagtgacttccttgttctgggaccttgatatccaaataaacttcaatgttcc

SEQ ID NO: 323121 - DNA, 859 bp, Homo Sapiens
cccccaaaggtttcccagggttttcccccggaaaaatttttgggaagggccccccttttcggggttaaaaaaacccggggtctttccggaaaaattggggagaaccccaatttccccggaaggggacccttttttgggtttaccccttcaaaatggcttttaggggaaaaaaattccccggcccatttatttgggatgttaaagacttcccccaaaatttagcctttcaaaaaagggaataagggtgaatttcttcgggaaccaggatgtattaaaggtcggggaaatggggcccttatttattccagggccaaaccaagtacccgggaagaaattctggggggaaaccagatcttttcagcgcgcatgtgggtggctctgaaaagagcctttggggtatgtaatcagtgagtccttgagactcaagccctctcgccgcggatacgacgtgcgagctggatgtccttgggcatgatagtcacccgcttggcgtggatggcgcacaggttggtgtcctcaaagagccccaccaggtaggcctcgcatgcctcttgcagcgccatcaccgcggagctctggaagcgcaagtcggtcttgaagtcctgcgcgatctcacgcaccagacgctgaaaaggcagctttctgatcagcagctcggtggacttctggtagcggcgaatctcgcggagagccactgtaccaggccgatagcgatggggcttcttgacaccgccggtggccggagcgctcttccgagccgccttggtggccagctgcttgcgtggagccttgccgccggtggacttgcgagcagtctgcttggtacgcgccatgccttcagagctagattcacttcccc

SEQ ID NO: 323122 - DNA, 1363 bp, Homo Sapiens
  misc_feature (209)..(209): n is a, c, g, or t
  misc_feature (236)..(236): n is a, c, g, or t
ttaggacttgcggaagggggcccaatccagggtaaaagggaccaaaaaggtccaccttccggtttctcctctgaggggagcccccgggaagtattcccaaaaaggccagccgggagggttttccaggattttctggggccctgcccacttagggtcagaatttgtggctgcagagggcatcttgatgactcaaagggcaggggggtggncccctggctctgccagtccggcggggngcagcatgaaggcagtggctggggaatggcacacctgtagatggtgctcctctaggcagggggccgcaggggtcctccgggtgggggggtaggcgccctagcttcacagatgactggcacctggccccatgctccctcccctctgtgggctgaggagccacactgagcggaggctggctcagggaggagtcgggagatgacagtttcccaagaagtcgcctggctccagaggcctgtcaggttctggactaaggcgactctgcagccagtacctcgccccggccctcttatgtccttgaaggggctgctggatgcacgcatctctgcggaggcccctgctgagtgtctgtgcgcagcaaaacgcccatcctgggccttgcctgcctgaagcccttggcacctggcgtcagagcagctcctgctcgtcgtcctcggagccggaggggccctggcgtacttcctcgtacccacttgttggtgagagttttcatctggatgcgcccgtggtgcaggtcctcctgcgtcagcctccgagtgaagaaggggttcaggtacttggcgtccagccacacgaagcccttaaggtcctgccgcctgatgtagtgggcctcgtactcctcctccgtgagctccgacaggtgctccgactccacagtgttgcccatcttctcagtcttgctgaggttgacgtccttcttgttcctgcggtgtgccttggcgtcctcgatgtccatgaggcgaatgaggggcatggtgctgccgcccagcagcaggatggtgaagagcacgatgacgatggtggtggtgccgatgagctgccgcttctccatgggctccaggtccaggtgtaggctcagggcataggggatggctccccgcaggccactaaaccacatgatgaacatcatcttcggtgtgattttatgatcccggaagaaattcaggaggtaggaaagagggaaaatgtttaccgctctgccaaatagtacaagcactatgcaccagatgacaaaggaaatttcaaacttgtgaggaaaactaaaaatggacaggccaagaaatgcaaacacacatgtttcacataagaaggccacggtgcggagggtctgctgcatgaggatctgggt

SEQ ID NO: 323123 - DNA, 1077 bp, Homo Sapiens
  misc_feature (32)..(32): n is a, c, g, or t
  misc_feature (58)..(58): n is a, c, g, or t
  misc_feature (82)..(82): n is a, c, g, or t
  misc_feature (106)..(106): n is a, c, g, or t
cgccccgcccaacaaagggaaacttgggcccnagggtcgggtcccctgggaaggggtnaggtcccctgggaaggggtaaganctggggcaagcaagccaatgccantggcccaacccacagggatcaaatccctaaagtaccgagaacctactccttcccccacttccctgggcccccagaacggaataagaggatggcctgtggaaagaacctctgagagacccctacaaggagaagaaaggccccagtgtccctcacatttgtcacctctgttttctggagggcagtgagtcctggagtcagtctggtggtaatactgacacagaccaggagggcagggaagccccaacaagtctggaccccacagctggctctcccacccctcagcaagctctcgcagttaccacatgatccttcgtgtttcttgccttccatttcccttgggtggatggttgggtaggtggggtttcctggtttggggtttctcagacaagggccctctagggagggtgccctggaccccccaccactcctgggctgaggagcgtgtcacatgatgccgttggtgaggtactggaagccgtcatagagtttggtggtgatagaccgcatactgccatccaccatctgctccaccagcagctgcagctgctcctcagtcatgctcatgtggaacctctctttgaggtttcgaatggtgctggagccatggaagcaaggaagctgagaaccttgctgcatgatctccacgatctgcaccaccttgtccatgtgtttccgagcggcaatcagcccttgcagcatcagcatcttatagtagttgaacatgtcgccatccaggccgcccatcacatccacaaactctgtggtcagcttaaaggctgacgtctcaaagcccagatttcggggtgagctggagaggatgaagccaaagtcgatgtggatgatgtggccttctgcgtccaaaaggatattcccattgtgtctgtccttgacttgcagcaggtagcagaccacggacgcgtgggtcgacggactaggttgccgcaggagaacgtttgcccggagggctcggg

SEQ ID NO: 323124 - DNA, 1082 bp, Homo Sapiens
  misc_feature (1031)..(1031): n is a, c, g, or t
gggatttggttaacacccgactaaaagcaggctggtacggtcggaatcctgggatatgtcgaccacgcgtccggtcttctacgaacagtacctgaccatcattgacgacactatcttcaacctcggtgtgtccctgggcgcgatatttctggtgaccatggtcctcctgggctgtgagctctggtctgcagtcatcatgtgtgccaccatcgccatggtcttggtcaacatgtttggagttatgtggctctggggcatcagtctgaacgctgtatccttggtcaacctggtgatgagctgtggcatctccgtggagttctgcagcgacataaccagagcgttcacggtgagcatgaaaggcagccgcgtggagcgcgcggaagaggcacttgcccacatgggcagctccgtgttcagtggaatcacacttacaaaatttggagggattgtggtgttggcttttgccaaatctcaaattttccagatattctacttcaggatgtatttggccatggtcttactgggagccactcacggattaatatttctccctgtcttactcagttacatagggccatcagtaaataaagccaaaagttgtgccactgaagagcgatacaaaggaacagagcgcgaacggtttctaaatttctagccctctcgcaggggcatcctgactgaactgtgtctaagggtcggtcggtttaccactggacggggtgctgcatcggccaagggcaagttgaacaccggatggtgccaaacccattcggttgtttggcggcagctttgaacgtagcgcctgtgaactcaggaatggaccagttggcttgggaagcagtattactagatctggaggcaaccacaggacactaaacttctcccagcctcttcaagaaagaaacctcattctttggcaagcaggaggtgacactagatggctgtgaatgtgatccgctcactgacactctgtaaaggccaatcaatgcactgactgtctctcccttttaggagtaaaccatcccacaagnttctataacatatttttagtgacagtttgagttgtagatacccttttataa

SEQ ID NO: 323125 - DNA, 1362 bp, Homo Sapiens
  misc_feature (108)..(169): n is a, c, g, or t
  misc_feature (937)..(1019): n is a, c, g, or t
  misc_feature (1109)..(1127): n is a, c, g, or t
aagagcgaggcctgggtggcgaattcggcacgagggtggcggcggcggcggtagcggtggccttggttgtcttccagtctcctcggctcgccctttagccggcaccgnnnnnnnnnnnnnnnnnnnnnnnnnnnnnnnnnnnnnnnnnnnnnnnnnnnnnnnnnnnnnngtcggtgagcggcgggggtggctccagcaacggctgggcccaagctgtgtagaggccttaaccaacgataacggcggcgacggcgaaacctcggagctcgcagggcgggggcaaggcccgggccttggagatggagaattctcagttgtgtaagctgttcatcggcggcctcaatgtgcagacgagtgagtcgggcctgcgcggccactttgaggcctttgggactctgacggactgcgtggtggtggtgaatccccagaccaagcgctcccgttgctttggcttcgtgacctactccaatgtggaggaggcggacgccgccatggccgcctcgccccatgccgtggacggcaacactgtggagctgaagcgggcggtgtcccgggaaggattcggcgcggcccggtgcccacgccaaggttaagaagctctttgtcggaggccttaaaggagacgtggctgagggcgacctgatcgagcacttctcgcagtttggcaccgtggaaaaggccgagattattgccgacaagcagtccggcaagaagcgtggattcggcttcgtgtatttccagaatcacgacgcggcagacaaggccgcggtggtcaagttccatccgattcagggccatcgcgtggaggtgaagaaagcagtccccaaggaggatatctactccggtgggggtggaggcggctcccgatcctcccggggcggccgaggcggctgggggcgcggcggtggtcgagaccagaacggcctttccaagggcnnnnnnnnnnnnnnnnnnnnnnnnnnnnnnnnnnnnnnnnnnnnnnnnnnnnnnnnnnnnnnnnnnnnnnnnnnnnnnnnnnnttcgtcctacggtgggagcgactacggtaacggcttcggcggcttcggcagctacagccagcatcagtcctcctatgggcccatgaagannnnnnnnnnnnnnnnnnntggaggcagtagctggggcggtcgcagtaatagtggaccttacagaggcggctatggccgtgggggtggctatggaggcaactcctttccaaaagaaaatttaaaatgccttgggaagggctataaggggtaacttctttccaacagcccaaatgggggtccacctccctaagccccacccccctaaaaaacaccggcctttcctgtttttgccccttgggggggagccctttct

SEQ ID NO: 323126 - DNA, 1000 bp, Homo Sapiens
gggccctccaattttcatttttgttctccccccggattgccatcccagaatgcttgtgcccactttttttgccatgcacttttctttgcttcatgaggaagcgtcgcagccttgtcttttcatttcctttaactttgaaaaggagtctttcaaaatttttccacatctcctccttccagtggtaagactggctaattcttgaatatccagatctaaccatgggatccacaatgctatcaacctgggcatctgttgtgttagatgcaccaccccgatgatcagagagggattcagtactatctgctgctggcaaatggggttgctctgggtgacagggatctgctgacccaatgctatggtttgttccagtcaatgagttgagaaggctaaagccttggttcctatcattcttcatcactacattggaccacacattggcattcagggcttggacaattcgctttactcctgtagattctgggaagtcatcatcctcctcaggcaactcctctggactaagttctaccaattcaaagccatgtttgaggcaccattcttgagctttttgtcggtttataccatcttcagacactctatcgcagaccaagatcatcacctcaggtaaccatgcttttgccagtggaagccatgaggagacactatcaaggcccgatttttgtgtgctgtcaaagtaaaccacaaatgcttggacagattctgcaatctctgcagtaacaagaaatttgtttggcaccacacatagattgatgtctgctgaatagtatttattatcaatggtccagggataaaatctcacagcatcattggaagtcacttccacaataagatcttctgttccaaggatatgttggaccagctggtctcctgagaagacggaggagcagctggtgactaacgcacagggtacgccagcagccatagctgcgctcgcgagccggttccgtccctcgtgccgaattcgccacccaggcctcgctcc

SEQ ID NO: 323127 - DNA, 358 bp, Homo Sapiens
tttctttctttgttgtgatggaatcttctgaagactgcttaattccttgtgctttttcatcacacaattcaaaatatcacaaacaatttggattttccattctgcaaacccacattgggtaaactgcttttttgtcaaaattggtttataattaaattgatcacgaagaagcttatagacagcatctataaagcgcaagtgattttttgctatgagctctacattggattccattataagttctgttacataaggtgagtatgaggtaaaagaatagctgatgatgggcaaagatgctgctgggtctccctttatcaaacctacacagtccacctcttcaggataatttagcaagcgg

SEQ ID NO: 323128 - DNA, 337 bp, Homo Sapiens
ttagggaaaaatttcaccattaaataatttgctgacagctgaccctttgtcaatcttttcctcctattttattcccttttcacaaaatttttattcctatatagtttattgacaataatttcaggttttgtaaagatgccgggttttatatttttatagacaaataataagcaaagggagcactgggttgactttcaggtactaaatacctcaacctatggtataatggttgactgggtttctctgtatagtactggcatggtacggagatgtttcacgaagtttgttcatcagactcctgtgcaactttcccaatgtggcctaaaaatgcaacttc

SEQ ID NO: 323129 - DNA, 621 bp, Homo Sapiens
  misc_feature (227)..(349): n is a, c, g, or t
gagtggcatgcgcggggcccaattgaatccgagctcgttatggatccgcttgatagaaccagttaaatcatcgggggttcttttggttaggttcataggcgcccggtttctccccggggtttttatatggtaggaaatcaagcatgcatactttatcaggtggtccctgggaacacatagtagctagttccatttctttcttgggatcttgtgtcgaatgagaaagnnnnnnnnnnnnnnnnnnnnnnnnnnnnnnnnnnnnnnnnnnnnnnnnnnnnnnnnnnnnnnnnnnnnnnnnnnnnnnnnnnnnnnnnnnnnnnnnnnnnnnnnnnnnnnnnnnnnnnnnnnnactaaagttcagaaatttctgtaagacaagtacattaatgaaatgtttccaaagaaatactgaacaatatatactctagtttgctgaggttccagctcaagagttcaaacctaattcttgtgcaataaaaatcagcatggatcttagatgatctagaatacactgtgttttgaaatccacagctggtttcatttttaaccattatgaaaaaccagtactcctattccatcaaatgtgttttataagcaataataaatttcagatccactggt

SEQ ID NO: 323130 - DNA, 352 bp, Homo Sapiens
taagtttttcttccttccttttacgaattctggcagctgcttcttccctctcttttcgatgttgttctgcttttaattcccggaactcctgctttgcctgtcgtaatatatcaacataatcttcaataaaatccctagttgaaactagggtcagtagctttccacagagagcatggagtatcttcattttttctcctggtgtcaaatcatacactgaggtgcttgacagtttcttcactagactgggattgctcaaacgaagctccatacaagcatcatctgtagcatcaaatcctcctcgttttttgatatctatactttgcatttgctgatgttacatcagcacctgaag

SEQ ID NO: 323131 - DNA, 281 bp, Homo Sapiens
  misc_feature (201)..(201): n is a, c, g, or t
  misc_feature (213)..(213): n is a, c, g, or t
tttctcctcctgattacctacaatggtcaattttattacaaagaactgtatcaaaatatacaagtctttttaagaacaaccaagaaatgcagctgtttaagggacaaatgaggatcaaccgttagagagcaggcagcctttccccgccgctgtccactgcaggagacggcatcctcagggccacattttccacgggacatnctttctgaatantttaaagggttaagtccggcacattacaggtcttcgcgggagggcagctgtgtcgggcttttcttctt

SEQ ID NO: 323132 - DNA, 530 bp, Homo Sapiens
acctagcaatggacctagttcacagtaataggtgcaaagaaagaccaaatggacttgcagtattaacccttggcagtcgtcatacttagctgctgcctgtaatgctaaaatgattttaatggttgtctggaggcaaagggctgttttttagtatattgccactaaaggacatttatttatatcaaacttttatttttagatattataagcatacagtacataattgatgaaactgatatttactagagatttatggtagagaatggacgacattcaataactggagcccgagattgtcactttatttaaaaagacaaataatcatctgacaagacagcactgttgccattataaggagaaatagattacaatccttatcatgtacacgttagctatgttccgtatggccacaggactttcctgaaaccgtatctgtctgcttgaagtagacttatgtttgttgagaatgaacaggcttatttgagcctccagggtggcagttcataaagacagctaagttctgaaggaaa

SEQ ID NO: 323133 - DNA, 287 bp, Homo Sapiens
gtatttcaaattatccaatatacatgtcatatatatttttatatgtcacatatattaaagatatgtatgatctatgtgaatcctaagtaaatattttgttccagaaaagtacaaaataataaaggtaaaaataatctataattttcaggaccacagactaagctgtcgaaattaacgctgatttttttagggccagaataccaaaatggctcctctcttccccaaaaattggacaatttcaaatgcaaaataattcattatttaatatatgagttgcttcctctatt

SEQ ID NO: 323134 - DNA, 806 bp, Homo Sapiens
tttctttcaaaatatatttaattagcggcacatggaatgtcaagttaagcaaattctttccagagagaaggtgagcctgacagactaaaacgttgagcacggatgatacagcagaaataacatttccagtgtaatgagagataaagaggaatactgcccaccgaggaaatgactttcttcaccatgctgaccacactgcacagcgcccgatccggctggtgaggatggggaggtgggaagaatctcaaagcactggacagggtgaggactcaggaagtcacggggtcagccctacagcatcagctcctctctgttgttggagaggccctgagccccattactcactatacgaggaccagagtgtctttggcaggtggaggctggctcacgggagaacaccaagtgagggggctcctctgtgaacccaagaaacttcaaggaaccccacagcgtctcccttatgacctcccatctccagattaggaagctatggattcccagagggtcctttggaagtatctagaaatgtccaggtaagtcagagaagggctgaactttcttagaaaaatcactttagtctctcatacatgaagaacattttccttaaaggattctggttcttttccctgatgttcttgtgcaacgttctgagggtcacctgggcttcgcccaccactgcttctactgctgctgtgtcactttcaaacagctccacctccaccggcccctcccttcccaccttccagcccacagtgtctgcaggctgtgggtctcccacatctgtcatgtcaggatcatgctgctgc

SEQ ID NO: 323135 - DNA, 692 bp, Homo Sapiens
  misc_feature (55)..(69): n is a, c, g, or t
  misc_feature (75)..(75): n is a, c, g, or t
  misc_feature (78)..(111): n is a, c, g, or t
  misc_feature (113)..(233): n is a, c, g, or t
ctttcttggggtgggcccccgcccccaccaagagggggggtgaaaaaattttttnnnnnnnnnnnnnnncgggcnaannnnnnnnnnnnnnnnnnnnnnnnnnnnnnnnnncnnnnnnnnnnnnnnnnnnnnnnnnnnnnnnnnnnnnnnnnnnnnnnnnnnnnnnnnnnnnnnnnnnnnnnnnnnnnnnnnnnnnnnnnnnnnnnnnnnnnnnnnnnnnnnnnnnnnnnnnntttcaatcaataaaaatattttattcaaaaaacagtctaatatcttattttacatgatttcaaaataaagttgattgtagtacagattgctgtggcctttttcccctccattttttacatgttctcatggttacaatatccagcataaagaggttgtgcagctattccacgttcgaccatcctgcagcggtgccttgtcagtctgtcataggcgtcatccatatctctgacatctttggaactccagagtctctcaccaacagcacttgcccgaggccataatcttggagtgaggttagttgcatccacatattctccccatagacaagcttctccaccaatgaaaagttgtttctgtttctgagtaccgccaaaatcaagaggttccactttatagtatttcctccaatcttgtccatagctaatcaaatctaagtaccaaggagcagaaaggattcc

SEQ ID NO: 323136 - DNA, 423 bp, Homo Sapiens
  misc_feature (267)..(267): n is a, c, g, or t
ttttcaatcaataaaaatattttattcaaaaaacagtctaatatcttattttacatgatttcaaaataaagttgattgtagtacagattgctgtggcctttttcccctccattttttacatgttctcatggttacaatatccagcataaagaggttgtgcagctattccacgtctgtaggataacatgaataaagatattttaggattgatttaggattgatatcattcataaagatattttaggattgatattcatggtcatcttnggaaacttaaattagaatcactaaatcacagcattactgaaaataagggaagaaaattaaagcaactcaagatggagttctaagttacaccaacattttttgtatctataaaacagtcacaagtctgaatatatctttacaggtattattacttac

SEQ ID NO: 323137 - DNA, 776 bp, Homo Sapiens; identical to SEQ ID NO: 146762
  misc_feature (66)..(85): n is a, c, g, or t
  misc_feature (138)..(146): n is a, c, g, or t
  misc_feature (229)..(237): n is a, c, g, or t
  misc_feature (309)..(317): n is a, c, g, or t
  misc_feature (343)..(352): n is a, c, g, or t
  misc_feature (463)..(580): n is a, c, g, or t

SEQ ID NO: 323138 - DNA, 539 bp, Homo Sapiens
tttttttccagccaatcagcaaatatttattgagcatctgtctatttggggcaagtcagagtacagagggcatggcttagaaaggaatagctcagacggagtttgtgattaattacgggaatgggtgccaagtgagagatacaaagggtggaagagcaggagcgcctccatccaggggcgtggaggaggctctgtggatctcagggccatctcagctggctccagacagacaagaagactccttcagtgttcttctggtaatcacagaagctctgcgcttggggaaccagttaccctaacagaggagactgggaagagcaggagataagaccttgggatttctgggtgacccgggaggatcacaggccttgggaaagccagtggctgcttcattatttccatcccgggtcaagttcggcctccagaaggtgagatgcccagccagatctggctctgtccttagcccttccctctggtggcctgccactctcagatgatggtgtcaacaagaccagaggctgctggctcttttctcaaaa

SEQ ID NO: 323139 - DNA, 342 bp, Homo Sapiens
gatggacaaactgcgtcttagtttattcagacagaagaacactgctcacaattaaaaacgaaggaacagacagcaaggagctacggacacacacaacagcacggatgaagctctaagtcataggatgaagaagccagacatcaaaggctccaactgcaggattctgactcctcgaaggtcgtgagccggagaggtcaatccacggtccttaagtcagagccacatatggtgagatgcatgctcttcagtggagacccagcccctagaaggtccctccagcccttcctgtcggcgtccctccccatctgtggctctgacttaagcaccggagaggtcaatcca

SEQ ID NO: 323140 - DNA, 499 bp, Homo Sapiens
ctctttctctggaagaatattgtatttcatggatgtctgtgaaacagcaaagacactatcagtttctctctttttctggacccctcacttcctcattacttaacgtctccagaggtgccttttactttcccaggaaggaaggaacagagtttccatttcaattggcaagtttaaagttgactctcacccatataagcttggagccctacctgaagatacacacatctttccccagttactgttatgacatattctccagggagctctggcaatgagatctgctgcagtaataggaggttgttgttgtctacttggaaatttgtagaaaaggtctgtgaatcctgaacggtgacctgtgcagttttctcagttctggtgaaagtggctgctccatacctggacagggcatggagagccaccactgtgtcctggaagagacgagtggacaaccgccccaaagagtaaatttttggcatctgggattttcccccaaagtctg

SEQ ID NO: 323141 - DNA, 464 bp, Homo Sapiens
tttttaatttttgctttatttgaatataattttctcatcaattttgcttgcataaatacagtttgttgcttgttctggtttagtctaatagtaagttggagaagtcctggagaatgggcatcctggtggggtggcagaatggggttctcgcttcagcagatgcagccccccaaacacagcactccatggatgaggactcaaaagatgaatgtcattttctgcccctgtgtctcagagatgccctgaggctgtctgacaaggtgagctgttccacacaaaaaacaaagaattaatcacaccttagtccagcctgagttggggccagtctattgcctgggtcctgagatgtgctgcctcaaatgtcttcactggacgtggtcatgcctgagaccagaatggaatagaacaatccatttgaatacagcgatggatggtcagagatgtccacacacatctctgctcac

SEQ ID NO: 323142 - DNA, 518 bp, Homo Sapiens
  misc_feature (499)..(499): n is a, c, g, or t
caacgtactcagatttcataggattttatttttctactaacacagacagacagggaaacctacaaaaggaaacggagtcaattgtaaatggctgtagttactggttacacggagttgacaacacaaaggatgcctggtgcttgcgtgcagaggctgcagcccagggcgggggcagagctgagccctcaggaggtggtttcgtgtgcagaactgagcggccctcagaagcagggctgttttccagccaccaaccaacgttcagagccagcaccatgtggccgctgtgcctctagcctgctctcctccaggtgcaggggacacaggacctgccggccccatccagacatggaggagcgttttgctgcttaactcatgcttagccaaggcaggcagaggctgtgggaactgctgagccccgctgtgatgtctgggacacgctctgggcagcagccgtcactctacagcaattccagccctagtctggctcctcagaaacatnctggggggacaagtgcagc

SEQ ID NO: 323143 - DNA, 422 bp, Homo Sapiens
ttaggagaagttttagcacaacttctgcttcttcccaaaaggagattaacagaagaaatgctttttccaaatcgaaagctgctttgcgtcgcagttggagcagcacccccaccgcaggtggcattgaagggagcgtgaagctgcacgaggggtctcaggtcctgctcacgagctccaatgagatgggtactgttaggtatgtgggccccactgactttgcttcaggtatctggcttggacttgagctccgaagcgccaagggaaaaaatgatgggtcagtgggtgacaagcgctatttcccctgtaagccgacccatggagtcttagttcgcccgagcagagtgccctatcggggaattaatgggtcaaaacttgtggatgagaattgttaagcttctaaaatattaaataagctcaaatat

SEQ ID NO: 323144 - DNA, 543 bp, Homo Sapiens
  misc_feature (326)..(326): n is a, c, g, or t
acagctactctgctcttcaggattattttaaatagtgttgtttttaggccagtaagaaatatcaattataacatattgtaacccactaaaatatgccttttaaaatcgtagattctcttccatttttttcctccttcacatttacatggcaaaaggtttatatcttcaagatgaaggttcgattcttgatttctcatatgaatcagagctctctctctcctttccagtgtgacccagttgtattttgcataggcagatggtttgaaggaaaattccagattattagcatttgcactggagcttgacaatcacctttatgaacctgnctcttggaatagcagccttggaagatcctggagtcaatctccttttatttcagatgaaaaaggaaactgaggctcgtatgttttatgcagtgaatcaccggcataattggaattctaacctcgaaattttatttccaaatttgactggctccactccttatacatcaaattgatcaaagcagaaattacagattcaaatttatggtaaagcttgtca

SEQ ID NO: 323145 - DNA, 532 bp, Homo Sapiens
catattaagatcaactcttatgtttgaattagtctagaaatttgggggatgttggattatatgttccatttttaaaacaagatgtttataatcaagtgacatgattttaaaagaacatcattttagttgaggtgccagtaaaattcgtgaatgctttatgctaaaaaaatattgggttacgtggcctcttaccttctgactcatcgttctgctttctttttcttagctttaccataaatttgaatctgtaatttctgctttgatcaatttgatgtataaggaagtggagcccagtcaaatttggaaataaaatttcgaggttagaattcccaattatgccggtgattcactgcataatacatacgagcctcagtttcctgtaagtgttcattttgctccaagccttcttttgagggaggatacacacgttgcccaaggcaccaagaataaaaactttcttcctgggctctttccctgtcatcagttttcatctgaaataaaaggagattgactccaggatcttccaaggctg

SEQ ID NO: 323146 - DNA, 111 bp, Homo Sapiens
cactcatcatttatttacaaatacacattataacttttatatacattgcacatttacatggtagaaaagtacaaaactatatatttaaatgaatttatattttaacttgcc

SEQ ID NO: 323147 - DNA, 575 bp, Homo Sapiens
ttttttgctattgattacaactttgttattcaatttaatcagtgctatgtcattgtcaaagccagcatcatgagtataaccttcatgtataaaaacagcttcagaccaggcttgtgtataatgaggtgatagtcttttcagggtgcccattcgaatgtccagggcagatgcatcatgtttttgctcatagacggcatgagcagctgttaggacccagttgtcatataaaagtgcacctgctgctgtggttccacctaatatcaggacttgccaaggaaaatcaccaggttttgccttttgccctccatatatacgccctcctgttgtgcgggctgatagtccacaaacaggctcacagactgggagtgatttttctcctttggagctcgtccagaatccatcagcctcacacacatatttaccatcattcactttcattgtgtagaaggtctcttcacagctgtactgaatcacagctttgtaggtggcactccaggacctgtgatgtactccgctcggccactgggtagatcatcaggagggccacagtcaacaatgctgcacgcgggcattgg

SEQ ID NO: 323148 - DNA, 446 bp, Homo Sapiens
  misc_feature (398)..(398): n is a, c, g, or t
ttaaccttgaaggagtttttattgaaacacagtacagaaaacaccaaacgtcactgacagcagtgagctcatagctgtaatggagttggccccagatgccaaaccacctcgctgaggtgtgacttcctctggagggtgacatggcaaggaaagggaaggtgttctctgtcaaattcagagaccatgtgcacctccaacaaaatcacactccctacaagttcagtgtgcccccagtgggcacccgtgggcacatcttgacaatggggaagggttaacgggagtaggtggggggacatcccacccaatgggcacataccgggggttgggggaatttagggctgctgagtctttctttgggagaaggaaggagaggagctattgccacagtttcagctttnttggggccctttaggacaaggggccacagtttttcgggagaggggttt

SEQ ID NO: 323149 - DNA, 806 bp, Homo Sapiens
  misc_feature (121)..(129): n is a, c, g, or t
  misc_feature (195)..(203): n is a, c, g, or t
  misc_feature (307)..(445): n is a, c, g, or t
  misc_feature (454)..(590): n is a, c, g, or t
gggcccccggcgtttttctccaccgggggggagaaaatttattttctccacaaggggccgccaaggggggtggtgaatcccccggggggggtatcaaagggttgtccaacacccccgtttnnnnnnnnnttctcccgcggggcgcggaaagttttttaaataattatccaccactctccccaaaaattcgccacnnnnnnnnnaagatttatatataagagccccctggggcccccctggtgagaaatcccgaaaagaccccccaaaaccccctttgggtttttttaaaaaccccgggttccccccnnnnnnnnnnnnnnnnnnnnnnnnnnnnnnnnnnnnnnnnnnnnnnnnnnnnnnnnnnnnnnnnnnnnnnnnnnnnnnnnnnnnnnnnnnnnnnnnnnnnnnnnnnnnnnnnnnnnnnnnnnnnnnnnnnnnnnnnnnnccccaaccnnnnnnnnnnnnnnnnnnnnnnnnnnnnnnnnnnnnnnnnnnnnnnnnnnnnnnnnnnnnnnnnnnnnnnnnnnnnnnnnnnnnnnnnnnnnnnnnnnnnnnnnnnnnnnnnnnnnnnnnnnnnnnnnnnnnnnnnnattaaataaaagttttgcttttatttaaaataaaatgcatttatacagtctttgaaccatggattattgaacaatactggtaatccacctctccctcgcacccttttgggctatgtgagctaggaattttctgactagcaccaatacagattgtaacagcgcaacagactagaacatggccagtccaggcattagagttaaggacattgtggcaaa

SEQ ID NO: 323150 - DNA, 366 bp, Homo Sapiens
  misc_feature (19)..(19): n is a, c, g, or t
  misc_feature (32)..(32): n is a, c, g, or t
  misc_feature (35)..(35): n is a, c, g, or t
tttaaaagttaaccagtgncacactttttgtnttnttgatttggacacaatagattgctttttcacaaaacatcctatcttcattaacctataactgatttattaatgctattttaacataaattaaaagataacattttaaatttttgtttcaatgtcaaatgtcataaatattaacccaaataaacaaaagctctttaaagtcctcaataacttctaagtgtctaaaaacataattagatcaggaagtttgaagccactggtgtccccattgaacctgaatgctgacgtagacctggtccagtactgccctgctcgacccaggacctcaaacctccaaccaactcaggggcttaagtactggac

SEQ ID NO: 323151 - DNA, 791 bp, Homo Sapiens
cttgctcttgctgaagagactccatttataatggaagttagaacgacacacaaacaggcaattgataaaggcggcacaatggggaaggagaggtgaggtgtctccttagccacccgacaccatctcaattcagttcaattgtgaaccactaggagaaacagaattaaataactatcaaggggtacagagttaagagttccagccttccctcttggggaaaactaaggcaaagtaatactgagaaaaagtggaggaagccacaccttcaggtcactccaatgaggagactggaggggacagaggagagaattccacgcagacacagcaagtaagcgtggcttgtaaacctgggactttggcaggtggggctgggagctgatggaatttgtaaaccaggctgtggtcaagggaggaggcaggagctgtaaacaaaggggcagtgacctaggaaatgaaggagatgtgcctataaatggagtggggtctgggcctcccagagagacgagtgcttaaatcccgagagtccccacgggatggtggggaggaaggctgtggggagagtgtaccctgccatggggggcaggtgctccatctccaccctccagggagttctgtgccccttctcaggacttggcgctcactcttggatgacctaggatgcaccagcacgtttaaccccacccacaccagggactttggattagggtagaaattgggcaattggctccgacgcgtgggtcgacgatatcccgggaattccggaccgtacagctgcttttagacagctttta

SEQ ID NO: 323152 - DNA, 756 bp, Homo Sapiens
  misc_feature (177)..(177): n is a, c, g, or t
  misc_feature (633)..(633): n is a, c, g, or t
  misc_feature (714)..(714): n is a, c, g, or t
  misc_feature (744)..(744): n is a, c, g, or t
acagcttaagatctccttcagcgagacagccctggagaccacgtaccaatacccctccgagagttcggtactggaggagctgggcccggagcctgaggtccccagtgcccccaaccctccagcagcccaacccgacgacgaagaggatgaggaagagctgctgctgctgcagcgagnagctccagggcgggctgcgcaccaaaggccctgattgtggatgagtcctgccggcggtgaccatcttccaacatagggatatacctccctccttcttataactggagatcctgggagcccggaagattcagggcagacagaccctgataatgagcctggcagggaagggcaaccaacatcttgtaacttgctttccccaccctgtttctgggggcagagcaatttgcccaatttctaccctaatccaaagtccctggtgtgggtggggttaaacgtgctggtgcatcctaggtcatccaagagtgagcgccaagtcctgagaaggggcacagaactccctgggagggtgggagatgggagcacctgccccccatgggcaggggtacacttttccccacagcctttccttccccaccatcccgtgggggacttttcggggattttaaggcattcgtnttttctgggggagggcccagaaccccactccattttattagggcacatcttcctttcattttcctagggttcacttgcccntttgtttttacagttcctggccttcctccnttggaccacagc

SEQ ID NO: 323153 - DNA, 492 bp, Homo Sapiens
tttagagcagattgaatttacattttacttaaaaaaaggggggtgggggaagtacatacacaaggaggaaaatggggtgaggaacaataaagatctgaaatggatttctatgattttcccctacaatgatcgattttgtctgttgggcagtatttttcctgctggcgtacaactgtttacagtattaacaaggttgtagacaaaggaactgccaaagtttaggcccggatggaaaggacagtaagttatcatatacaatttaagtttacaatacacagcattttctttaaatgatgtaacgcagtcgcaaaaagaagttaacaatactaacacgagaataatcaaatttttgttgttatccatgtgcagcaactaactgctttacaaaaaagcaaaataatacaatatatcatcacatatatttacagtatagtaaatatactttttttgtcaaattttacacaaactatttacaggtgaatatactgcatt

SEQ ID NO: 323154 - DNA, 534 bp, Homo Sapiens
cgaaatacttctcctttattttgatcattgttctgcttctctcaatgtgactggctagtttcagcctaataaggcttcccctgttttcataggtttacccctctcttctgtaaacaagggcttccactaaagcctggtcatcactgggagttgaggagctggggttgaccattctttgctgtaataattttaaccgtggacaagttcctggtaggcagcaaaggtaggttgggatccttgatgtactccttggaccccagtcgtcattggggttggtgcagacttcctcggttccctcttggtgacgaagatgattgctggcaggtgacagttgagggcctttctgtatcccaccactagtctccttggcaacactttctcataatacttcaggcagcaggtggatggggtgttcacccactcaggaacttttggctggctgcgagaagccgaagtaatgataaggatgaggacaaggagagacagggcagcctcggagaccttcatcctctcagcgaggcagtacagcttcag

SEQ ID NO: 323155 - DNA, 704 bp, Homo Sapiens
tgacaggcttcttgtaatttatttgagttatttccaagcgacagttacaaaagttaatttttataatactcttgataagaaaataaaatttaaataaaaatacattctcaacaatacaacatggttacacaaattcactacattaagttttgataacttacattttcaaactgggtactgtaaaaaccaatatttactagcaacatattaatttccaaattaataaaaatggaagcagataatatcaaccaagattggtaatttaactctagaatgagtcttgtatttttcacatactgtaaaaacacctaaaaggctatgcagaattctgtctttacaggatgtaccgttagagcaaattaaaggtgctttcacttaagaaaaagatctgtttttcaaaacctggcataaatgaaatcaggcttcagaaacagaaacaaaagccatattattcgtcacctttttttgtttcataaaaaaaagcctagttttcacacttacccattacccgtgatattaaaaacaagtttctttggcaaataaaacagttcatttgataaattatattcctgggagtaaaaatgtttgctattgcccatcatcttattaaatgaatattaaaaaacaagctacacaaaacaaacacacgaaacagcacagatcacaccacatttcaactgatggaaatggctaaactaagacta

SEQ ID NO: 323156 - DNA, 489 bp, Homo Sapiens
  misc_feature (460)..(460): n is a, c, g, or t
  misc_feature (467)..(467): n is a, c, g, or t
ttcaaactgttggtggctacatttgagtacagaactttattaggaaaattataagtgcatatacattttttcattggtatgacttcaaagtagaaattgttgtttctcaaagagttgtttcttatttattttttaaagcacgctgcgtataggaattggccttctcctggaccattttcacattatctgggagatgcaattgaaacaatacaaaatacagtattcatcacatttaacactgaatcattcactgctcagagactgagagtccagcgaggttgcaaaataacaaattttctacatggttttatcagtggtctgcttaggggatttgggaagtttctaggggaatatttcccagggaatgggggctccttcagaatgggtcaggggaagctctgtagagggatcagagcactcaaattcttcatccagctgggaaaagggtttagccccgggnaaggcgntcaactcccagtcagggggccc

SEQ ID NO: 323157 - DNA, 384 bp, Homo Sapiens
gtgtgagccactgcgcccggcaccttaaatacacttttaaagttaaacttatggagggaaaaccctcatctattgacatagattgtatgtccttttttggtccctccatgaaggagcaccgttttctccatcatttcttcttcccttcacccgtcagagtgaccgaggctggggaccccagaagccccagagcaggcccgaatctgggacttccacggtcctgggggaggggtgcggggacactcacgtgtggcgcggatgtccggggtgtgaaggcagcgggcgcagctcggcggcgccggaggagccctctgcgcccaggaacaagacagggaagatgaagccggggctgaggcgcaggcgcgggcgcggcctggggtgtgg

SEQ ID NO: 323158 - DNA, 404 bp, Homo Sapiens
  misc_feature (338)..(346): n is a, c, g, or t
  misc_feature (366)..(366): n is a, c, g, or t
ttttttcatgccaataatttattgaacggaggtctgtacacaggcaaaccttactgtggaaactaagacatcaggagctctctccactcccctggccctccagggtggggtgaggagggagtagaccttgggggcagaggacaggaggggagttacagctgtaggaggggcggggccaggttggacggtgcgaatcgacgttttctttaagaaaaaaattataacaatctatttacacccgggggccagggaagggaagaggagacgggctgggctggttctatttacaagggacacaggaggggagggggtctggaggaggtggaggtcgtatatcnnnnnnnnnctattgtggtaagaagatcncaataccccaacaccctgtccttctcttcctccccaca

SEQ ID NO: 323159 - DNA, 345 bp, Homo Sapiens
  misc_feature (104)..(151): n is a, c, g, or t
caaaaccaccaacaatgtcagcaaaacctcaaagatctgattttggttgaagtagaaagaaagataaagaaaaaacatatttaattactgtaaacaggtactgnnnnnnnnnnnnnnnnnnnnnnnnnnnnnnnnnnnnnnnnnnnnnnnnatgtttgcaagaaactctaagggctaaggaaatgcactgcattatgatctgggctccttagagtacaaacctcaccaggcttaagcatcatccataagaaatggtggattacttaatgacttataagtaaaacagtcattaaatgatcctttcatactttaatcctcttatgcagagactgagatacttccacc

SEQ ID NO: 323160 - DNA, 708 bp, Homo Sapiens
gatgcttaagcctggtgaggttgtactctaaggagcccagatcataatgcagtgcatttccttagcccttagagtttcttgcaaacatttaaaaaaagacatatttaagaaagaaagataaagaaaaaacatatgtaattactgtaaacaggtactgctttatgtttattttctctctacttcaaccaaaatcagatctttgaggttttgctgacattgttggtggttttgcacatgttctttctaattggatttatgaatagttctatgggttttcaaagatgaatcatgctaagaacacttctgctttttgatccactgtttgcagcagaattatatatatgtataggaaaaatccactttgaataatccatgttttgtatttggaaattgtttttaaaaataacaaaggaaaggaaatatataaagctgttatttattctgcatttcttacatatctatcgcttgtcagtatacccgttttggtatatattgcctctgcacatctacatttgtatatgcaacagtgagctttatatctacataaactgtaaataatcctttctgtgaaaggatcatcatatcaagatgataccaaaagtatgtaaaaagaaacctgcattattttgtaattatttcttatagatatttcatggtaagattagcagtcaataaagttacttttttgcctttaaaaaccaaaagacc

SEQ ID NO: 323161 - DNA, 381 bp, Homo Sapiens
  misc_feature (326)..(326): n is a, c, g, or t
ttttcatttagtctttttgttttattcaaatgtcaaaatgtaagttccaagatacaaattatgtttgatttaaaaacatcgactatgctttgttaacaacttccaaagccaaatgtaagttgttgtgactaaaatgcccccccagtacatttctggaggattaaccttaatatgtttagcagctagtctgatttccactctacaaaagggaaaatgatgctataagggaaagataatgaacaaagttataatatgtaagacttcctgggaagaacttgaaccattactagggagaccaaggagaggtgtttctgttccatactatnggcaaccagccttaacactctgtaatacaagtgcatttctgggtcctacccagcc

SEQ ID NO: 323162 - DNA, 584 bp, Homo Sapiens
  misc_feature (417)..(427): n is a, c, g, or t
  misc_feature (474)..(496): n is a, c, g, or t
tattatgtatcatgcttttaatacaaacttaaaaaaatctggaacaatagaaactgtacagatttgatcaatctttttgttttgtttttaaactaaaatctctaaacacaccaatgtcccattccaaaatattgcacaacattctgaatacaaaacccttgattgtattcctccttcactaaagaaaaaagttcatgaccctgctccccgggctcctctccaggcttgcctcaatgcccccttcccatccctagggagaaaactagagaatctataactcactgcattgagaaaaagacatcattctggactaacagtttccattcttcagaagataatccaccttttgatttgttcctgggaaagagggatagatagaggatggggaaaggggagaaaaggttttatttctcctcnnnnnnnnnnnaaagtttgtttttcctgaaaaaatatgtttctctcatctttttaagnnnnnnnnnnnnnnnnnnnnnnnttatgtttttttacgttagaaatatacatatattatatacctcttacattttacaaatgtagcaaattattcaatacaaacggacacc

SEQ ID NO: 323163 - DNA, 396 bp, Homo Sapiens
ttttttttgaatatttatagatttatttataatgaaattatggtctaaatatttacaacatataggaaaccagaggataagtttatacaaagccagcctgcaaagtattcaaatgtgcaaaaatgacagttcaatatctcaaactattcctggttcagcagactagctccttcactttcacacatcaatatttgatacaaaaagttattttggcaaaatctgtaatgccaagaaaaaggacaatttgcaatttcagtcattaagtccaaaatcctatagccagcagtcagatctctctgttttagctgcaaccagttctgggagagagagaccactgtatttcatttctgtgatgagttctgaccagttttagtcaagaagttttctctgacccag

SEQ ID NO: 323164 - DNA, 498 bp, Homo Sapiens
tttttgcttctcacacaggcgtatctttattaaacaagaaaataagataaaagcaaaggggggaagccttgaaccttaaaagctgggccagaaattctacaatacaatcagaagccacaatctggtcacagtgagagcccttcccgcagagccgcagacaccggccgctgccccctggggggggagggaagcctcctgtttgttttttgtcccgttgctttgagggctggaatcaatgtcttttcctctcggcgtgtttgtggtttcatctcagtgtgtccaggctcggatggcttcccgggagtatctccgtgtctcaggattagcaccagtttttaaaaataactgacaaaggccatttttcaggagacaaagatgttggtgggtgcagagggccccctgtgtgttgataaggaaaatgaaggtcagccactccctgcttctcttggtgtcttgttggacacgatgtcaacatggggccggtagaactggagccca

SEQ ID NO: 323165 - DNA, 939 bp, Homo Sapiens
  misc_feature (91)..(91): n is a, c, g, or t
  misc_feature (95)..(135): n is a, c, g, or t
  misc_feature (137)..(139): n is a, c, g, or t
  misc_feature (146)..(146): n is a, c, g, or t
  misc_feature (149)..(151): n is a, c, g, or t
atgggatgtcggccgggggtgcgtggctgggccgtcctgctcgccgcttttgctgggttgtggtgtctgggtttttggcgcttgtggtttntgcnnnnnnnnnnnnnnnnnnnnnnnnnnnnnnnnnnnnnnnnntnnntgttttnttnnnccgggtaaatttcatcccaatatttattgaatcgtgaacggttgcaaacgttgcccacaatcagaaacccacccatccctgatgcctctcttggcttccccttgagaaggatgcctgaggcgggatgtcccccccaaactccaggggacaactggggaagacatggggtatgcaaagagatatgatgaaaccacgggacaggaggagggtggggtggtgtggattccggggaagacacatacacacagactctcccgctcagaggcaaagaccgggggcgtcaatctctgcccccaacagcagccacgagaacatcagggaaagaccaggtgtccacaagacttttcagtccttcctatcatgaagcgtctgctgagaggggctgggtcaaggtccctggactctgccttcagggcgcattagccctgagccaaggcggctttgatggcggccaccaacttcagaaacttgctttctgtgtccacgtagccatcgcctttcttcttagagtgaatcaacttcccggctaccatcacttcaaagaacccggtggcctggggagttccctcgccgcagatgtccaggcggccggggaactcatcttctaacttcttcttgagctgaagatacttggacttgtagcctcaagcgccacaataaacgactcggacggcgagagccatggctcggggctgccacatccgctgaggagcggacgcccgggccacactaacctcccacctggacgcgctcctcgtgccgaattcgccacccaggcctcgctactt

SEQ ID NO: 323166 - DNA, 481 bp, Homo Sapiens
  misc_feature (417)..(417): n is a, c, g, or t
  misc_feature (441)..(441): n is a, c, g, or t
  misc_feature (446)..(446): n is a, c, g, or t
  misc_feature (466)..(466): n is a, c, g, or t
atttcggttaaattcatccaatatttattgaatcgtgaacggttgcaaacgttgccacaatcagaaacccacccatcctgatgcctctcttggcttccccttgagaaggatgcctgaggggggatgtccccccaaactccaggggacaactggggaagacatggggtatgcaaagagatatgatgaaaccacgggacaggaggagggtggggtggtttggattccggggaagacacatacacacagactctcccgctcagaggcaaagaccgggggcgtcaatctctgcccccaacagcagccacgaggaacatcaggggaaagaccagggtttccacaagactttttcagtcctttcctattcatggaaggcgtcttcttgaggagggggctggggttcaaggttcctggggcttnttgcctttcaggggcgcatttagnccttnaggcccaagggcggcttttnatgggcggccaccaa

SEQ ID NO: 323167 - DNA, 439 bp, Homo Sapiens
ccaacaaaaattttcaatccttccctatcaatgaaacgtctgctgaaaagggctgggttcaaaggtcccctggaactctgcctttcagggcgcattaagccctgaagccaaggcggctttgaatggcggcccaccaacttcaagaaacttgctttctgtgtcccacgtagccatcgcctttcttcttagagtgaatcaacttcccggctaccatcacttcaaagaacccggtggcctggggagttccctcgccgcagatgtccaggcggccggggaactcatcttctaacttcttcttgagctgaagatacttggacttgtagcctcaagcgccacaataaacgactcggacggcgagagccatggctcggggctgccacattcgctgaggagcggacgcccgggccacactaacctcccacctggacgcgctaggtct

SEQ ID NO: 323168 - DNA, 316 bp, Homo Sapiens
acttgcatgtcatccttaatgtctaacatgaaaaatcagcaaagagtatggtttttatcaagaatttgtgttgggagtaaaaactgctttatagctccctaattaggaagagaagagcagaaatcctctggggcatttaaccatctggcagaattgttgctgcacccttatcccagttataagacagtcaaaatgactatttcctaaatattgtgagtgtatgaaatgtgaaattaaagcaaaaactggagacttttaatgtatttctttaatttgaaatgttttgtggattgtgaaataaaaataaatttatgtc

SEQ ID NO: 323169 - DNA, 458 bp, Homo Sapiens
  misc_feature (285)..(285): n is a, c, g, or t
  misc_feature (308)..(308): n is a, c, g, or t
  misc_feature (328)..(328): n is a, c, g, or t
  misc_feature (378)..(378): n is a, c, g, or t
gcaggttccaccagaggcttttatttcagccactcaggaccctggctttctgctccaaggcactgaacacagtcaggctcttctaaacactggcagggacctcccccacagccgcccccacagggttctctgtttcccaagtcctgatggattcaggcaagaccttcacacattcacccactacctgctggagaggagggtcatgaggcagcctgtgggtgcccagctcagtgtgacacactggccaatgtgccgcctcccccagcctctgatgggggccggggnttgaccacgtgacaggttcaagntggccgtgcacaatcccccngggaaagggggaaggagctgttaagggttttaggcagttgaccaaacaanttaaggaaattgttaattgtgggagggtttacacaggtggttttttgggttttaaaacaaattccaacacaaagggaagg

SEQ ID NO: 323170 - DNA, 964 bp, Homo Sapiens
cccagtttccagggggaaggacagaaaggttgggtgcccaggcttccttgtcccagttagggcaggaggatgagtccttgctgggccatccattgatcaggttcccttttcctttccccccttcaatttctggcttcctcatggccttcttggggagtccccagcttcctcatggctttcctagggggaatccccagctttcacggccttcctgggggagtccccaagctctccatggtcttcttagggagcccacagtaatggaagcctgatgggtgctctgatcccagggtcacgagcaaagcgctgcgactcactccctatacctcttgtcacatttgtgggaatccgaggccctgcatgggttttctgtttctagcttcactccaatttccggggtcccatgatataacaagtgtcaactgagtgtctgcagataacgcatgacagcttctttgacttgacgaaagccaccatcagggcccctgccatcgacgtagtacatgaatcggagctcaggtgggtaggcagctctgctgaggcccgacagcagggggatggtgcagccctcggcccctggagcctcggtcagggcctgcagcatctggtacttgcaccaggggtcctgaaggaagcccggcgtgatgagcagcacccggcagtgactactgctcagtgcctggcacagctcggacactatagcgccgcctggggttgcatcccggagttgcaggaagcagcgcaggctggcagtgctgccttccaagtaggagaccaggtcctgggcggccaccaggtcttcctcactgtggcacacgcagacgtcatagtctttgctccagcgactactgccactgtcactcgcatgtgtgggtggcaggctgggagacgtgactgagctgaggcctcgtgccgaattcgccacccaggcctcgctaccttaaaaccgttagagttactgccg

SEQ ID NO: 323171 - DNA, 1053 bp, Homo Sapiens
  misc_feature (81)..(118): n is a, c, g, or t
  misc_feature (212)..(212): n is a, c, g, or t
gtctgggcttgttggcgctcccggaaacacatgaaccaagccggggttgggaaaaggggctgggttcggcccagggctgtnnnnnnnnnnnnnnnnnnnnnnnnnnnnnnnnnnnnnntttcatctcaagttggtggaaagggaaccacggccctgggctccgaggacggggagtccatccggagggccactccggggttcatcgagaccanccggcccgtgccatccacgctccagtggatctgtgcgcatcccagtcagggtgtcttgctccgggcggcggacggccggggccatcggggtcgctgccatccaggtcctggtctgcgtccgtggttccggacgggacgtacttcctccggcccagccgcgtctgctgggcgaagtagtggtagcgctccggcttcttccacaggtagtagtactggacacactcgcccactgaccgtgtgcgcaccttgttggcctggatcaggtgaaagttctttccatgcacacggaagccgtgctcaaagttcctgcactcctcttcactccaagcacagagcccatctcggatcaccttcacgttgaaccgcagccttcgcagggcctcctccacattgaagttgcatttcaccaactcgtacagcgcctgctcactgtctttcacggcttctccctctgggagctgaggcccggccatctcgtgccaacgccgcttcaccgccctgtacaggaactcctccacctccctctcagggaggacgctggggtcccagagcagctggtcttcgttctcgtagatcttctcacagtgccggttcaagtgcaggttgctgaggtcagcttggaactgaggtcccaccatgatctccttcttacatttgttggcaggaagagagtcctcctcggtgtcggaggaggcagaagagccaggctctctgtcttcatcagccaggaaacgagatccactccggttagggaagaggtcggaggcctcgtgggaggtcacggacggggtgaggtcgtcagcagatgattgcgcctcgtgccgaattcgccacccaggcc

SEQ ID NO: 323172 - DNA, 1098 bp, Homo Sapiens
  misc_feature (212)..(212): n is a, c, g, or t
aggggagcaaagaggttccgcggaatctttttggatatttccagggggaatgttgcggggcctttttcccgggcaagttgtcccttgctctttggggttccggtctccttggggccaggagggtgaaaagggctttccaaaaatatattgcccatttccccagccccaggttctttgattgcatccacatatggagttggaacccagtacanccagtagtaagaggcttccgtggggcccaactgaaacgccatcatgtggtagtcttcatgtccttcgataggttcactgacccacattttttatggagcccatgggcaatttctcagtccgctctttagtgccaatccacagctggtcttgttctagtttaaaggtgagtctcacttttcctccagatttattgtgcatgccggacagcggtaccgttggcaggcgctcctgggcccccttagcagatggcatcacatcttcaggttttcctttatccaacactttcctgtgttgtttctgcctgcagagaggctccttcttgttctcttcggcctttgcatcctgctgcgcagcatctttgggtgtgtttactgctaaaacatcattgatggtggagccaaccaccatgatcttggccccactggtcacttttatttctctcaatgttttatcctcggggacgagtcccttatacatgactttctgcatggcaggcgggagacctgtaatcgagtggatcttctgtttcagctcggagcctgtgctgtccagggggaacttcacgtcatgcttggtcttattccagatgatcttcaagtccaccagctccctgcccgcgccgccgcccgcgtcttcgccgttgctgaccgaggcctgggctgcggggtccccagggggctgggccggggccggctgcaggctgcctcgtgcggcgccggagtcctcagccgccgcccccgccgcggcttcagcctccaggcagttgacgggccgcgcgggagcctcagtagccacagtctcggcctccgtgtccatgccaggttcctccatgccatccggggccccggccgccgccatcctcgtgccgaattcgccacccaggcc

SEQ ID NO: 323173 - DNA, 1149 bp, Homo Sapiens
  misc_feature (255)..(255): n is a, c, g, or t
  misc_feature (1116)..(1116): n is a, c, g, or t
ggggtattcacccccgagcggcgcggtttactcgcagtaccccccggcgggtttctcctcgcttgcgccgccgactgctcaccctgtctggccgcagcaaggtgtagagttcgctgtcccctcatacggcttccgtattaccaggttttgttgtcgttcgaagcgggccgggggctccgcgcacagtcccaaggatagctcaccctacgcacccccgcttcacatgtgtgtgcggaagccccaccggcttcgtgnttagccccccggcttgagcgacagtggaccccgtgaaggcccctttcccccgcattgggccatgtttcttccctcgcggaccccttttgaaccccagttgccagggggtgggggccccgcctttgccggtttgcgcggccccggccccccccaagcccaccatggtggtgagtgcagaagctggagcggctgtcccggtccccagggccccggagccacacaccctctcggtgccagctcacagctgaagggtctgctcctcactgtcgctgtcactgccttccagctgctccaggatctcgtccaacaccacagaccgctttttcttcgggggctcgtgaaagtgagcggccgtcttccgccgcagggcctgcagggtcacctcggagtcggcccactccagcaccagcctccgcccgtacaagtgggtgctgtgacacagggcgttgaaggctctcttcgcatcctgcttggtgaggaagtccacaaagccgaagcctctgtgtgtgcctgtcccagtcatcttctttggcaggcggaccgtcttcaactccccaaaggtgctgaagagctctcggatctcccggctgtgggcctggaaggggatgttccgcaccaggatcttggaggtggtctgctttctgggaacttgtttcttccgagccaatgtcacggctggcttagtggctcgttccgagatcctcacttccagcttgtggccgtccacgacgtgaccctggagctgcttgagagctttctgggcttgctccggcttcctgtattccacaaatccaaaccccatggaaaggagcactccctcgtgccgaattcgccacccaggcctcgctacggtgggaggtngcccccccaacagttctatatatcaatattatt

SEQ ID NO: 323174 - DNA, 1091 bp, Homo Sapiens
ttatttgctttctgtggtgtcaaatttggggtctcctagagcccagccccagggagaatccggcatatccttctccgcctggggggcccgggacacaggagtttcagaaaaggcactggcaaaagttctagggcgggggtcagggagaagccacactgagcctggagggaccgggccctccttcggcggcagaaaacacagtcacctttggcagggaagggttttttcctggaaaagaaatttaaggcaaggataaaaacctgagatgttaggaggaagcccccagaaccaagccggtgctcccctgggcaggcagagagtgaactcggcttccaaaaggctcaggggaggcttgcccggcccttcagcccaggctcagatgccacaggccttggcaagcagaaagcctaattcaaatccctatgtggaatctccttgagacaaagtgtcacgacacaaaacccccaggccccagaccccacctctgaatggcttgggccagacgctggtctggatcgtcaggagccacggccactacccagtgaccaattcctgtccctttttgtgtgttctgtgagcgctggagaggcaggcacttctgtgggtaactgggggaggcacagcggggagaaagagcaggaggagaaagggaatttgggggagggggagcagtttggggtgggactgggtccctcaagtcctgggagtccccccccactcagcttgtgacaactgtcctggaaaccaggggacagagtctctcagcaggtatgttcagcgtccacccgggaattagctttccagacgtgggcactgggcagcgcctgcccctcaacagccattctgccaagggtctaagtggaaccccagccctcggccggcctcctcactgcaaaaacggggatgctttccctcccaaccagcagccccgggccctcatgaggcacttgtgcccagggaagggaaatttaatccggattataaaaacaaagccctctcctgccccctcaagttaggatgctgaggatgggtggctgcatggggcaacctggcaaagaccctcgtgccgaattcgccacccaggcctcgca

SEQ ID NO: 323175 - DNA, 1057 bp, Homo Sapiens
  misc_feature (56)..(56): n is a, c, g, or t
  misc_feature (200)..(200): n is a, c, g, or t
aggtctcatggtggcccccgggaattcctctcccataggggaaaacacaagttttntggccacccatgtttccccgttcaccctaactgggggccccggcggccgccaaaacggaaaggggtttagaaaaaagtttctcgagggggcccgaagcgggccgaccaaggtttttcagaatctccgaaggccgcccctcccgnggttgggcaggcttgtttttgccatcttccccatcagcaaacattgaaccagggcccactcccgcctgccccagactggagacttttaggttataaggaataattcttccttcatgagccagcagtgggtaccagagtctcttgggctcagcacctgtttcctttcccacagaagggggtgcctgtcagaggcctggagccaaggccacctgtggctggacagcagcagccccctcagagtggggagcccacttctgccttctgcacgcgctcactcctgtgggtgccatcgcagtacgggggcctctgagtggccttgcaggtacagagtgccaccatgcgggtctcttgggccttgaacttgagtggagataggccagtgcgttggaagaagtgggagccgtcacagaagggctgcttcttgctgcggccacacacacaccacctgtaggttttccctgccaccagctccaccttgatgggggtcttcagggccaccacggacctggctggggttctagggaaccactgggccagccaggaggagatgtcccgccgcgggttcaggtcctgcaaggtacgcaagcatggcaggcatcacaagacggtggtttggaaacggaaaaataaaatcagtggaaagggaaggacacgggaggccatctaggaaggaggaggtgacagggctgaaggggcgagggaggaatgagagggtaagaaaaaggtcgcaagagaaggtgctggctgcggaggtcctggcagggactggcgctcgggaaaagcctgtgagctgaggcaagccagacaccggcgggacgggccctcgtgccgaattcgccacccaggcctcgctacct

SEQ ID NO: 323176 - DNA, 948 bp, Homo Sapiens
ccctttattctcttcaactaagcaacatgaccaccagtgacacaacactgttttggacacacaacactcaaaaatggggcctctcttcacttccttggggacaagtccggtgactggggtttccctagtgagggcaaaggagtctgggagctgctgacctcagggcaggtcatggaaccccaccttcttggctgtgatggcttcaagtttccccaccattcaggattcatgcccagttccaagttcccatctgacctccatgtccatagcagtttcaagtttcactctaagctctcccctctgctttccccactgactccctgaccctatctgttgggctcctccctccaccagggcgtttctgaggggcctggggcctgcatgtgattggacaagagggtttggctgcacagtgccttccagactcagttgtggtgagcaaatgctttgacccctgggccttcatctgagccgatctgagcaactctagccactgccacctccctgcttcaatcctcccaagacgtagctcactctgggagggaagctcctggttaaaggagcttggggaggtgggcaagagagaacacgccacaccccagaggtatcgaaccctgcccctttcctaccgcaagacgcctgaccctacgaactgtgcgctcacatcatccatcccgtacaagagccaagccccttagccctcacccatccctacaacatgtgagcatcctactaaatatgctacaccctagtccgaaacaggcctgcgccggccttcagtcacactgcctgcctccccccagactggcctctgagccccaaaagctgctccccaggcctcttctgggaacagattccttaggcctgtttttgagagcatctgcttctggctttgcgagaggtttgtcttcctcgtgccgaattcgccacccaggcctcgctacctta

SEQ ID NO: 323177 - DNA, 1405 bp, Homo Sapiens
  misc_feature (142)..(142): n is a, c, g, or t
  misc_feature (144)..(148): n is a, c, g, or t
  misc_feature (150)..(169): n is a, c, g, or t
gttgggaatactacccagctgttctcgatcaggcatgttcctcgtaagacaacatatgaccaccatgctcttccttcctggggccgcggcgcaacaagaagaatctagtaagtatcttgtggagggacgaggcggccaacangnnnnntnnnnnnnnnnnnnnnnnnnntttttactgtggcttctgcatttcaaatcagcacttgcagggagacaacggggtttttgaatagtatcacctggtatgaaaagttttcccaagaaaccacaaacgattgttcattttttctccttttttgttaactttttgccacactcaagtcagtttaagtcctagcaaaaagacggtagttaggataccactgtggctgtagatgatgtgacactggttgaatttgtgctggcgtttgtgtaacttccctcgctgtttgtgtttgattcgttagggggcacctggcttgaattggctcgaaggattgctcctgctgcactgcaatgtggccgcggccctggttctggtgtgtaggtaaaggtaaggctggtggaataaatgattccatcatttcggaccaaagttactggaacctggactggttgccggacccatctccaaccttctcggaatgcagaaatgtctgggacgacacagagcatactctctccacacctgtacatagtttcagcttctacatccccaaaccacactcgtaaatttggagtgaaattctgtcctgtaagttcaagcattgctacgtccccaccgccattcaactgaaggctctctaccacaggcacaggagtgactggggcaaggacagggcccattccctcataaaatgtatactctgccttatctgtgctaatgattgtccaggaagcgccatcatttatcatctctttatttggttcttttggacatggagtggcctgaaattgaattattctttcttgagaaaggcacaaatacattctttctgtatccttaaggtaaaatgcacatttatggagttgtgacacaggatcatctgcatccaataatgcggtctgcttatcaactttcctaattatcaatcttgggagtgccatgccagtaactgagcacacaagtttgactgtttgtccataatggatgtagccatctcggactgtgaattcttctccttctgattcatcatcatccaagagatgaataaaaaaggctccccactgctgtgaactggcatgaaaattacctccttctacatgcaagtatctggtactaactgtctgggatcgtagtcgattaaacagagccacctttgttcctgaggcaatgcataagtcagcatttttcaatgactgcttctttttggaaggtttggagatgaccctcgtgccgaattcgccacccaggcctcgctaccta

SEQ ID NO: 323178 - DNA, 1229 bp, Homo Sapiens
  misc_feature (355)..(355): n is a, c, g, or t
aggaataccactgtggcttttagatgatgtgacactggttggatttgggctggtgttggtgaaattcccctcggcgggttgggttggattcgttagggggcaccctggcttgaattggcttcgaagggattgctcttgctgcactgcaatgtggccgcggcctggtttctggtgtgtagataaaggtaagggctggtggaataaatgatcccatcatttcggaccaaagttactggaacctggactggttgccgggacccatctccaactttctcggaatgcagaaatgtctgggacgacacagagcatactctctccacacctgtacatagtttcagcttctacatccccaaanccacactggtaaatttggagtgaaattctgtcctgtaaagttcaagcattgctacgtccccaccgccattcaactgaaggctctctaccacaggcacaggagtgactggggcaaggacagggcccattccctcataaaatgtatactctgccttatctgtgctaatgattgtccaggaagcgccatcatttatcatctctttatttggttcttttggacatggagtggcctgaaattgaattattctttcttgagaaaggcacaaatacattctttctgtatccttaaggtaaaatgcacatttatggagttgtgacacaggatcatctgcatccaataatgcggtctgcttatcaactttcctaattatcaatcttgggagtgccatgccagtaactgagcacacaagtttgactgtttgtccataatggatgtagccatctcggactgtgaattcttctccttctgattcatcatcatccaagagatgaataaaaaaggctccccactgctgtgaactggcatgaaaattacctccttctacatgcaagtatctggtactaactgtctgggatcgtagtcgattaaacagagccacctttgttcctgaggcaatgcataagtcagcatttttcaatgactgcttctttttggaaggtttggagatgacttttatccgcttgctgaggaacacaccaatgtcatcactgttgccatagaacatctttacagacaacatgaagtgctttcgcttgtctgagtcagatatatacaatgttttggctgtgcaatagttctttccttccaagtttagctgctgcatttcttggtcactatttccctcgtgccgaattcgccacccaggcctcgctac

SEQ ID NO: 323179 - DNA, 729 bp, Homo Sapiens
cgggtggaagctcttgtcttccgactgggtgcgcgagctaagccgattcccttactgtgcctacttgcccctctgcccttcctttctgacttcatgtgcctcagggcgtaggaaagcatccacagtagaaagataaattgagaaattgctccttcccagtcttcagaccagagacacagtttaggatccaaaagggagaggtcaggggccgttagaataggagatatgcatgggcgtgcctgtgaaaggctgcctggaggaccacagcaggcaaaggagcctctatcggctccccgctgcctgccaccctcatccccctgtgctctccgcttcaggctgcaagtgcaaggcaggaggctgagatgggctcaggccagccatggaccctgcctgccctcagagccagccgttgctggtgaaatccatgcgcagtgcctcctcctcagcggggctcagctcctgcaagggggcgcggcaggggcctccatagtagccaaaccagtccatgattttcttcagccctgggatcccaaagcgccgggtcaccgcagcgtttggctcaatgaggcggtgctgcagtttctgggcatcttcccattgccccgtgcagcacagtcgctccagctggcacacctgagcccccaggacattggccagggcgcagacgccccccacagctcccaaggcatagcctcgtgccgaattcgccacccaggcctcgctacctta

SEQ ID NO: 323180 - DNA, 1008 bp, Homo Sapiens
tccccgggccggggggaagggccacccttaacacttgtttatgggggccccaagaaggctggaggaccgaaacccttttgggagtccaccgggaggtgggctggaggaggccccttgggaaagctaagaggtggaggtggggcttcctgggagggttggaaggcccttggtgagagtggagggggaggccccaggctccccctgggaaagtgggtgtcagccccaaaggcgagtgagtgtggaccatgagctcctgccgggcttgtaggtaaagtctgtgttttcatcaagttcgttcttaaaaggagctggaggagatgaagcaccggcctcgagggtgatgctgtcgggggcccaggacaggagctacagttgacaggggcctcagtgtctccatgcaggctccgaccagctttgctgaatgccacatttccgtgaggggagagcccctgcttttcttccagaggagacagggaatctggacaggaagagcagcagtccccaggaagcagggcagggtcggcacaggcccgctggcagggaaccttctcacagctcacctctcccagctggcacgtgcaccgggtgcagggttcatcatccaaggtgaacacctggccattcgccaccttccttccctcgtagttgcagtctcggcacacggggcagcactccccgtcagggtggaaagggtaggtacaggtgatggggcagtccacgggggaacaggccactgagcccagcaggcagatgcagctcagacatgggtccagcacagacgggaaggtctcgttgttatagaagattctgcctgtgtaggtgcagcctgctgaacagtctgggcagcactgtccagggatccggatcgggtgagggcaggagtccacacagtctgtcctcttgcagctcaccgagccatctgcctggcagatgcataactcacaggggtcaccaggcgaccgccacccagcctcgctaccttaaaccgttatagtactgccacggttt

SEQ ID NO: 323181 - DNA, 970 bp, Homo Sapiens
ggggtggcgaattcggcacgaggcctcacggaaatgtggcattcagcaaagctggtcggagcctgcatggagacactgaggcccctgtcaactgtagctcctgtcctgggcccccgacagcatcaccctcgaggccggtgcttcatctcctccagctccttttaagaacgaacttgatgaaaacacagactttacctacaagcccggcaggagctcatggtccacactcactcgctttggggctgacagccactttcccaggggagcctggggcctcccctcgactctcaccagggccttcgacccctccaggagcccccactctacctctagcttccccaggggctcctcagccacctcctgtgactccagagcgctcgttctcagcctctggggcccagatagtgtccaggtggcctcctctgcctggcaccctcctgacggaagcttcagcactttccatgatggaccccagcccctcgaagacccccatcaccctcctcgggcctcgcgtgctttctcccaccacctctagactctccacagcccttgcagccaccacccaccctggcccccagcagcccccagtgggggcttctcggggggaagagtccaccatgtaaggaggtcactgtgtccgggagactctggagagaggacctctgccagtggcccagggtgtgtgcagggcagctccaaggatgaacctggtgggggatgccctgggctccctcctgcaggggccctggtgaggatggaagacccccaaggctggatgtaaccttgttcccaagaagtgttttggaatgtgctgtaagaatggaggaagtcgtttccactgtcagcatcctcccctggaccgcgtggcctggctcatcttttgagaagggttgggactgcacaagttctcctggaggaagagttgcgtccggctgggattccatacactggggctgtaccgccaacgggg

SEQ ID NO: 323182 - DNA, 1149 bp, Homo Sapiens
  misc_feature (90)..(90): n is a, c, g, or t
tttccagttctctgggcagttcctgctggtcactgctttaatcagttgatgtggtaaggaaaggagtggtgctggtgccaccatgtgtgngacactcaggtcctcagccacactccacctcggggtcttccacatcggtttccgcggcacagaggtcatccagggctgcctcttcacagtccgtcacatcaggaagccctcggatgagcatgctgacccccggcatcacctgggtcaaactgatgcaggacctccacgcagtgcattcatgaagagcttgtccttctgcgataggccgtgcagcagcagcaccgtgtcccgcagacagcgcactgtccgcctctgctggtcggtccttgggggtccccctgccctccgcaactgtcagccactgtctgtgcaacatcaccgtgagcgctctgaccacctccacattacactggcagttggagccagtgactgggggcaaggggctctgcacaccaagcttagccaggagccacaccacctcttgttccagctggagccattgtgtctccaaggccactctgtcaggccgtgatgtgatgtacatgtacagcagcagcaggaggcagccttctgagtgggaacagagctgaggtgccagctggtcgtggtccgccagcagggagaggagctcaacagccagcagcacgctaggcaggggtgtctctgggctgaggcactttggcagcacttggaacacacactggaacctgggcaagaaatcacaggaagtgttttcggctaatttcaccaaaaccttaaggcactgggtcaggacactggcttgaaggtgacctgttgctgcagaagagaaagccaacaggtgaagaagcatcttcaacagtgggtgctgtccttggtcatcagcaaccccccttagggctgaggtcatatctccatcactaagcctgtgaaccaggctcctgtttccttccccagcagcagaatctgcccccactcctgacagtaatagggagacgactgctccgctgtggcacaccaggtgctgaagaatgctaagtgcagtcacagagcctcgtgccgattcgccacccaggcctcgctaccttagaaccgttatagtactgccgtcgttatagctgtgttgtacactggctggtt

SEQ ID NO: 323183 - DNA, 990 bp, Homo Sapiens
  misc_feature (51)..(51): n is a, c, g, or t
  misc_feature (70)..(70): n is a, c, g, or t
cccctggccagagcaccccagctgaaggccaacctcagaaaaatttcacancaagcctttaagcactggncagtgtccaagaaaaccccaccaggggtggtacagaggcccactgagcagggatgtgatgcacagttccacgggacagaggggcatgggtggtggtgtccctaggggagttccgctgttctcaggtggctaccaggcctgggggggccatacagggtcaccgaggcaatgtggttgttctgcatgacctcaaagatcattcgctgaagaccaaagcagaatgtggaaccaaatgggttggtgttgtttggggaggaagacctgtgcaggacaacaggcttctccacagggtggcccaggagctcctggatgttgtcccacttgctgtaggtcgtgcatgtttctgtctgaccatctgcgttttctttctttatggctagtgggatcttgaactcacagcgatgataaatgttgaaattataatgcccagggtaattggtgtgtagaacaaacttcttcactttgtgtgtattcgcatcaaagaggatgtccactccaagagtgaagtagttaaaaaagtagtcattacacttcgatggaacttgtttatgaggggaaggagaatgaattttcatcttgtcttctgatttatagaagactttgtgtggagagccaagcatgctaagaacatcttggcaggaatcaccaaaatacactgaacgttcaaatacccgcatcttggcatctgctaataggccaggtccacaacctgcagcaagtaggcgaagtcgtaaacctgcaggtccagttccatctcgaagaacatctacactctcagcatagacattgcccaggaaacagctcagaggcatcatgggagccttggtatcctgcaggctgttgccactgtagatgtacattcgttttacagttgctccatggggtatccctcgtgccgaattcgccacccaggcctcgctc

SEQ ID NO: 323184 - DNA, 952 bp, Homo Sapiens
  misc_feature (82)..(82): n is a, c, g, or t
  misc_feature (207)..(207): n is a, c, g, or t
taggttaaatcccttaccccccccatcctccgttatattcacagaaaaaaaaccaattccaaaatgtcttaaaacaatctgnccttaaaagcatatgtagattacttagtttatggatgctttacaccagtgctatccaagagaactttgtatgatgatggcaatgtcctttatctgtcctatccaatatggtaaccacaagctatngtgcggctactgagtacttaaggatgtggctggtgcaactgaggaactgaatttttaacttcagttaatcttagttttaaattaaatagctcatgaggctagtggttaccatatgtgctagctcagctctggaccacccctcctcaagccctattccaggcacaggggacatacagtaagacccaatgtcttctctctaagaacttagaagctatgtggggagacaaaccacatagccacaaagagttaaacagtgacagatggcgagagctaaaggaatgaagaaattgcatcttagaatccagttctacagaataagacctttgcccttttgctgtagaggatacaaaacaatctgcttgagaaataatgcctgccccaactgatttcgtaatccctgttgcagttgatttaaaggagatgctgcctatctatggcatgtgcctcaggtaactacgtgaagtgggatcactgtctctatcaaatgcttactacagtgtctcctcaaggcagagcagagaaactgagcaggtttaaacgaggtatacccaattcctttgtctctcaccttttttccctcacttttcttcacagtctgaaggaaaaaggaaatatgatccaagccagaaactgccgatgttttgttcctattgtcactttgcagagcttcttcatccataagtaccctcgtgccgaattcgccacccaggcctcgctaccttacaccggggagtactggcgcgct

SEQ ID NO: 323185 - DNA, 980 bp, Homo Sapiens
  misc_feature (771)..(927): n is a, c, g, or t
caaaactaagttttaattataataggaaaactaatgcgaggccagaatttgttgactttgttcacagaatgctaattttccccagcctgattatgcagagctatgtttccattaatatgcaagatctatgttttatttcccatacaccacctatttgccaaatgcactaaaggataaaagattatgttgtaaccctgtgctaagccagattcatttgtgcgtatttatatggctatactggaattatttcgaccctggaaatcattgtttcaaatttccatggttcaaaggtttgctcaagcagatcttaaaacacaggtatgtattttcagaagatcaaccagattcaagtttgcatcccattttgggtaccttgtacaatagaaagtgttcaaagatctgtcctcagaaatgtctgcatgttggttttccagattcgttgcaaccctgtacgtgacttcacagaaactctgcacaagagttggtagacagctaaaccttctctaacattgagttcatggacaataaggtcttgattatacgcagaactggaaggtctactttacaagcctgcacacagtgctgtgttaattggctgctggggcacattgattggcagggaaaggccagggaggcagttgaatccctggcatttttcagagcttttttcctagtttcattgttcctagaattttgaagcttgttaagacattgcctatgctatgtcatactctagagcactctagtcagaatcctgatagaatacactcnnnnnnnnnnnnnnnnnnnnnnnnnnnnnnnnnnnnnnnnnnnnnnnnnnnnnnnnnnnnnnnnnnnnnnnnnnnnnnnnnnnnnnnnnnnnnnnnnnnnnnnnnnnnnnnnnnnnnnnnnnnnnnnnnnnnnnnnnnnnnnnnnnnnnnnnnnnnngccgaattcgccacccaggcctcgctaccttaacaccgtgagtagtactgccc

SEQ ID NO: 323186 - DNA, 1729 bp, Homo Sapiens
  misc_feature (409)..(409): n is a, c, g, or t
  misc_feature (665)..(674): n is a, c, g, or t
cgcggaagagggggccggttgcaggacgcgaagcgcgggcgccggataacggcaccacctcagtcggcagggggtgcggcggccaccgtagaggaacgaagggagggaggcgatgcatattaacgggcggtgtcgcggaaagtggcgtaagtgtgaggcgaaaggcaggcgggttaaggcgagagactagaggccccgtcgtggcgggaaacaggagggaggaagataggtgtgatcagtcggtccgccgggggtaaagttcgcgacgcgcagacgatcaaccgccccgcccggctagaggcacgaccgggcgggacgacgagccggcggccggggcgagacaccgagaaatctcggcgcggacaaacgagaagacagagaggaggcgcgcgcgggggacgcgagagangagaaaatgctgggtgaaaaaccgatcgccgagggcggtaggacacgaatggcgcgagccgcgactcgactatgacggcggaggtggggggaggaaggcgcaacaaaaacactgaagttgggcgccccccccgcccaacaccaacgtgctgtagaagagcagggccaggggagagttgtggcttgtcacttatggctccgaggcgggggggcttgtgtaatagagggggggcggtgtaggataggtgtggcgcgcnnnnnnnnnncgcaggaccgtgtcgaacatttcaagcgcgcggtccattaggggggcgggatgcaccggagaggctgggcgtgggttcgtcacatcagaggcggagcgcccggtgaacaggaaggggtttacgtgcaaccttggggcgcgccaaagaggcgcccggtggcccgccgggcggcggtcggaggggcgcctgcaggagctggagttagcagggggggccttagggtttcatcggggacggtgggggatgtcagttttaggcgagaagggcccgtactcgaagcaggcgctgagctcgaagaccaggccggagcgctaaataataacgccggccgcacgttctggcgccgggtggtacaggcgcccgttggcgcccaggggcagcaggcgcgccggctcgaagggcacggccagggcctcgccaccgccgcagtaggagaggcgcggaggcccgtggtcggcggtcagcaggtgcgtgaagaccaccggccggtcctcgcagcgcaggaagttgcgctctctgccgcagggcgagaggaaggggaaagcggcctcgtagcgcccgctgcggttgggtctcaggcgggagaagaaggtgaccaggaactgcgggtctttgaagcaggtgatgaaattcttcattttggaatcatccaggaaaagctggccctggtggtccacgtagtagaaatactcgcgggtccgcggctccggactctggccctgcgtgtaggaaacgcccccatccccgctgcaggcccgggctccccgcgaccgcgccaaggccagggtccggagcgtcccgcaaggcggccacattctcctcccgcgccggaagcgaccagcaggtcacgccgggggcggtgctgcgcgaactcgcgcctgcccgcagtagccccgcgcttcgcgttccggcggcgcccgcctccgcgacccgggcccggcgctcttccctctccctcgggcctcgggggctcgcccgcccctcgtgccgaattcgccacccaggcctcgctacttaggacgtaatggggtgccgcggacaaacgggaggggacg

SEQ ID NO: 323187 - DNA, 791 bp, Homo Sapiens
  misc_feature (46)..(46): n is a, c, g, or t
gataaaatttttgaatttatgttcaacatgtttcctgcagatttangtggaggaaaaatccacacataccccccatcccaatcccccagattttcttcaacatgccgcttctgttcttggaagagttaactgcctcgattctgcataagagtcccaaacactgagaactagggtgtcttccccttcctttccttccaaaaaggccagcagcctcaagcaagccaaagtcctttcctcttgaatgcgtagtcttgtgaactccactgtcttcacaaactcagcagctggtggaagctctctgaagaactgagacaggaggtggcactgctctgacaccatcctttgaaggtgacagagcatctcagggcttgggggacgccagccggactttgagaggagacagaagaggtgcttgcagaggtatttcacaaagatcagggtctcggcccaaaagttgacttctgctttttcaaacaggtagtcttcttccacctgatgcatgctctccacacaggccacgaggtcatcactctctcccaacagccatcccagcaggatgggcagtccaggggccaactggtcccactgctggagcagatcacacaggacggccagggccagggccagagcgatggaggcatccacctggcagaaggcaaactctgttgactggcaggtattttcttgtgacatggcagttgtcacggtttccgtggctgcatctctaacagcttgccctcgtgccgaattcgccacccagcctcgctaccttaaccgtgagagtactgccg

SEQ ID NO: 323188 - DNA, 1004 bp, Homo Sapiens
  misc_feature (258)..(258): n is a, c, g, or t
  misc_feature (327)..(327): n is a, c, g, or t
aagagccccattgcccctagaggttgcgatttttttgtgtttcaccgcaaaaaaacctgttgtgaggggtttccttgttggcttttggaagtatcccctgccctgagaacccccagaagttggctggtttttcttctcagactggaggagacttggttcgcttaggaaaagggagtcctccacccgcagctataaggcggaggccctttttcagctcagcctgccacgcagggtgtcacccggcggttccccctctgnccgtccggggccgtgtgtgccgacgtcagagtcagagcccgagcgggaccccacgggccctccacgctncactctgcccaggacaccctggcagatccttcacctaaagctagtgactttgcgaaagccatgcagccccgctctggccgggcccccggccatcccgtgctcccaaacagagtctccaaacacggtggactctgccgctgctgattccgcaccccagggtgctggctgaggaggttactgcagaaacaaggcaccacagagaggctggacacttgggtggtgggattcggggcacgctgggtaagtccaagggcggaaggaaggagggggaggaggagaaggctgagttttaaataacgtctcaggaggccggagccacgctagatgggctccggtttgagcttctctgctaggaagtcattcacaaaggcctccacgatggcgggggtgatctcctccacgtccatcacgtacttggcccgggctgacatgtccaggatggtgagcaaaggggcagcctcaggcaggttggtgtaatctcgcagggagtcagtcatgtcatcctccccggctacgaagaacagaaggggtgcctcctcctctttggctttgtacttggcaatgattttctcagctatcggctgaatcagctcgcttggccgcctcggactctccgtcatcccctcgtgccgatttcgccacccaggcctcgctacctataacccgaggttactgcc

SEQ ID NO: 323189 - DNA, 999 bp, Homo Sapiens
  misc_feature (966)..(966): n is a, c, g, or t
ttacggaagtcattgcagggcccttgcttagaaacaatgggcagtctctggagagcagcagcctggaggggtctcacgtgggcgtctatttctccgcacattggtgtccgccctgccgaagcctcacccgggtcctggtggaatcctaccggaagatcaaggaggcaggccagaacttcgagatcatcttcgttagtgcagacaggtcggaggagtccttcaaacagtacttcagtgagatgccctggctcgccgtcccctacacggatgaggcccggcggtcgcgcctcaaccggctgtacggaatccaaggcatccccacgctcatcatgctggacccgcagggcgaggtgatcacgcggcaggggcgggtggaggtgctgaacgacgaggactgccgggagttcccctggcaccccaagcccgtgctggagctctccgactccaacgccgcgcagcttaacgagggcccctgcctcgtcctttttgtagattctgaggatgacggagagtccgaggcggccaagcagctgattcagccgatagctgagaaaatcattgccaagtacaaagccaaagaggaggaggcaccccttctgttcttcgtagccggggaggatgacatgactgactccctgcgagattacaccaacctgcctgaggctgcccctttgctcaccatcctggacatgtcagcccgggccaagtacgtgatggacgtggaggagatcacccccgccatcgtggaggcctttgtgaatgacttcctagcagagaagctcaaaccggagcccatctagcgtggctccggcctcctgagacgttatttaaaactcagccttctcctcctcccccctcctttccttccgcccttggacttacccagcgtgcccccgaatcccaacaccccaagtgtccaggcctctctgttggtgccttggtttctgcagtaaactcctcagccangcacccctggggttgtgggaatcagccagcgga

SEQ ID NO: 323190 - DNA, 927 bp, Homo Sapiens
  misc_feature (124)..(124): n is a, c, g, or t
  misc_feature (129)..(129): n is a, c, g, or t
ggctggtgaggagttttactgcggaaccaaggcccccccagagagggctgggacactttggtggtggggattcggggcacgcctgggtaagtccaaggccggaaggaaggagggggaggagganaaagnctgagttttaaataacgtctcaggagggccggagccacgctagatgggctcccggtttgagcttctctgctaggaagtcattcacaaaggcttccacgatggcgggggtgatctcctccacgtccatcacgtacttggcccgggctgacatgtccaggatggtgagcaaaggggcagcctcaggcaggttggtgtaatctcgcagggagtcagtcatgtcatcctccccggctacgaagaacagaaggggtgcctcctcctctttggctttgtacttggcaatgattttctcagctatcggctgaatcagctgcttggccgcctcggactctccgtcatcctcagaatctacaaaaaggacgaggcaggggccctcgttaagctgcgcggcgttggagtcggagagctccagcacgggcttggggtgccaggggaactcccggcagtcctcgtcgttcagcacctccacccgcccctgccgcgtgatcacctcgccctgcgggtccagcatgatgagcgtggggatgccttggattccgtacagccggttgaggcgcgaccgccgggcctcatccgtgtaggggacggcgagccagggcatctcactgaagtactgtttgaaggactcctccgacctgtctgcactaacgaagatgatctcgaagttctggcctgcctccttgatcttccggtaggattccaccaggacccgggtgaggcttcggcagggcggacaccaatgtgcggagaaatagacgcccacgtgagacccccctcgtgccgaattcgccacccagc

SEQ ID NO: 323191 - DNA, 1408 bp, Homo Sapiens
cagagcgtttgggttacacaaacccactttattcagcattgagccagcccacacgctgggcaggtcaaactcacagacatcgcaccaagggccggggactcagaagggctgaaaggcttcatctggaaatgggcaccgctcacaagcccggctatccccaaatctcaacaactgtctgcatctatgtccccgactttgcaatcctgtccccagtgctgagtttctgtcgactaatttatctacacacaaggatgctgcaggcaactgagctactgctacaagctttgcaaaattcaactactaaaggaaatgggaggagggaaagagctagagataacagcaagatgagacaccatggcagggcctggagatgctaaatggggttagccacctgccagtcccctcaccctatggaatacagatgataagaggcttccttctgcggaggcaggtggagcacagggagggctcctgggaggcacaggagctggggtgggggccaggaaggggggcggtggacagagcgacttggataaggctgggccgggcccacgcccacctcaagggggggccgcctcctcaggaggcatcaaggtgcaatccagtcttcctttctctccctgaagacctgagttccagccttcacagagcgtcatgcgcattcttctttctggatgctaaccccaaatccgacactcaatggtgcacctcaggtacctgccaaggatctgtgggcccacatggaaggtgcagggtctgggtccctggatgacgggtgaggggcagatgggtgaccagggaagggcatgacccagagctgccgggactcatggaggatgggctgtggctaggacttcaggaagggacgggcacaggtgggaagggtcctcaggtccagcctctaccgggaggtgtttgcagcccccaaaacacgcctcggggtgaaggataaatggacattgttgaaacacgcaactatgtagatggacccaaggccaggcgcctgccacgcttccctggcagccacacgctgacacttcccatggagatgaggatccatcctcctgcctccagctctgggactgccacgggttggcgccatcactgcagcagcatgctgaggcccaggttgcgatgcttcttctccagctccgagaccgcctgcagcagtgacctgaaccgctcagtggggtcagccagctcgtcctcagggagcccctcctccttctcagcctcctgcaggaaatgctcctcctcctccacaaagaaggcccgcagcttcttgtagtcggtcagtgccttcttcctacggtccatcacgtgtcccttccacactgcagctgctgactctgcctggccatgcaggtcccgggcgtcattccctcgtgccgaattcgccacccaggcc

SEQ ID NO: 323192 - DNA, 979 bp, Homo Sapiens
ttggggtcagggttttctaaggagggaacccccccgaaggaagccggaccccaaaccttttcaaagggtccaacaggttccatgtggattaatgggctacccccccagggccccagcagatattgaacggtgtcggtcatcaccagaaacggctgggtggcagactttggtttagagaactgggacagccactggtttagagaatggaatgtaatagatgcccatcttgggggtttcattggccgtcagaagcatgcctgagttggggtagagacaaacatcattaaggtcatgctctggctccaaggaagtaaatatttttccggagttcttattccacatcttgacaattcgagagtcagcagacaaaatcagatctaatgaatcctggaaatgaacggacttaatgggcagcccatactggtgatctttaactagcaatggcttatcagatcgaaggtcatataataaaacctgccctgtggttgttccaactgccatggtcaaggcaccattaaatttcaaagcagagattgttggtaaactgtttatctctgaatctgctgtgacactgtttaaggcgcagtctaacaggccaactctgtttcgagttcttgggtcccagcactccactctaccctctatggttcctgtggcaaacaagccatgcactgaatttatgtcacaaacattattctccgcagcatcagtttgtagaggattcaggtatcgtccttgttctaagtttaacctataaacttcagaacttgcaccaacaaagtacaagtcacaggatggatagtggtaagagaaatctctcccaaactttggtattctggttttgtagtaaaaacctgattgcgaatgaaattcaatgtatctatcattatgtaagaagacaatctgtagttccagctactcagcctcgtgccgaattcgccacccaggcctcgctaccttaaaccgtagggtactgccg

SEQ ID NO: 323193 - DNA, 740 bp, Homo Sapiens
cttcaggggtactgccaggtagcaggctttattgggaagggacaaagcctcaggagctgggtgccccagaggctgctgggtcttgagccacagctgcagccaatgcagcagctcgcgcctccttcttccgtttctgtttttcctccttgaggcgcttgcgctccttcttctctaggtcctggagcagctcctggaagcgggcactccttgggtccacctggtagcccaggagctcctgggcctcagcctgcagtcgggccctcctctccttgtcagcctgggccttctcccagttctcccgctgctgctgctgccagttcacaatcatctgtggcatcttggccatgcactctgcgatgtgctgctccctctcccgacgcttctgctcttcggccagctgcttcacccgcagcgactcctgcatggtcgccaggctcgggtaccattcgcgttcttcggcctccagctcccgcagctgctccggcgacggccataacgaaccggggaccaccccggaggcggcgccgtaacgcgcgaactgcttagccgcgtagcgcggtcccagctgccaccgcggggtcaggaggtcctcggggtctggccaccggggtcccggcctgcggcgcgggggcggccgcgcccggtagccacgggaacccggggccagggtcgccgccacacctagtaggctgcgtgcctgtcgcacggacgccgccatcttgcctcgtgccgaattcccc

SEQ ID NO: 323194 - DNA, 1061 bp, Homo Sapiens
  misc_feature (184)..(184): n is a, c, g, or t
caaggggtaaaatggggggccctttaacagaggcccctggtttctaaaggcgttccaagagaaaccctcaaaacccaagtcccttgggcagcttcctggtcaacctgaccctaacccttttgccccaaccctgggtggctgctgagggcaatgagtgagctgggcccacgggtcagcaggcagncagggagggggctttcaggaggctcatctggttggtccgagcccgagccatcacccccagcttcttcctcaggtttactctacagggacctttgcaattctgcagcggccaccatggacattctgcagaaaccaggcccactggagtctgcagcatggcgccaaaggcaggcccagcacatcccatgagctacggagtgcgggcagctctgagccttcagccagcacagggacatcagacccgttccccctgctcccctatgcagggcgccacccacaaggtctaggacacgcaagagactgacttcccatggtccacatgtggattccgtagtctggctgctggcctcccaagggacccacaatggtccacgtgtggattccgtggcctggctgccggcctcccagggacccacaatggtccacgtgtggattctgtggcctggctgccggcctcccagggacccaaccctcctgagccagagggtccctctggtccagtcagtccttcctccagggacctaacgcatctggctctgcctgaatcatcgatgacggggcaaaggcgagtggggcagatgggagctctggcaaacacaggaggaggggtcgtgggagagcccccgtccccagtagctgggtgctcacacatgcacaatctactctctgactgtggctcattgggctggtcctatcatctgtggttctaaaggtccaaaaagggctatggaaaggacaggtgtgctggaaggaatgtggagaacgacctcaagatgggaggggggagactggccccatcaatccagctcagagcccgggaaaagtgcaggaacacagaccctcgtgccgaattctgcacccagcctcgctacctttaa

SEQ ID NO: 323195 - DNA, 994 bp, Homo Sapiens
  misc_feature (54)..(55): n is a, c, g, or t
  misc_feature (83)..(83): n is a, c, g, or t
  misc_feature (86)..(87): n is a, c, g, or t
  misc_feature (94)..(94): n is a, c, g, or t
  misc_feature (133)..(141): n is a, c, g, or t
  misc_feature (162)..(162): n is a, c, g, or t
  misc_feature (185)..(185): n is a, c, g, or t
  misc_feature (187)..(187): n is a, c, g, or t
  misc_feature (189)..(189): n is a, c, g, or t
  misc_feature (198)..(198): n is a, c, g, or t
  misc_feature (220)..(220): n is a, c, g, or t
  misc_feature (236)..(236): n is a, c, g, or t
  misc_feature (292)..(292): n is a, c, g, or t
ggggtacgcgggggcctcgaatgtcgagaaaggaacaggggcgggaaaaggccnncccggagcaaaggaggagtccccaaggnccnnggggggnggggaaggaaggggccggccccacggaggaaacgggtannnnnnnnnagcctcacgggggcgggtccncgggccccgggaaaggaggcccngngngggggggtngaccggggaaggagggggccancccccccaggaccacnctgggcaggtctgcagcagggggccaaagcctggggggtcccaggtctttggctcntatggggcccaagcccagggagaggctgtggagctggacagccgggggtgggggattgcagcatcaggctggctgccgtggcatgagatgaaaggccaggagtggggctgttggcagactggcagacggacaggcggggccgggtggaggcgtggggtgggggaggggagataaccatctgctagagccgccaggtgtagacatggtggagtgtgggggatgcgggtggagggttagcccttgccatcaggggaaagagcctgaagctggaagggctccctgtgaggtcatcttgtccagcctgatgcctttgggccctcggcccctaaccaagcaggccctgcttctggcacttggtgctcctccctggccccagcccccagcctgtcctccgcactgcacccatcccagagcagtgccccagaagtccaacccagagtcctctccgcacttaaaggcacagcgctccatagagagggtccgccaagcccggcctcctcttagtcactaactgctggggtagcccaggactgggttggtccctatcacctttcgtctccttgattccaaacctctcttactgtagttgtatgattatttgttggtgccttgcccctagccccagacttggagagaaggttctagcctcgtgccgaattcgccacccaggcctcgctacctatacaccggggagtactgccg

SEQ ID NO: 323196 - DNA, 885 bp, Homo Sapiens
  misc_feature (129)..(138): n is a, c, g, or t
  misc_feature (144)..(144): n is a, c, g, or t
  misc_feature (273)..(273): n is a, c, g, or t
cctgccagggtggaaggctttcccatttttaagggtgggggtcaggaagggggctggcactgaagggctggtgctttcccccctggttttgggccttttcagagaagggggtccaccctggttacacannnnnnnnnngggttntgttccctttgtacagcttgctcttccttccttggtctgcaaatgggagggagatgggagccagcagcaaggggcctctgaggctgccagagtgagaggcgacacatgggtatggccccaccatcaggncccaggcatctatgttacctcctcctcccagaactgtaaagtgtttggcaaaggtcaactgctcccgggatatggagtcacatacacaaggcaaggccttctgctgaggccaactgcaggtccaaaggggcctgcccccttcccagtccagagtccacactggggacatgcccaggatgaccagcatctgagcaggacaagcaaagaccgaggtcttgctggaggagccagtgggaaccccttgatccagtcttctggtttcagacagggagtggaggctgagagaagggaatgaatttgtctgacatctcactgccatttagtgacagagccagggcccactgctcctaggttgatgctgcttctctgataggtgtctaaggagctggcctaggcattctcaggcatgagaccttcctgcttagaaagggatgggatggggcaggcagccttggtggctggagaagctccgcagaaggcagccagcccagtctagccccactctcagccccagaacccagcatccagcctggggcctggaaggaggatcttcccgaagaggccaagtgcaggtccatgcctcgtgccgaattcgccacccaggcctcgcta

SEQ ID NO: 323197 - DNA, 754 bp, Homo Sapiens
atgctggtcaaggcagagtttactgaactgttagtttcctcctgcacacaccgggcatgacaccttcaagtctgtccagcagtgggtccagaaagtaccctgtgtgccttggacgcagaggctacagttctcactgtgtggcatgggagccttcacagtgccctcgggagctgcccctggtctttgtctgcaaaggtgactgggaggatagaaaaagcagcgggctggcattgtttcgggggtggggtggtgggcagtgtgcctgggcagtcgcagggaggctgacttggttctgggctgcaagatctgtgcataggaggcccctgggtttcttccaggctcttcactgaaatgcaaagagtctgaagaggaggcagtgggcatagtgcccctgaatctggttaggtggagtttactgcatttaaaggcccatggtgagtggtgagttctgggatttgggagattcccagaggcctgacaggcctgtcccaccctcctggacttcactacagggagctgaagtcagggcccaggcaggggagcaggccacccaggtagggaacaaatgcctgcccatgcagggcagagggcagaaggcagggctgtcagggccttggttggtcctgggcactggggcaggtggcaggggaggccggcgctggcaggagaggcaggggtggaggaggtggggctctcctgggcgggtggaggagcaggccgcgggtggcaggggaggcagcgggtggaggcccag

SEQ ID NO: 323198 - DNA, 1011 bp, Homo Sapiens
ttctactttcgttggccatggtttccgtatccttagaagagaggcgattgggaagcctcccgccagcccctggaggggagggaaagcacccccatggcaggttttctgtctgtcctaagagctttctgcatttactgggtgagagagagggccagctgtgcagcgttcggcctccaattccattttaattttgtttctttgtttgtctttcctcaaatatacagtgcatccccttggctcagtgcatgtcaccaaaaattctccagggatttcatagtctctgacagtcggctgcagctgggggtgcccatcttctgtgctctgtggtacatatctgtgtcgccaaagtagcgtgcccggtacagcaagccttccttctgctgcttctccttccagcagttgttccggaggttggcgatataatcatcttccacattccgctcgactgttttgaggctggagcctgtgtactcttcggagaaagtgtctcccacatagtagacgacacccaggtggtcagtgactcgcctgtggatgtggcccacggacggtcttggactcagactgtagggtggactggagaccatgagctggctgagagctgacacgagaatcaggatgaggataggcatcagctgcacaaacacccctagcccgccatcaccctggttgtccctgcggtcctgcctttgctggtaggtatagcgcatgcggccgttgctgtagacgtggacgttactagaagggaagccgccgccaaagaacatgttgaagaggtcttcaggggagatgtcggcctcaaagccacggtggaaatccccatgcccatggccgtgccgggccgcctggctcttgtcatcgccgaactggtcatactgcttcctcttctccgggttgctgagtaccgcatatgctgtgccaatggctttgaaggcttcagtggcaccaggtgcgtgcctcgtgccgaattcgccacccagcctcgctacctatacccggggagtactgccg

SEQ ID NO: 323199 - DNA, 723 bp, Homo Sapiens
  misc_feature (704)..(704): n is a, c, g, or t
gggacaactgttcagggtcttgacagaggacctatttgtcctgcacatagtgcccgagatgtgggctcaggggtgacaagctgttttctggaggtggaaggctgatagctcaggggctatagggaccattgattcaggggtcttgacagaggacctatttgtcctgcccctagtggcccgagatgtgggctcaggggtgacaggttggtctgtggagttggaaggctggagctcaggggctgcgggcacaactgtttcaggggtcttgacagaggaccgattttttcttcccctagtggtccgagatgtgggctcagaggtgacaggctggtctgtggagtcggaagcctgtagctcaggggctgtggggacaactgtttcaggagtcttgacagaggatctatctgttcttcccctagtagcctgagacgtaggctcaggggtaacaggctggtctgtggaggtggaaggctggagctcaggggctgtggggacaactgtttcaggggtcttcacggaggacctatttgtcctgcccctggtggcctgaagatgtgggctccaggagtgacaggttggtcttgtggaagtggaaggctcgagcttatggggctgtggggacaagtgtttcaggggtccttgccagaggatctattttttcttcccctacctcgtgccgaattcgccacccagcctcgctaccnaacacccaagagtactgcc

SEQ ID NO: 323200 - DNA, 874 bp, Homo Sapiens
  misc_feature (117)..(117): n is a, c, g, or t
  misc_feature (157)..(157): n is a, c, g, or t
ggtggggagagggtggcccctttcccggggaatggaagccccaaagggggttcccccctcccggggaggggagcccttaaggagccagccttgccagtttcctaaattcccttcccntggggttcccaccagaacccaggaaggcggagaggaagantttcagatcggccactgcaatttcttcccagtgtgctatgcccacatctggtgctgctactgctccctgttcatccttgctccccaccccactccccactcctttttctttccttccccctctcacccctgccttgctctagcagggaaggttcagggctggggagccagtatgctaccttttatgtcaaggccaagatgctctaccatacaacgcccagttcctaaagcaagcagagccattcagcccactggggtcataaggagggttggctatattaactacctattaaacttaagtaatttaggagccatcttcagggctggcaatgcagaccagaggtcgccagggaggctctggccacttgttttaattgtgggagacacctttcccgcatatgcaatctctctctgtgatttatcacttccccgggtgtttttttaactgttctacttcccttcactggctctgcaactccaaggggagcctgcacaaattgaagatgacattggacttttatgtcttcctgatccaagagaagctgctggcgcttgagataaatgtcaaggctcctcttcttcctgttcctccatcagtggaaaccacagctggaccttgacggttcaaaccatttactaatgaaataagctttctaagctcctcgtgccgaattcgccacccaggcctcgctaccttatacccgttagagtactgccg

SEQ ID NO: 323201 - DNA, 1060 bp, Homo Sapiens
gctacaacatctcgtggtgtaactcatcccagctctctcgccatattccctctctgtagacccagagaccatatccataacccaaagggacacagggagggcagacagaccttctttaggagagaagtttagaaactgatccacttcatgaggctccagctttaattttaggaataaatggtctggcaccgagggaatcaaccccccagtgttcatttccagaggaggttcctcctttttccaacggggtgggagatggctgtgatggtcagagtgacagacggaacgagtcctgggggtggttcgtctgtaattggctctgtcttgatggatgttgaagggaagtctgtagacaggtaccatttctcactttccacctcatcgtcattgaagctgtcactggtaatgtgggtgaagggcgactgggcccgaggctcctcgcacagggagtagctgtgctcagcctggatgagaggcgccggggacgtcggggaaggttccacctccattgacacactcttctctgagaggaaaggatcattcaggagctgacccaagacgttctgggaaaactcatccagaagttctgagaagtgcgtgtggtacatgagggcctcgccgtccccgggctctgacagctcgctcagcttgcggtcccactgcagcacgccctgctccccgctctccagcacctccatggcggtgcgggccgcgctgggccgaggatgctaagcgcaggaggggacgcgcagagctgcctcggaccggcaaggttcctctctctccgcgtgtgcttgcgtgtgtgcgcgcgcgtgtctgtagttttgcacttggaaagcaaacgtctgctcctctgccggagagaggatggccaagcgctcccgtccggtgtcctcggagatccgagaatccccagggacacgagccggaccaaaggctgccggggctaaagcgggatgtgcatccaaaatgaaggcagaagacccgctctcatcccagcctcgtgccgaattcgccacccaggcctcgcttccttaagcccgttgtagtactgccgtcc

SEQ ID NO: 323202 - DNA, 1022 bp, Homo Sapiens
ttgcccctgattttcaagcccaaggatctctccccttcatgggggagggttggaggccggttccagttttcccagggcccacgcccagcaacctttgggttcggtgggacaggccttttcggaaccagccacatccagggtggctgctgcagcagaggctggagtggctgctataccactgttcacctgcccatccagcatcccatttaagaggtacaggagcttcccaagtgcagtgagggcctcctcccgggccagggactcgtgtggcctggcccaggcttctgtctcctccctcagggctgacgcttcctgttggatgacgtcagggggcagaaccaatgtgatatccggcgttgtcagggcaacagcggtgcggacagagggtgcggggcagaggcacggctggtccaggagggagctcggtgcagatgcagctgccttacacactggacccccaggcagcagaggtggaggcctcccctctggggagtggctgctggggctcatcggcacagcggtcacatcttgctgctggaggctcttccagtgcggggcctgggcagcacgggcactctggatggactctagggcactctgacatggcgccattggccctgacaggggtggggccgggtcacccagcagcgtctgtactgtcatgcacactgactccgccagtgactccaggtggtagccgccctccagcacggcacagacccggccgccggccagcacctgcagcagctgtgtgaggtgggcgaagcactctggcgtggcctgcatttgcccctcagggtccccgatggctgagtcaaatcctgccgagaccagcaccagctcagggtcaaactcaaaggccagtgggagcagcaggtgcaggaaggcagccacgtagtcagcgtttcccatcccaacctggttccagggcaggttgacagtgaagccgaggccctgtcccctcgtgccgaattcgccacccaggcctcgctaccttaacccgtagtagttactgccgttcc

SEQ ID NO: 323203 - DNA, 1131 bp, Homo Sapiens
gtttctcggggggaggtgcccccgggtttcacccaaggattgttttgcccccagggggggccccaggggctaacaagggcaaggcccttttgtgggggcttccccgtggggggaaccggggccctttttcccggaaagccaagcccccccattccccagggggtggggctgtgcgtgccagccaagggaggggctgggaaggtgggtttggttattagcccacgtgtttccgccgtggcccgattcccgaggcatgccccattttaaagagggtatcagggaggcttcccccaaagtgccagttggaggggccttccctcccccggggccaggggaattcggtgtgggccttgggccccagggctttcttgtcttccttccttccaggggctggccgttttcctgttgggatgaggttcaggggggcaggagccaatgtgatatccgggcgttgtcagggcaacagcggtgcggaccagaggggtgcggggcagaggcacggctggtccaggagggagctcggtgcagatgcagctgccttacacactggacccccaggcagcagaggtggaggcctcccctctggggagtggctgctggggctcatcggcacagcggtcacatcttgctgctggaggctcttccagtgcggggcctgggcagcacgggcactctggatggactctagggcactctgacatggcgccattggccctgacaggggtggggccgggtcacccagcagcgtctgtactgtcatgcacactgactccgccagtgactccaggtggtagccgccctccagcacggcacagacccggccgccggccagcacctgcagcagctgtgtgaggtgggcgaagcactctggcgtggcctgcatttgcccctcagggtccccgatggctgagtcaaatcctgccgagaccagcaccagctcagggtcaaactcaaaggccagtgggagcagcaggtgcaggaaggcagccacgtagtcagcgtttcccatcccaacctggttccagggcaggttgacagtgaagccgaggccctgtcccctcgtgccgaatcgccacccaggccgcgtgctaaggttagttgagtccccccccaaagaaaaaaaacataaaa

SEQ ID NO: 323204 - DNA, 1113 bp, Homo Sapiens
  misc_feature (11)..(11): n is a, c, g, or t
  misc_feature (119)..(119): n is a, c, g, or t
ccagtgcggcnagcccctttatccaggcggctgaggtcgaggcacggggagctggagcccgtctgcaccagcagcagcctctcttcctggagcgcagagtgcacgacagggtccatgcncgcaatacgctctgccacgatgagggactcgctgtgggtcacgtcgttcagggcggggcctgagttgcccgccagggatgacctctgtccctttagggagtagcttcctgccaaaggggaagcctcccaaaatgatgtctattccactgttatctgcgaaaattaagggcacatttatgagggggcccctttaatctctgaagccactcgctgtaggaatcccacgagccagggtctttcttgtaacttcctcttgcttcttcaaacccaaaagtaggggtcggattcaaggacagcagacacggctttggccccccagtcgaagacattccccgccaggaggcctttcaccagcgccagctgccgttcctcccagcccagcgcgtccagggagcgcacgaccccggggaagcacctcagcgccacgccattctcccgctgcttcactttggagtagggatccgggaagttgaactcgttcagacagtgctccctggtgtccagcaggctgcgcacggtcagggtcccataggcgaagggctgctgcctcagggtctgaagcttgttccagtacttctgccggaacttctccgccctctcggctgcatccacagagtctggctggctcgccactgcgcgcttcactaccccgtccagggcctcctcaaagcaggtgagccagtattttcgggccagagcgtcatcggtgaggtccaccgtgtcgggcacgtaggagggcgggtccaggaggagcggcaggtcaaccagtggcctctccagccggtccatttccagcaagtcaaaagtgccactccgcgcccgctgcgccgggccgagctcgggtgatgcactcatcagcccggagctgcctgcatagttctctccccagctgtactggttaggattgtcctgctcagctcctttcaggaacgctcccctcgtgccgaattcgccacccagcctcgctaccttaaaaccgtgggagttactgccg

SEQ ID NO: 323205 - DNA, 994 bp, Homo Sapiens
ttagatctttccttccgcaggggtaccggaaaaaggctttccccgttttcccctttgtttttccagggggtggggcagaaccagggttttcattcttgccccccgagggcttcccacttccggtgtgcgccattgagcggctgtaagccttcaaggccgtttcgcggttaggagtttttacgggggtggttccagtccccttccaaaaaaagtccggtctcggtctgagtacagaaggtgtgggggcgtcctgtcccgcaccagggtcggcgtccaggttgcggtgccgggtgtatccatctgtgagcagctcataatgcacagggagtggcgagggctggtactgctgggggtaccgagtctcctctgctttggcaaaatccacgcggagcctgcggtctggtccacccaagggaaaacccctcattttagcacaggcggcctgggctgcgtccaagctctcgtactgaatataggcaaagctatctcctttgacgtgatcaatggtccgaatgctcccaaagcggtcaaactctcgggccagagccgccagtgacgtgttaggtcccaggccacccacccagagacgagtggtggggttggccttgccatagcctatcttaatggggttgcgaccaatcactcggcccgacatggccaccttagccctatgggccatgtccaggttctggaacttgaggaaggcataggcaccgccctggccacgggcaggcctcttgatgaccacctcctcgatgatgccatatttctcgaaggcccttcgcagctccacctcagatacgctgtggtccaggttaccaatgaagaggttgcgcgtggcccgctggtcatcctcgggcatcaggtcctcctcacacacagctgggtagccataggggcgcccacggtcgtcgtacagcccgtagtagtccagggcctcgtgccgaattcgccacccaggcctcgctaccttagcaccgtgagagtactgccg

SEQ ID NO: 323206 - DNA, 1038 bp, Homo Sapiens
tttgaatgtcgcgtttctagtatgttgtgcgggtgagcctggttcgggcatggttctgtgccttggttgtcccttcgccactttggccgccgcgttcccgggctttgcctgttgtgtgccaccttgtcttgcctggcttcccacggcctgttttggtgtccttgggtgcctctttttgctaggggcggcccttccttccgggggccacacctcccttacattcaggctgttgggcccacttgagatgccactgcaggcattttctgacactcagggcggaatgacacttagaatgtcctttggtgattctggcgcttgagattctgttgagtcagggagtgtggccgaggggagaccctagagtaagacctggggtagcatccctttttttctgctctctagggggtgacgttgaggctgctcttgctaaaatgctccctttcttttgcttgtctgtgaagtcccacagctgtaagggagaaatgagggctgcacgaggctgttcccctcaaagtctggggttcccttgcaggcagggttctgagggtccccggtgccagaggcctgggttccactcccgctgggtcacaggcacgttgtgaggctgaggctgtggtcccgttccgcatggcacaggctcacacaggggagctgaggacccccacacggaggggactgcgttcccaggaagccccccgttcccccggcgctcagcctcggaggcattcagccttggaggtttgatgggggggacagggaacggggtcctctctctgtttacccgcgcctcctgggtcactcactgcaagctgggacttagcgcagatagcacttgattgcgccactccctgctcagagaaggccctgtaatccggaggtttcctatttgttttttagttttatgggcatttagtaaaatggctatgattacggcctgtgtgtttagctgtagaggcaaattacattgatagccctttgccccttctctgctgctccctctgctccctcgtgccgaattcgccacccagcctcgctacc

SEQ ID NO: 323207 - DNA, 1005 bp, Homo Sapiens
  misc_feature (417)..(417): n is a, c, g, or t
tgtggtgaagaaagtaggggtgatatgatgtggatttacaaggatggaaaaaagtgagagtatagagtgagtaatggaggatgtgatggtgagtggtaagaatgagttgttgtgtgggatttaattaagtattggagtgtggtagaacgaagggagagaatgagtgagagacgagaaatggaagttagagaaacacgacgacatgaacagaggagaaaggtagagagtatagtagtgtggtgatcacatgaggagagacagaggtctgcagtgtgagagacgtggaagggagaggactatcgaaggggtaatgaatgcaaggtagaaagtgacggatcgagtgaatgtggagtaagccgcactcgccccgcctccagcccacgcaggcctgccctgtcctcgctgggagcggagtgncgatgtctggggatgatggggaaagactcccggcgtggcaggacatcacgaacgtcacgttcttggggacagaaaaccagtcacggcggcagcaacgatgtcctgtgtatactgtgtagacatttggcggagagacgggcctctgccccgcatgtggggatgcagggcttgggtccagccggcacttgctcgtaacaaggcgtgtgtctgagcggacgtcctgtgagggatggtggttggcgggacgtctgtccaactggccgtaaggcagacaggctctgcaatcctcagctgcccgtcaggcctgccccgggcatagcatgcaggagggccagaccctgaggcatcccctggccgctgatcccacctccaccagccgcccctaacactatggaaagtcaatgttttgccagaaaatcaaagtcagaagccacctaggtgcgctcagaaaagattttcttcaaatattgacaatagatcactctggaaattcatgtcaatggtagctgccatggcttccccctcgtgccgaattcgccacccagcctcgctaccttaaccccctgtggtgaggttaaatctaggaca

SEQ ID NO: 323208 - DNA, 1003 bp, Homo Sapiens
cccatgttttcccaatggctgagaaacagactcaatcaatttatcagtcccatgatctgtcttcacctcagaactaaagtggaagaaataagtctgttgtatgctctggggggaggtacctcccccaggaaactatcaaccccttattagcacgtatctgtttgtaaatgtctgtttgctgacgaattcgatattccaagtcagaaacatgagcctgaagccagttccagcggctgacaatagctgcccggtctgcagcccatttccattctgacctgcgtctcaggggtacatgacgctgctcgggatcagctctggtcagttcttcctcttcaatatcagactcccctcctgaactactgtcagtgacatctgaatcaaatgcctgttcactgcacctcaagttggctatgccactagctgtaaatctctccaattcttctgaaattgaattgcttttcagaaagttgctaagtccctctgaagtggtggtctcactggcagcttttctcaaggcagcttcagcctttcgagtcagcatcaactggctccgtggtctcaaggattccaagtttggcagtttgctcaaagtcttctccaaaaatccacccagctgatgttgtatatgcctctcaacctgcttggcttgcacaacctgtaagcgcttttgtaatctgcgggcacggctctcaatgtcagcctgtcgccgcagtaaagctgttatccttgtgtcagaatctaaagcactgaaaagaatggaagacaggggagactttttaccctccaatttgacaccccccaagttagagctggagtctgtaccaggtgataatctactgcttccttgaagtgccggctgttccatggaattgacagaggatttgtttgcagtgctattattgctatacaaagttgtgtgttctacatcaaggcttctcctcgtgccgaattcgccacccaggcctcgctaccgttacccctggaggggaggttaaacttgggc

SEQ ID NO: 323209 - DNA, 1392 bp, Homo Sapiens
ccaatgtgagtaggtaagcagattattttgcactggcttaacatttttagttacttgttccttaaattagatcatgagccatatggaaaaaccaggcgggcttaattgagcctgttggctgctcaagactggtcaggtggaactcacttcaagggtgacaggggctcagtaactggctggtacaaatggaactaatggcatttgcactgacatgaagtccccaactgcagccccaggtctatagagtttcaacaactttattggccaaatgcttctcctatgtttacaacttagtgtgagcctgctcactggcttctccttctaagcccctaagcgggcagcaaactttagtacaggcctggagatggggtaggggttaatgagtgagttggaaacctgctgatgctccacaattggacagcaggacagcaaatcttctacttcttattgccgaaaactgcagaaagacacgaacaggatggagacaggaccgagagtgcatctctgccactggtcccagtttccagtttctggtgcatccaacagagtataccctttgtattcttgcttcagggattgggtgatactatgtcagcctacgcattttgcagaagtacatggggccaaaattggccatgaggtttggtattaccagctccccaaccttgacaggatgagaagaaacaaaatgtgtccatgaaaacccttcggaagtgagtcagatcttccacctgtacctggatgctgtattgattggccaggagctcaatggcaccttgcaccacatactcgttctgtaagtgtgagagtgagcaggtagaatagacaacatggcctcctggtttggtggcaaggagtccagccgcaagaagctgcacttgcagcacaggcaatatctgtcgctccttcttccttgaccgcttaaagatgttgttctcctcctcatgaagggagtggcggtctgtggtacagggcacatccaccagcacccggtcataggtgtccccctccagttctccccatttcctgccatcccatgaggtaactcgaacttgatttccatccctgatctcttcaggcacatagctgtgaaggatcttctgtagtctggctattcgggacggggagagatcattggcagcaagattgcggcaacagccagtctgaagcaacgctagtgtctttcccccaggagctgcacataggtcaagcacgatgtccccaggctgcaggccgagggccagaacaggcagcaaggaggcagcatccatcaggtagtactccatgacacccaggctgccaggtctggcaggagggaagcgactgatatcccctctgtcaaaagtgaagcatcgcctcgtgccgaattcgccacccaggcctcgctacctt

SEQ ID NO: 323210 - DNA, 974 bp, Homo Sapiens
  misc_feature (242)..(242): n is a, c, g, or t
  misc_feature (254)..(254): n is a, c, g, or t
  misc_feature (257)..(257): n is a, c, g, or t
  misc_feature (260)..(260): n is a, c, g, or t
  misc_feature (264)..(264): n is a, c, g, or t
  misc_feature (268)..(268): n is a, c, g, or t
  misc_feature (290)..(290): n is a, c, g, or t
  misc_feature (296)..(296): n is a, c, g, or t
gtgggcttgcttttttccgggggtttcgccacttaggcttcgggagggggctatagagacatctgttgggggtacagcgttaatgaggccaagtggtcctgctcttttgaggggtccaaagtttttaggaagtcttcagggttgggagggcgctagttttccccaatagacccctagggtcccacgttggttttgggagaaaggtgcggtatcagaatgagcttcaaggctcaattggtggntggggcagcctntgntgntgcngcantccacccaacaggaggcgggcntgctcntgcaggatgcggccgcgcaccaccttggccagctcctctgcgtgtccgcactcaatggtcgggcacgtgcaacccaggagcagggcagcccccagaggcacctgctctgagccacggcactgccgcagcagctctgagtcccgccagcccggccggcccagcagacccctgacttcccggacattcttctcagtcacctccacgtggatgacgatggggtagatctcgttctgcaccagctcccgcacaccccgagcacccagctccagcaggcagtgcttcttcccaacagactcctggatggcccggatcctgctgcctagcccaggggtggcaggctgagccttgggggctccaggcgctgaggatgggcacagttcctccccagagaggctttccgctgggcacacttggaagtccagccgggagctgggcaggtctagcaggttacggatgagccggggcgccaggcactcaggcaacagcaccacgggccgcagggcagacaccagtagcggccgcaccaaactgtagggtctgaggctccgctccggctctgcacagggctccagcagcagctgatccggggagtcccctgcaggcgcccccacgggcttgggcctcaccagccgcagctggtcccctcgtgccgaattcgccacccaggcctcgctacct

SEQ ID NO: 323211 - DNA, 953 bp, Homo Sapiens
gcaaaccagattatgttatgaaaatgatgaatataccacacttacaaacagttattcaaaggcattgtacacgtgtcaatgatattgtggagaggcagccccctcccactggctatgggctctgcacaacgcttgcccgcaaccccctgtgctccccttggtacaacggagcccagaacacctgcgagggagagccatgccaccgtggccctccacagccttcaagcttttgtttgcttgtgggagtcccttaggtcaagtagcaccttgccatagcagcatcgtgagcacgcactggtgtctggaggtggctggtgtacttgacccacttatttagaggagacctataagcattcaataaagaacactttgccctgtttgatgccatccacagaaatacttctgttgtggaagaaacactcttccattcagatatctgtaaaagcaaacgcacgcctccgctgcaacagacagaagagaacgtggagcaggcgcgcaactgtctttggtggagaaggatggggtggtcacgccatttccggcccgctgctctgcttcttaccgctctgtggcggggtgaggagcccactggggagaggagaagccctattttgttcagacaaccatggctttctttgctcgggctttgtccagcaaatccaagctgtctctgtgggtctgtatgttgtgtgcatcttcatcaggcgacgcccctgaagtgcttcaggttttgagctccccgtctcccttataaccatggcaaatggaaccatccacttgacacagttctctatgtcgcaccactgataccctgaaaccttttgcatcaattcagatgacgagaaatgatacaaggccgaagcagcaagtataccataaggaaattcaaggcagtcaacatccaggacacagagatccaaccctcgtgccgaattcgccacccaggcctcgct

SEQ ID NO: 323212 - DNA, 1002 bp, Homo Sapiens
tctgtgtgtttacaaacaactgcttgggtgttttggtacgcttgttggcgtaaacagagtctaccgaaagggcattgtaccaccctgccaaagggggttaatgtggaggaggggcaaggcccccctgtccacgggggggttaggggcttttgcacaacggttttcccctcaagcgcccttgtcccccgtggggtacaacgggggccccggaaccccctggcgaggagaagccacggccccggtgggccctcccacaggtttcaagcttttgttgttgtgggagtcccttaggtcaagtagcaccttccatagcagcatcgggagcacgcactggtgtctggaggtggctggtgtacttgacccacttatttaaaaaaaacctataagcattcaataaaaaacactttgccctgtttgatgccatccacagaaatacttctgttgtggaagaaacactcttccattcagatatctgtaaaagcaaacgcacgcctccgctgcaacagacagaagagaacgtggagcaggcgcgcaactgtctttggtggagaaggatggggtggtcacgccatttccggcccgctgctctgcttcttaccgctctgtggcggggtgaggagcccactggggagaggagaagccctattttgttcagacaacatggctttctttgctcgggctttgtccagcaaatccaagctgtctctgtgggtctgtatgttgtgtgcatcttcatcagcgacgcccctgaagtgcttcagttttgagctccccgtctcccttataaccatggcaaatggaaccatccacttgacacagttctctatgtcgcaccactgataccctgaaaccttttgcatcaattcagatgacgagaaatgatacaaggccgaagcagcaagtataccataaggaaattcaaggcagtcaacatccaggacacagagatccaaccctcgtgccgaattcgccacccaggccagggttaagaaaggtgtgggc

SEQ ID NO: 323213 - DNA, 967 bp, Homo Sapiens
  misc_feature (23)..(23): n is a, c, g, or t
  misc_feature (55)..(55): n is a, c, g, or t
ctgcggcagcagccatgtttttncgcggccatgctggtcccactacatgcttctntagggctttcctttcctttgcggggccagcagcctgctgagcccaaggtacctttcccttttccttgtggctcttctctttctcccgctttccttctggggcatgtcttggccagaaagggcaggtaagcgggtacttcacaggaggaccctgggtagggaggtttcgttgtctttggagactgtggataagctttagtagctgtcttggatatcacaggagaagatggtctcttaggaatgcctccagaaaactcacatcttctcagaggggacccgaagttcacaacaggaagagaagttgctgttcgttgcccccgcttcaccttctccaccagagaggcctctcctcctgaaagggcttctttcccaacatctcctgcaccagatgtagacgtagatgtagctttcttcttctcaatgtttcgagtgggtgaagacttgtaagaagggttaagagggccaagaggagctaaacgaggacagacatggaatactcggtctggggaataggatattgccacggtggatgaagacaggcgtttactcatgggaggctccgttggctttggcaaactcatagttgatgttgaaagtttgtcacatgcatcatgtcctccgggtccaatggccagtggtgctccccacgaatacttctttttcagctccagctgctgtgtgcgctccagggaccggcgcatcatcgcctccagccgttcctcctcctcccggagcttctgtttccttttctcttccacagcagctctcttttggtcctcccgctgccgctgctcttccagttttcgccatcgctcctccatttgcttttcgtactgcagcctggctcttttctgtttctcccaggatctgttgctccctcgtgccgaattcgccacccaggcctcgctacctt

SEQ ID NO: 323214 - DNA, 942 bp, Homo Sapiens
gcaatgccttgttccaactacaatgctttcttttaggggctttcctctcccttgcggggccagcagccctgttgagcccaaggtacccttcccttttccttgttgctcttctctttctccgctttccctcttgggcatgtcttggccagaaagggcaggtaagcggtacttcacaggagaccctgggtagggaggtttcgttgtctttggagactgtggataagctttagtagctgtcttggatatcacaggagaagatggtctcttaggaatgcctccagaaaactcacatcttctcagaggggacccgaagttcacaacaggaagagaagttgctgttcgttgcccccgcttcaccttctccaccagagaggcctctcctcctgaaagggcttctttcccaacatctcctgcaccagatgtagacgtagatgtagctttcttcttctcaatgtttcgagtgggtgaagacttgtaagaagggttaagagggccaagaggagctaaacgaggacagacatggaatactcggtctggggaataggatattgccacggtggatgaagacaggcgtttactcatgggaggctccgttggctttggcaaactcatagttgatgttgaaagtttgtcacatgcatcatgtcctccgggtccaatggccagtggtgctccccacgaatacttctttttcagctccagctgctgtgtgcgctccagggaccggcgcatcatcgcctccagccgttcctcctcctcccggagcttctgtttccttttctcttccacagcagctctcttttggtcctcccgctgccgctgctcttccagttttcgccatcgctcctccatttgcttttcgtactgcagcctggctcttttctgtttctccaggatctgttgctccctcgtgccgaattcgccacccaggcctcgctccta

SEQ ID NO: 323215 - DNA, 934 bp, Homo Sapiens
ccaaaggcgggcctgtgtgggaagcccagaggggtgcgcctttccccctataccccagggggggctggtttttattttagggcgggcttttccttctgtggggcaggtgcttggcccaggaaaggggccagggtaaggcggttaccttcaccagggaggacccctggggtaggggaggttttcgttggtctttgggagaactgggggataaagctttagtagctgtcttggatatcacaggagaaagatggtctcttaggaatgcctccagaaaactcacatcttctcagaggggacccgaagttcacaacaggaagagaagttgctgttcgttgcccccgcttcaccttctccaccagagaggcctctcctcctgaaagggcttctttcccaacatctcctgcaccagatgtagacgtagatgtagctttcttcttctcaatgtttcgagtgggtgaagacttgtaagaagggttaagagggccaagaggagctaaacgaggacagacatggaatactcggtctggggaataggatattgccacggtggatgaagacaggcgtttactcatgggaggctccgttggctttggcaaactcatagttgatgttgaaagtttgtcacatgcatcatgtcctccgggtccaatggccagtggtgctccccacgaatacttctttttcagctccagctgctgtgtgcgctccagggaccggcgcatcatcgcctccagccgttcctcctcctcccggagcttctgtttccttttctcttccacagcagctctcttttggtcctcccgctgccgctgctcttccagttttcgccatcgctcctccatttgcttttcgtactgcagcctggctcttttctgtttctcccaggatctgttgctccctcgtgccgaattcgccaccgtggcctcgctaccta

SEQ ID NO: 323216 - DNA, 954 bp, Homo Sapiens
tttggtgctagggacgtggagatgttaaaacgacaacaaaaaatatatatataaaaacaggaatgaaatctgtgagagaatatttttggttctaaagacgggtgcatccgtttgtcttcgcccgaatcccttgctggagaccacacgagcagtgacattgcacggagagggcagctttgggttccgccgccgtcactgaaaccaccggaaggcggctcccgtcggaagcatcaccttctccagagcagcggaaggcttctttttgagttcctcacattttctgaatttgcaaatctgatggccagtctttcgattcctacaactgctgcactgctcgcagttgatgcgccgccggcagggcgcgcacatgccgcagcgtttccgcttcttcttgccggagctgatggcagaggccagctctccctgcatggggtactcagccaggcccgccatgtgcagcgcgctctcggccaggaacacacctgccggggtcataatgaagaggcctgggttgatggggaaagcgcccaggtaggggaagtcggactggccattgagggcttcggcacctgccacagcctccatgtcaggcaggccagcacccgcctcgctcatcagcgggagatgctcctgcaccacgcgcttcagcatctctgtggactgcgcaaactgctgcagcgtcagctgtccctcggctgccagctccgtggcccgctctgccttgctcagcaggctggccacagcaccacttttgtgctttgaggtagggttgcttttgtccaccgccatgccgccgccaggtcatgcccattggccaacaggggaggcagcggctgcagccgcagtggccttgtcagcagactctccgcccatcatgctgccaccgccactaccacccctcgtgccggaattcgccaccaggcctcgctaccttaagccgtagagtactgcctc

SEQ ID NO: 323217 - DNA, 1163 bp, Homo Sapiens
  misc_feature (110)..(110): n is a, c, g, or t
tggggtccccgcacactgcgatctaacgcgttgggataagtcgaggcgtcccgggcgcttattttgtcgccgcggcgcggagtcttgacgtggtgtgctcggtgttcacnccgtgtcctcgggcgcaccacgggccgtgttgtggcgccttctcgtcccggtacccccggttaccggggggcaaggaggaacccttgggcctggcccggccagtttaagaccccgagggggggcctttcggcaagcccgggggggtttaagtggcccttccatttccgggcaacgttcggtggcagtggcggccgtggccgccagggggcagcttgaagtccctgccgcagccggcgcaaatatacaggcggcgccgcatgtgcgcgcgtcggtggcgaatgaagtgcgagcttaggcggaagcggcggccgcactcggcgcaggggtagggccgctcgcctgtgtgcgtgcgcgcgtgctccgccaggttggagcggtggccgaagcgacggccacacacagcgcagcggtgcggcttctcgcccgtgtgcacgcgccggtgcttggccagcgccgagctctgagcgaagcgcgtgccgcagtcggcgcaagcgtagggccgctcgcccgtgtgcgtgcgtcggtggcgcgccaggcacgagctgccgccaaaggcgcgtccgcagtccgggcacgcgtacggcttctcgcccgtgtgcacgcgcaggtgctgtgcgtagttggagctctgcgcgaagcgggcggccgcagtgcgcgcatgcgtacggcttctcgcccgtgtgccgccgccggtgctgccgcaggttcgaggcggccgagaagcgtttgtcgcactcggggcactcgtagggccgctcgcccgtgtgcgtgcggccgtgtttggtcagcgccgacttctgtgagaagcgccgcccgcactcggtgcacccgaagggccgttcgcccgtgtgcgtgcgcgcgtgcttcgccagcgtggagcggcgcgcgaaggcgcggccgcagtcggggcacgcgtggggacgcgccgggtcggcggacggcgcgggcgcctcacccgggacctccttgttgtccatggggatcttgagcctcgtgccgaattcgccacccaggcctcgctaccttaaagaccgttgtagtactggccgtcc

SEQ ID NO: 323218 - DNA, 689 bp, Homo Sapiens
aggatgtggcagcggcaaacttgttttctttgagcgtaggactttccaaagggtgtatgaaatagacatcacagatgcgagtgttgttcgctgcctgtggcatccgaagctgaacctagatcatggcttggaactggaaatggattggctaaagtctatctacgaccccaacaagagtcagaggggagcaaatattatgtgtggtttatatcccagcggaaggcaataacaagctgagactcttactcaggactacatcatcacccctcatgccttgcttatgttccgtgagccccgcctaacggagtacataggaatacagctggagaaggacagactggtatcccctgaagtcgcataaacctgaacctcctgtagctaggcccaggtcgtggtggccgagttggaacccacgggggcactctctcttcctatattgtgaagaacattgctttggacaagaccgatgacagtaatcctcgggaagccattatgcgtcatgccatagcagcagaagacaagcccatattgggtttctccagcatattccaagactcagccctaaaccatgtttgcccaagattgaatctgatgatgaggaagcaaagaatgagccagaatggacaaaaacgtaaaatttgaagaatctcatttgagagctgtattaccgcgtggggggtattggaaca

SEQ ID NO: 323219 - DNA, 464 bp, Homo Sapiens
ggggaaaactttgtgtacaatgatgatgagccattcaagccttggaaaggactaaaatacaactttctattcctggacagcaagctgcaggagattctcgagtgaggggtctccccgggcctcatggtctgtctcctctagcctcctgctcatgttgtgcaggcctcccctccatcctggaccagctgtgcttttgcctggtcatcctgagcccctcctggcctcagggccattccatagtgctcccctgcctcaccacctcctctccgctctcccaggttcttcctgcagaggcctctttctgcctccatggctatccatccacccaccaaaaccatgtttgcccaagttgaatctgatgatgaggaagcaaagaatgagccagaatggaaaaaacgtaaaatttgaagaatctcatttgagagctgtttgcatgagtgggaggggtatgggacaggtttggg

SEQ ID NO: 323220 - DNA, 725 bp, Homo Sapiens
cccaaacctgtcccatacccctcccactcatgcaaacagctctcaaatgagattcttcaaattttacgttttttccattctggctcattctttgcttcctcatcatcagattcaacttgggcaaacatggttttgggctgagtcttggaatatgctggagaaacccaatatgggctgtcttctgctgctttggcatgacgcaaaatggcttcccgaggattactgtcatcggtcttgtccaaagcaatgttcttcacaatataggaagagagagtgcccccgtgggttccaactcggccaccacgacctgggcctgctacaggaggttcaggtttatgcgacttcaggggatccagtctgtccttctccagctgtttccttgtactccgttggcggggctcacggaacataggcaaggcatgaggggtgatgatgtagtcctgagttagagtctcagcttgttttgccttccgctgggttttaaccacacataattttgctcccctaacgggtgtaaaagcaaattattttctttacttggtcttagaaacagaaaatttcatgttgaaaacatgagatactttcaggaacatactctgtgcatgcactccatctacacaagtacttgactttctgagggatggcaacagatgggctctcagtgataaaagcttaaacttatggaaaagcaagtctgtcagtcagtggttattaacaagcaagag

SEQ ID NO: 323221 - DNA, 723 bp, Homo Sapiens
  misc_feature (303)..(303): n is a, c, g, or t
  misc_feature (436)..(436): n is a, c, g, or t
ctacagtccctacggtagttataaggagataggagaaacatcttttatttcttctaaagaggttgaaaataagatttttttaatatttctcactcataagatttttaaactcttaaaaatgcaatatcttcttttcaaagcacatgccatcttaaaaaaatcttagcaatttgacatttgcactcaaagaaaaacatgcagcgccattgtcttctgacaaaattctgcattaaaaaaccctatgcgactttctgcaaatatattccctctttattattcagggactccaaaccacaaacattncagtgcaatatttatcgtttcttatttccgtaggaagcactagaaccaatgatgtcttctgacaactggtttcctgatggttgagcaacagtctccctttgctttattttaaagtactttttttaacttgctngatgtaaggtataattggaattcattagaacttgaggatcccaatggaggggtgaagaatgaaggatggaggaggaatacttaaggtctaccctgtgccataaacttaggacaaatatgtacacagaaaaagacgagaagcaaaaaacctcagattttatccatgcaccctttcaaaagtgttgttctgaatttctgaaagcagcgtggtgtgaatcaaaagcagttcctgagcaactgcagtaaacagtctttggagaatactatatgtacatgcacatgtacata

SEQ ID NO: 323222 - DNA, 906 bp, Homo Sapiens
gagggtatctaggccaatttattcagctggaaatcaatctgtccagggctggaccaggcgcctccccctcgatacagctcctggctgaagaggtcatcagagcagcagctgtccccaggccagtgtcacgtcactgcgtacagttcctcccgatcgttcttgcagatctgatagtggcaggggaatttctgcgagcaggcccagggctcggcgggctggtcaggtggcggcagcagcaaggctgcgttcccggccagcaggatgtgccagatgctgtgggtgtagtagtagttgtcgctagtcatcatggaggtgtagatggcgatgcccacagaggccatagagacgccgggcaggaggtagaaggcccagcgctgccacgaggtggggtagcactggcgccggtgcccgcagcggtaagcccacatggaggccatgatcacgaaggcaaagaggcagggccccagcatgttccacatgtcccctgcggtccagctgcaaggacatggcgatgaccagtgtacccagaacgaaacagcactggtatttcaggactgtcttgagccgtgccatgcacaggatggtgacccagatggccgcccgggagcccaagaagtcgcagtactgcagcgtgtcgtagctgtaggatgcacgagggaccgccttccccggggtcttggtcgcagcgcgtggtaggaacgttgacgaaagaacataggtgtaagtgcgtggactggagtgcctccaccagggaaagaatcgctctggactgagaccggcgatggggggccacgaaaccatgaggttgtctgaggcggtgagccagagttgtgtgacgcgctctgtcaggggccaggcggcctgggctgtggctgtctgtccgggcagctcacaccctggccaagc

SEQ ID NO: 323223 - DNA, 1617 bp, Homo Sapiens
ggagggaatttgtgggagttgcgcccgcgacctataagagccgccgtgtggaaacggcggccccccccggttatataggggagaccataagtagcgccccctgtgcccgccgcgagcggggttgtgttgtttcctggaggtgaggggaaacgcgggacccgggaaccccccttagcttgtgccccggacccccagtaaaagccttgaaccggcccccacaggagtttctttttcctggatgagagtagggatccaaagtcaaagggaaattccaaaactctctttagggatttccaagggggcatgtttttttatttctccgccatttcctgccatagattttgggatttacccacccctggcttccctggcttccagacatctgaatttcacaaagcattatttttcccttttccataatgaaaaatgatgtatatggcatgaagagtttactcaattaagtcaggagttttaaagtcttctctgatcagaatttgctatctgatcagagcaggccacccaatcacagcaggtgcttggaggggagtggaatctcagtagagttgatgactcaccaagtgtaaatgggaaaaagcaacacagtcacatttccatgtaaggagattttatagtaaacatgaatttgtcagtgtccagtattaattagaaaacatctgtcttcttacttgaagcctattaagcagtaattctttgaccacaaactggtcatgtggcagaccctttctagaagacactagaatgtcatccggtgtgcagttgcctgagaccactcccaccccaggagctgggcaaagagctctccacgtccacctgtccccccacagcgcgtcactgctgccccatcacaggtcttctcttttattcccagctcgattttcttccttggaagaccgagatttcagatctccttccttcttttttttgcccttgtcgtgcttggttttatttttctctttgcttcctcctcctttgccggggtacacctggccctccagagttacatcagcacacctgtcttgaccgaccaaaaagtccttgatctcccaggcgtagctcccatcgcgaagcatgaagatagcacggtctgatcccacaatgaacctctggacgtcatagttggcattgaaaaggctgccctgccagaggctcgtaatttcctctgtctccttctcagtagggcttcctgatacagtgacaaacatcatgagagtcttcccttttttcgtcattttcaatatgctttcaggcttgcttgggtctatctttgagaagtcgacaggtgctgaaggtctcttgtgctctggaagatctccttcttcaatgtcatcatctttctcccattgctccagaagacgcgccatgtctgcatcattgtaatcgcgaatatccttcttcttcttccggggaggtggggtagactcgtcgggcgtcccgggcgagccttcggccgcgcaggacccaggcggtggtagcagtagcagcagcagcagcaggtcagaggcacaaagcaggaccacggccttgcgcgcccacctggaagccgccattttcgctgcgccgccgtaatagccactctgcgttgataccactgcttcc

SEQ ID NO: 323224 - DNA, 876 bp, Homo Sapiens
  misc_feature (539)..(563): n is a, c, g, or t
cgatccccagctcatatttatttgggcacagagtgggcactcaaatatctgatgaacttgatgaactgaaaagaggtctccttaaacaagatatcatctcccgaagagagaagtcccaaccatataaaagtgtatgatcaagtcccagaaaactttgccttcccaaggaatgtgtttctaatttggtttcaaagcacactggttcccacttttaccactttcatgacattggacaatagtactactcttttctacttttcttccagacctggggacttgatattctcttagcctcatatcatctttgcaaggagttcacagagaggattattctccatcttacaaatagaactgaggcccagaaggaaatcccttagtgtctttttgatggaacacagttctgtgatgggaagctatcccagtctcccatccttgcaaaactgctgcttagtactcaggtgttctctaggttgttctggaacatttacaaacttctttgggtgtgaggatgtgctgccacaaggcgcaaaaatcacatnnnnnnnnnnnnnnnnnnnnnnnnnaccattctcctcagtgccaggtggggacagattccacccactgggcctgggaggaagaaaagcaccttggccactatgtcagggcaggagtcacagccagcatagaagagagagacctaagtagacgaagagtagtttcaactgggaagaagcagggccaccacttagcaaaaccaggagactcctctctgaaaggattccaacctgtggaggaaccgatggcagccagtgccatgaaggacggccaagattcctcctcctcacatcctctgcgccggggcctgcccagagtcaacttataccagggcaccca

SEQ ID NO: 323225 - DNA, 488 bp, Homo Sapiens
  misc_feature (439)..(439): n is a, c, g, or t
  misc_feature (478)..(478): n is a, c, g, or t
tttttgacttccgataatgactttattttaacatatttaattacagacataaaatagctggggaggggggtgagcccagcctagccccaccatgggctattaggaggggaggcgcaggcggggcccccctgctgaccctctctctgggggtcttcctatggcggggccctattgcttgagtgggggaggagccatgcaaatgaggggggcagggcagccactcggccccaccccaccccgaggacggcctccccacagaatgcccaggctgtgccccagccccagctgctccacctccttcctctctgtccagggagcagaccctttggccagcccctgactttgcccctaccccctttgcaaacctaaaggggattaaatacaaattttacaaagtaaaagggggtccaacattgccctggggcgggggctgctctgnccctagcccagggcctgggtccggtgggattggaagggncctgggattt

SEQ ID NO: 323226 - DNA, 871 bp, Homo Sapiens
ggagttgggtccagtcttttctgcaaagcaggcccgactgctggggctgccagctctctgaagggcagccccagcgtttccaggagacggcagattgtctgtggccatggcaaggacatctgggacgacagtgacagcaatggggctgggagcaaatgtggaacggcgccagaggctgagcagaatgagctacatgctacacatacacacacgtggatgcatatgtacataccatggcagtgtatgccgtgaaggggtgtctcgtaccatgcagacatgaaatagcaaacagggctgaggtgttggcaaaaagacagtgtgcaggacctgggagggagcaggggagccaggaaaatttggactagaatatacagctgagatggagacttcagggggtgcccagttcaagccaatggcagaagacgcagaccacatgggtcattgtatccccccagcaaagcacctgatccatgacatgagctaggcctgtgaggatggcgccatgtctgtagccttggaaacacgtaacaaatttgtccccagtccagttacggggtgcccaaggacacgagaccaaaggatcttggagctcttgagacatgtgaagttgcgaattctgctttgtgcttttgaggtaaagagcagcttccactgtctctgaaactgcagcgagttgacaggtgatgcggctgcatttaggaagccctgtgaccctctcccttccatctggctgcgccttgtcctagaagcttcacaagcaaacccaccaactcaggagccctggatttcagcagatggtccttctatcagcttgtacagatcaataagacacacttggcttgtgcaggcatctgcttccactcagcccccc

SEQ ID NO: 323227 - DNA, 619 bp, Homo Sapiens
  misc_feature (48)..(65): n is a, c, g, or t
  misc_feature (73)..(233): n is a, c, g, or t
  misc_feature (598)..(598): n is a, c, g, or t
  misc_feature (604)..(604): n is a, c, g, or t
tccttggggggcccccgccccacaaaaaagtgtttaaaaatttttttnnnnnnnnnnnnnnnnnnccacaggnnnnnnnnnnnnnnnnnnnnnnnnnnnnnnnnnnnnnnnnnnnnnnnnnnnnnnnnnnnnnnnnnnnnnnnnnnnnnnnnnnnnnnnnnnnnnnnnnnnnnnnnnnnnnnnnnnnnnnnnnnnnnnnnnnnnnnnnnnnnnnnnnnnnnnnnnnnnnnnnnagatgataaacattttattacactaaaaaagtcatctgttaactgctgaactgcagggggaccacatgtgaggctacttcagaaaaatggcatcagataacatatatagatttctggcattataaaatggctagattctcccctaccttccctcattaaatattaatcagtggcttaggtcagttctagtgggaacacttaattgctgacttcacataaaaccagggattagcctaatgtgccaatgggtatgagtccattccggggccatcttcccaacagccagaccgctgtgggcttgggacaccggaggccaacatctggggggggcctcaggttccactcctctgtgggtgaggcttgcncttccnaataaccgggctcgg

SEQ ID NO: 323228 - DNA, 497 bp, Homo Sapiens
ttaaattttattatagtaacaaagtgactatttttaataataaaagcagagtgcctgtaggcaagtggatggccctatctctaggccgagtctccttagtgtttcagacctaggctgaccagaatagtcttctagaatgtaacatttatccaccaggtgtcattatttaccaatctgacaagccactgggctgtctccgtgcacttcaatggttggaatcaaggctacagaccagaataggagatgaatgaaaatagatttagaaaagggcgttgtggctggaatgcagcttgcagtgtggagggcagggatgggagggtaaagagggctctttgaaagaccagtgtcactttcctgatcaaggtttcttaagctgatacttccctggaaggagtcagaacttgggtttgtaggagtagccctggcctccagctgcattgtgctagactcaggtttgaagccccaaatctaagtagtcccccctttgataaattccc

SEQ ID NO: 323229 - DNA, 764 bp, Homo Sapiens
ttgtgacggggagtcctcaagcgtattcccgtcggttccgtggccctgccaattgttgtcgcagggtcgggaccacagcggtcacctggggccgctttgggcacttggttcagcaaaggccacgccttgcaattgtatttaacctttggcctccatcctgtgcaacgcagatattctaccgtatctgaacagcttggggtcttagcagacctgcccctgtgaaaggagggtcttgggagagggatcgggccatgggagcccctcttccctgaataaaactgacatccggcagcgtcccagcgtgcggacctctccgtgcctaccggtccaggccccacacacagccctggtcgccaccagcgttcctcccaggacacccttgactgcgctctcctgtgacagatgccactgcagcccgcaccttgtcactgctgggccaagaagccttcactacggagtgggatccaggctcctctcccacagtaaagcggtgacttcacctcatggagcccgggaagctgctcgcctcggcagccataggagcgaacactgctgctctctcgctggcccctggtgaggacaggaagcctgaacccgggtgatggctgaacgctgcccagcgtgtcattctggctggggccactccgtctgccccttactccgacagggccctgtggctctggcagccccaggccatggcgttgccagcctccctgtgacagagcctggtgaacagtatacattcgctggccacgcaagtagca

SEQ ID NO: 323230 - DNA, 1140 bp, Homo Sapiens
  misc_feature (260)..(271): n is a, c, g, or t
  misc_feature (320)..(320): n is a, c, g, or t
ggctttttttgtttagcggggaggacaacccgcgagcggctgatgtggtccaggtcggcggggtgttttttctgagggaaaaccacctctttggggccccggttggggtctttacctcaaaagggggccccctcccgccccaaaaagaaatgttttcatgaggatttttttctagagagcccaagggcccccacaaaagggggaggtcattaggcatcacttcggtgtgtccgccgatagtcgttgtcgcctggttctcnnnnnnnnnnnntgaggttcatgacaggagaggatgggtgtgggccggggtgtgggttttnttaagtacaaacatccccagcaacagcccatggcaggccattgctgagggcacaggtgctttattggagaggggatgtgggcaggggataaggaaggttcccccattccaggaggatgggaacagtcctggctgcccctgacagtggggatatgcaaggggctctggccaggccacagtccaaatgggaagacaccagtcagtcacaaaagtcgggagcgccacacaaacctggctataaggcccaggaaccatataggagcctgagacaggtcccctgcacattcatcattaaactatacaggatgaggctgtacatgagttaattacaaaagagtcatatttacaaaaatctgtacacacatttgaaaaactcacaaaattgtcatctatgtatcacaagttgctagaccaaaatattaaaaatgggataaaattatacatttttcttctcagttcttttcaaaaggattaatatttttaaagcacatatatgctactttccattagcaagacccatgaagggactgatgcagcccagctcttccttgatgcccccagtaggctttgagccattgaaatggcccagccagggtgccatgtgcccatgggttggggcagagagccagcccagcagtgcagaacagaatgctgaaacagcaactaaaagtcggaagatgtctgttggctaaaactttggcattaaataaaagaggcaaatccggatggaaacatgcacgctcctgccagccaggatgggagcagtagcaggggacacaggcaactcattgaaagctgactccaacagggtgtgagaacca

SEQ ID NO: 323231 - DNA, 946 bp, Homo Sapiens
ttcctggtttgtaagaaatctgattattcaaatttattaccatcaagaattatgcaatgatgctgtagtttttcttaacaaatagaaaacagactgtgtacaacagtgaactctacagcactagcatccacaaggtaaaaatgaatgtttcatcatccaacattaccaaccctggaatgttgatcttgacttagcctagctaggtttggggacgtcggcaccacgtccctcagctaaaacagctatgcacccttccccgcccccacttacctatctagatagcgctgcccagaggaagaggcgctctccctgcccctcagcaagctgggataataaggactgattagagtaccattgatagaagtccagtagtcttgccacattggtttatgagggcatcttggagtggaaaagagcgattatcgggggctttgaaaacagctgcaaaccagggaggaaaatcatctggcccctgctctgaggacagacatgtgctaccaggcccactggcctggacctgaaaggccagacacgcaccacggcttggccctgaggtgcattgggtgtggcacacaccctaacctgtgctaattcaccttggtcacacagccagacccacacaggctacaaaacaccagcagccagtactgcaagtgcatggggaccaaaagccaggctctgtgggcccaggtacaagccagcagcatccctcgggaaccccaggacacacacgcagatcgacacacccatcttgaaggagtcagcaagccacaaagccaaagggctgagctcaaaaacaaaaaccaagaaggcagatcaaagggcataagaacgagaacccaccacccacaccagagaaacaggcacacagccagaagaccagtgacgcaacccacacacgagccaacgaaagaagaccctgggcgcgccacccccaacccgcacc

SEQ ID NO: 323232 - DNA, 1654 bp, Homo Sapiens
  misc_feature (91)..(100): n is a, c, g, or t
  misc_feature (135)..(135): n is a, c, g, or t
  misc_feature (165)..(165): n is a, c, g, or t
  misc_feature (209)..(209): n is a, c, g, or t
  misc_feature (382)..(382): n is a, c, g, or t
  misc_feature (385)..(385): n is a, c, g, or t
  misc_feature (473)..(473): n is a, c, g, or t
  misc_feature (477)..(477): n is a, c, g, or t
  misc_feature (558)..(558): n is a, c, g, or t
  misc_feature (611)..(642): n is a, c, g, or t
  misc_feature (754)..(770): n is a, c, g, or t
  misc_feature (820)..(839): n is a, c, g, or t
  misc_feature (881)..(913): n is a, c, g, or t
tttttaagccggcgcgggcgccaacaattgatggcgcgggccgcgttctttttcttttgcgcccggccccgctttgtgtctctcccacacnnnnnnnnnnacggattatttatttatctcgtcgcgccccggcanccacacccacgagaccggtcgtgttataantctctctcgcgcgggggcgcgatgcatatctgcagcgagtttcntctcgctatcctctcccccccgctttttcgtgagagtgaagaggtgcctgccaccatctttgcgtggtgcgcaggaaaaaaatgtgttttatagtaggagaggttgttcccaccacctcccttcattcttcccaccataagagagtgttcccccaggggcgcgcggggcgggnggngtaatattttctatattactatggaggtgctccggcccgtgtggggcgccccgcctcgggcggattatggagtatcccccgcgtacanaganaccctcctctcacaggaggcctcccccctctttggggagtatttttgtttaataaagaaccgcgttgtgggtgtgtgcccncccccggcgggggttgtttttttatattggggggggggagtcccacacccccnnnnnnnnnnnnnnnnnnnnnnnnnnnnnnnnggggaccccccgtttttgcccctgttcgcctttttccctttcgggggcgccccgccccacaacgaaagggttttgaaaaaattttttggggggcggggcgggccccccaaannnnnnnnnnnnnnnnnccgcggctttttcccccttcttggtttttgttgggcgttcgcttttctgnnnnnnnnnnnnnnnnnnnncgttacttttttggttgtttcagggtgtttgttttgctttgnnnnnnnnnnnnnnnnnnnnnnnnnnnnnnnnngacaatgtccttttaattgtactcttttcaaaaaatctcctttctcagttaaaaaagacaaggcatgatgaagacctgctctagcccatactgggcggtgatctcggtcctgggggaggccaggccggactcttccaaggcctcctccctgggcagtcccagcaatggggccagtggcagggcaggttctccctgccagaacccgatcctagcccttcagaaggactggacctctgtgtcccttcagtgggaagccaccttggacacacgcagtcattcaggtggacataaggccactcttctcgcccttgaccttgaggaactcagccatgctggagaaatacttctggttggcctcagccaccttcttctctgccgcctgtgggttcacaatctccaggccctggagtggggtgaaggccacgctggagagccgtgcccgaggagcggtcgcggatggtggacttcccgccatatacgacgctctgcttctgcagcggtccgctgcagcgtcttggagatcctggccttgagtggcctcgtttacctgatgtctgccgcacacgcccactgcccgacttgcccaggtggcccaggctgaatcccaggtacctcctggtaggcgtcctcctcgatctctccgaagctcatacggttgcctgcttccggatctccgtacacacccagccgctccttcatcttgcggtacctgcggccgcctcgcgttcgttccgctgctcg

SEQ ID NO: 323233 - DNA, 1035 bp, Homo Sapiens
tatctatattggtttttatttataaacagattgacataaaataagtccagatggcagcgtgagtagctgtgctgctgacttgcttacaaggaagcctgtggacaggcgagtgggtggaaccgactccagcctggaaaacctgccctcccatcccccttagcgccttcttggccttccggcctgtattttcttcgacagtctaagttctggacctagcggctaagggagactgtgcgtgggggcagatatgatgccatggactcccttcccacagatgaggcctagggctgcaacaagggccccgtgaccgagagtgcagaacggtgacagggatccttctcctccccatatggagtgatgtggtcaaggctttatgggtctctccacctcaaagagaaagtgccctagggtagctgtgctctgaagaggggccagcgctcatatctgcagagggccgtacatctggtgaccctagaagcagcggcagatctcccttccgtacctgaatagccaggtgtctagtgttgggaggagtattaactacatggatttagcccaggctgccaggaaacaatccctttgaacaagtaagactctttcttgctactgaatacggtcagcagcgtttagcaatcgacggagcttatggactctcacggggacatcgtggctgaggaacgcgttactgaatcctagtgtgtgcgctgactggggagttgaccactaagaggacagaaagccagggaacatgtagcttgcgctcagatttttaccatgccacactgggcgttttacacacaggagcactttcagggtcccttaaaaaacaacccgttagtatgacgaagggcaccacaggaccaagagggcaattggaagggaaccaagtaacaacggatgagagagggaacccattacagaacatagcccgccgagaccagtaagccgcgatacagggccacacgaaggccacagggaggcgcagacccacccatggggacccccgcccacacggcacgtcgccacgtccacatc

SEQ ID NO: 323234 - DNA, 337 bp, Homo Sapiens
tagtgaaactagatcattgcttacaaaaccctgcacaagccctcctgcccatccccttcacagttcccttggctcagcctctcctgtctcacaggaactgcaacaaaatgggtgtggaacagccaccaccacgtccattgaacgacaggaagggagaggccctgggctccgaccctgggccttaagagggtgacagttcttccttccacatccgttcccatggggcctggagttgcatggatgagggtggtccatgccaccatggttctcaggccaccactcagaccagagtgaaatgatgtgaatgtcccaccccacagagccccctccccccacc

SEQ ID NO: 323235 - DNA, 988 bp, Homo Sapiens
  misc_feature (153)..(206): n is a, c, g, or t
  misc_feature (922)..(943): n is a, c, g, or t
tctcggcccctcaaccccacacgcgtccgccgccgcgccgcgcaccgagcggtgtcggcggtttatgatgagtcgcgagtatggctgacgtagcctggcctcgggctaggggctcactagagcggatctcccccccggccccgatcgtccgannnnnnnnnnnnnnnnnnnnnnnnnnnnnnnnnnnnnnnnnnnnnnnnnnnnnntccctgcgcgcgccagccgtgtgcacgcgcgcctgcccggcttcacggccccgctagacgccggggcggcgggaggggccgggccacggccctggccaggcgccgccccccgcggccccgggtccctttcttgcgggcctggttggggccgctggggggccccggcccctggccgtggggcacagagtaggtttcctgtgagttggttggggccgcggctgccgcctgcactgccttggggcacagactaggtttcctgtgagctggtcggggccatggctgctgcctgcacctgccccagggcacagagtaggtttcctgtgagctggtcggggccatggctgccgcctgcacctgccccggggcacagagtaggtttcctgtgagctggtcggggccatggctgccaccggcacctgccctggggcacagagtaggtttcctgtgagttggtcggggccacggctgccgcctgcactgccctggggcacagactaggtttcatgtgagctggtcggggccatggctgctgccggcacctgccctggggcacagagtaggtttcgtgttgcttggaacattaaggcgtaattttgattcagtttttcctaaagaagcattttgcatttttatggcttttgcagttcgggagaaagcttctctattttggatgcatttcagaagggcgttctattaaacatgaatctgcaaccagnnnnnnnnnnnnnnnnnnnnnnctcgagactagttctctccctcgtgccgaattcgccacccaggcc

SEQ ID NO: 323236 - DNA, 1547 bp, Homo Sapiens
  misc_feature (1404)..(1404): n is a, c, g, or t
  misc_feature (1470)..(1470): n is a, c, g, or t
  misc_feature (1526)..(1526): n is a, c, g, or t
ccgcgtggtcgcgtgtggggccccggcggggttgcgacaagtctcgaccgggcggtccgctgagtacagctccgcgcccgcttcttctcgtggccggagagcttcggtccgtcgcgcttgtgcgtcgctactcttccctgtccctccaatgtgcgacgccaaaggggtcagttagctttccaccgctcgcggggactgcccgacgggccacgaccgagggcgctgctgggagcaacggggtttcccacgctcccagcgcacgaggacggctgctcgggagcagttcgccaccacgcgcgccctcatgcaagaagtcgtgccaggggcaggggggggtaaatttgggaaactccgggggcctctgctgggactcgcgcgggtgtggagggattccccggaagtgcacttcaagaaagcggccattgcgggaatttgttgcggagacgcggctcggcattgccccccggggcgtttctgttggagtgggcgggggaatgccagaccgctatgtcacgtgtgcccggcttctcgttggaaagaccggctacggccgagggttccgttgcccttctgggggcccgccgggccaacccgccaatgctcttggaaaagggttctcgcgggccggcaggcgggcgaccagggcctgtatgtcggccggcacggccgggcgcacgaaagagacatttaatacttctgtttacaaaattcaggcgtacatttcagtttgccctggaccgtgcccaaagctgtgtgctcatctctgcgcccctcatgtacttctgacgaggggggtgcagggcagggcagagcagagcctggggtccggaggcttcactggaccacagggggaggggaatgtgaatgtggcctggcccagagaactccccatttcatcgattttgcattgggcgatagaggaagcagatgtcggggctgcctgccttggtctagaggagatggctggggccacttcccacagggtgaagtggcagcggctcagcaaggggagcctggccaccaggggctgggacatgcgctcactggaacctttgtgcttggccctcggcagcgcggctgtggtcccgtgtgaaggtgtgctggggtgggctgtgggtggctggtggtggcagcttgtgcccagagttgacacaggcctccctgggttgggatgggggcagttaacaaagctgaaaaggtacttggactttctgagggcggggcttgggaggcagggccctgcaagtgagaccatgttctctgtcctcaggcagatccccagctggcctctgtagcccgggctgcaagctgacagcaggcccggagaggcggtgacggccctcatgccctggccttgaggagaaggagtgcgtgtgtgaggcgggggtgcattggccctggagntagccagggcccatcaccagcaccaggctgggagggatttaaaaccagggtcctatctctgagccnacccatggggaccctcgatcccatcctgttaaggctgcgggactcgagggtaggcnagtggccgggccccgtcgggt

SEQ ID NO: 323237 - DNA, 593 bp, Homo Sapiens
gcccgacaagcgtattctatgttttggggcgcggttttttggccccatcaaatagctttattcccacaaacgtcccttaattcacaaagcctcagtcattcatacacattaggggatccacagtgttcaaggaacttatagtagtgatgtatcataccaagcccaagtaaaccaatgtacacaaaatattcatataaatgttgttcacactgtaggtcctagattaccagcttctgtgcaaaataaggaaatgaagaaaaatagatttattaactagtattggaaactaactttgtgcctggcttaaaacctccctcacgctcgtctgtcccacacaaatgtttaagaagtcactgcaatgtactcccctggctctgatgaaaagaagcccctggcacaaaagattccagtgcccctgaagaggctcccttcctcctgtgggctctcctagaaaaccagcgggacggcctccctgctgataccgatctataaccttaggagggccctcgggcagagcaacggcagtaggactcatctcggtgatggctgtagatgctaacactggccaaattcaatgccacacctactggtta

SEQ ID NO: 323238 - DNA, 1108 bp, Homo Sapiens
  misc_feature (936)..(937): n is a, c, g, or t
  misc_feature (1074)..(1074): n is a, c, g, or t
gaagaatagaatggcactttttcaacatttgacttgtgtaattccaatcctggatagtctactaactgccggaattattaatgaacaagaacatgatgttattaaacagaagacacagacgtctttacaagcaagagaactgattgatacgattttagtaaaaggaaatattgcagccactgtattcagaaactctctgcaagaagctgaagctgtgttatatgagcatttatttgtgcaacaggacataaaatatattcccacagaagatgtttcagatctaccagtggaagaacaattgcggagactacaagaagaaagaacatgtaaagtgtgtatggacaaagaagtgtccatagtgtttattccttgtggtcatctagtagtatgcaaagattgtgctccttctttaagaaagtgtcctatttgtaggagtacaatcaagggtacagttcgtacatttctttcatgaagaagaaccaaaacatcatctaaactttagaattaatttattaaatgtattataactttaacttttatcctaatttggtttccttaaaatttttatttatttacaactcaaaaaacattgttttgtgtaacatatttatatatgtatctaaaccatatgaacatatattttttagaaactaagagaatgataggcttttgttcttatgaacgaaaaagaggtagcactacaaacacaatattcaatcaaaatttcagcattattgaaattgtaagtgaagtaaaacttaagatatttgagttaacctttaagaattttaaatattttggcattgtactaataccgggaacatgaagccaggtgtggtggtatgtgcctgtagtccccaggctgaggcaagagaattacttgagccccaggagtttgaatccatccctgggcagcatactgagaccctgcctttnnaaaaacaaactgacaaaagcaaaccccagggacacatttctctgtcttttttgatcagtgtcctatacatcgaaggtgtgcatatatgttgaatgacattttagggacatggtgtttttataaagaattctgtgagnaaaaatttaataaagcaacaaaaattactcttaa

SEQ ID NO: 323239 - DNA, 718 bp, Homo Sapiens
gcgacatgaacatgttttattatgatgttagtggattgggggaagagacaagacacctgtacacaaagcttcctaacgttgagtgtcattaccttcacacattgcaccagtgattcttttccctgttctcctcctttcctgggaagctgcccttcaacatctgggtctgagaatggccaccggtccaacctagctggcaaggaggggcgtgttttcagcagtccagaggagaccccgagggcctggctgctccccagactgccttcccctgcggagtcgtgggcacggacgaaggagcgcaggaaacagggattctggccctcaggatccccagatccttggagggcagctccagggggaagctggctttggctggagcttgaagggaaggaagctggcccatcactgtctgacacttccaaggggctctgctgttgatgtccccagtgggcagggtaaccaaggtagaaatggatcctagatacgaaaccaggctagaaacctgtgtcagccgagcggggagggcaagatactcgtcatcactttccacttcctcttctgatttccacctagactctgtgcaggtagggcgccgggcactctggctggtcctcttctccctctctggcctgggcgagggccaccctctgtcccgtgtccttaggctggggagagcccatatcaaggtgcttgcctatagtcagccggtccttcgcac

SEQ ID NO: 323240 - DNA, 817 bp, Homo Sapiens
gccagtcacataataaacatatattaacagatgtacaatttgagaattctaattcaagaaatacagcttccagaggatcctttaggatctatgttcttattgcacatggctcagccgtctaggacatctaccaagaccagatggtcggggcgtgggggcagagcaccggggccacagtgggtaggcactctggccacatcagttcttataatctctctgggctgaagtggctgcttcattgcagggttggaccttgtttaaaaaccagatttgacatttccttaccgaacttcctttcccagcaagaatcctatttgttgggggacttttaaaaaaagagccgagagaaactctgggacgggtggttatcacctcctggctggcagcttgcgggaacgtaaggctttggaatgacggcgtggcgcaatgactacaccctaccgctcacaggaaaacatggtcattccataaggcccacgagaaactgtgggaataaatgagaacctccctcctcccactggcggcaagtgctgttattaagcaagaatcctcatttcaatgtgagggtgagaaaactattctggttcaggtgtatcctttgtccaaggctacgagaggaggcctggcggtcacatcaaccagcgagtgatagtacagtaggcagaccacgggcactgccttttcttcaggagatcgacgaggctgcccatggggttcccgtgcacctactgacatgactcggagtgaacgcaactttctgaagtccttggtgcatgacttaccgaacaacccagtggcaatatatggagctgtgccc

SEQ ID NO: 323241 - DNA, 669 bp, Homo Sapiens
  misc_feature (294)..(302): n is a, c, g, or t
attagttgcacaattaacctcttggctgctagcttgatgcaaacatatgtaacaatacacaaatttaaaaatttttttattctacataaaagctgtcaaagttttgacacatcaaaaatgcaaaataatggaatatactttaaaaaaattagttgcaagtctagcagcaaagcaattaagtgagaacatatttaatattaaaacaaaggggaactgtggcatctataggatgaaagtccaactaccttaattctactgatacaaacagaaattaaaacattctcccttgagggnnnnnnnnngtgattatttaaaatatgagtaaaagccattgctgccagatgagctccctaggctcagttccttggaagagagacagagggtcgctactcttcttggcctgctcaggagggggcctgggctttggaggggccgcagagcgctggcataggacatggcgggctttccccgcgcagagctctgggggctactgctattggccgactccgcgatctgcttgttaggcataaggggtggaaactggccaagatgctgcagcacactgtagttgaaggaactggacacctcgaggttctccgacttcagttgatcctcagggggtttgacagtcttgggtggcgctatcaactctctgggctgagctgtcct

SEQ ID NO: 323242 - DNA, 766 bp, Homo Sapiens
gctgccaaaactcatttttcattaacacggggtggggtcccaggctcaggcccccgggccagatcatggccccagtccgcacagagcgcccggccctggccgcccgcagctccaccgctcagccagtgatgcgcacatccgtgcggcggcggatccgccgggcccgagccgcctcgggcaggatggcgagcagctgctcttgcaccagcatctccacgatctgctccttggtgcggatgtcaggccgcagccactggcgggacagctcccgcagctgccggaaagcctcccggggacccgccgcatcctggtagcggaactgccggaaacgctggcggaacgtctcgggaccgagtctagagccggcggggcctggtgtggagcgcgcttcagcttcggcctgaggcgctacgctcacgggtgcgggcccgagaggcagctccagggccgcggaggccgcagctcggggcgtagggatggcttcagggaccgcggcgttgggactggaaggctcaggggcaggcggtgaggcctctggcagcgaggagcccacacagttacgctcaggggctgagctcgaaccggctccttccagtttctccggtggcaccgccgcgggactcccagtggccgccaagatcggctccgtagccgccataactccagctccgggcgtcactctttgtccggtagctgtttgctcagcactgcgtctgcgcgggggtggggtgagcagggagacgtttccggttaaagggcagagctc

SEQ ID NO: 323243 - DNA, 528 bp, Homo Sapiens
  misc_feature (70)..(87): n is a, c, g, or t
  misc_feature (446)..(446): n is a, c, g, or t
  misc_feature (467)..(467): n is a, c, g, or t
  misc_feature (494)..(494): n is a, c, g, or t
  misc_feature (514)..(514): n is a, c, g, or t
aaaaactctatttggtgcgtgcccacggtgctgcgtcccgtcagacatacctgtatagatctctctattnnnnnnnnnnnnnnnnnnaaaggttctttagcagttaaatagattccaatatgaacgtctcccaggacaaagctgcgtctcgcctctgggtcacacgcatctgtgcggctggggtgtatgtgccgcgtcacaggagtaccatataaatacgttgatttgaacgcagtttccctgtggtggtaaaaacacattcctgacaagtgacaaagcagaagaagtccggcagctgcagcgccttcactcggctgggacctcgtacttgaagatgacgctgaagagccggccgcccagccgctcgggcagccacgcgttcttgatgacggccagctttgaggctctcgcagcgcagggctggttgggtagtttgtgtggacaanacggcccatgccctcgatgancaccagattcgcgccacggtcccgcancagtgcgccagccccttatncagggggctgaggt

SEQ ID NO: 323244 - DNA, 830 bp, Homo Sapiens
ttcggtgtacatctgatttactgaattttaaagtctgggatgttagtggggaagaggcgaggtgagcattgcgtgacgccgaggactaggcggggcggggactgcacctggctaggcacccccaccctgggcaacttgcccacggaccccagggcagtgagtagtgacaggaggtagcccggggtgagacctctcacagcaagaagatggtgtggttgctggggcctccctggagagtgtcgtccctgcggcccctgggaagtgctccctcacgacggaaggtttcctgtcagtgcggtcccggggcctgatagtggcggtgggcgggtggggtcacgtgtcctcaaggtcctgaatgcccagctctgccccattcctctgattcccagtggctgctagctggacccagctggtgtcctgggcatgaaggcagggccaccgtccccagcaggtgctgccctcctggccagctgagcatcctggccaccatcagcgtccaggtgcccctactcgcccttcctcttcttcagaagcctttgcggacctgacctgggccagcttcccgcgattccccttccgcttcctatcgaacgtccaggacccaagctgcccgccccaggccagcccttgccacttggggcccggtcttcacacgtgggagtctgaccggggctcctccctgaacagtcctgggtctgacgctctcaagttatcacccacggagcccacacgacgcccggctctgggcggggatggggccggggctgctgcggggtcccgccaggcgaggccccagccctggagggcaggcgccaggcggggaagccccc

SEQ ID NO: 323245 - DNA, 809 bp, Homo Sapiens
gatgagaatcttctctgggctttacttggcttgactcacttaattctggcactgtctatctgaggtaggcacaattatcacccccatttcctagagagaaaaacagaggctcagccaggatgtcattagtctgaggtcgcacctcggggaatggcgatgtctagattcagactgcagtgagatgcagtgcagttcttgctctgccctctccgtcttgccctctgcctggtgctggcacaggcccttccaggcgggaggctgcgtctcaggctggagaaaatgtgaacacgggcgcctgagagaagcctggggatgctgctggccagcggagaggaccttgatgcatttcacagggctctgggcccgtgagcagaacgcgtccaccatgagtgacatcattcagctcagccagggagcttggcatctgggcttggagctcgatgcttcatgagccgctgggaggcttccctgggtgactgaaccagggctcgtggtcccaagtgacgaggatggggcaggacagagaccaagtcccatgccgtgaacagtcccttggaaagacataggtgggaattctagctcagcagccctggagggagagcaggaacagggctcagcaccatgcccggcactcttcatgcattactgcgtttatgtctctctaaaaccttatgaagtaagaactagctagcaaggggaaggctgggccaatgagatacaggaaactgggccaggttctcccagcttgagcttggagacggggtttcgatgtccaagcagctgatgccagagagctggccctcgtccct

SEQ ID NO: 323246 - DNA, 869 bp, Homo Sapiens
ttttttgctataagataatttattacagactagcctataatctcctgtaacaatggcacatataataattaacaacagcaaagatgcttggtttcttgtttcatgtaatggccagtacatctgtggacaatgtcgagtcctcaggaagtccaggaggctgctacagaggaaatccaagaaccatgtcacatctctcaacaagtcttgggaagtccatctgactctctgaaacagtttgtctctgacctcccaggaagtgtggagggccccttccatccagcctgtacagagggatcagagtccaggctccttctatagggttgaatatcagtaggggaatagcaaatgacccccgatgacgagagagaagagagcaaaggctagattctttctgcaaggtggaggacggctaggaaggcagtggccgacaagatgagcaggacatttttctaggacgtgggtttctagcaatgttattggacgtcttgattcgagtggctccatccacaaggaagtaaaaactactcactggactcctttcaaactagtccctctagggttcgtacaaatggtatagtaaacaggcgctgtacgactgttcttgtaagcagtctacatccccactgctctatagggaggttgagggcatggaagatctccgcgaggggtccaggatgtgaccacccctgagtattagccctgtgaggttccaagggggtaatataattactttgcttcagagggcctctacgaaaggccaaccaacggttgaacgctttcattttctagcttcctggattacagccttctggcggaatatgtgggaatcaagatacggcttcccatctacttagaacggttaatcgcag

SEQ ID NO: 323247 - DNA, 689 bp, Homo Sapiens
ttaaaggttacgggttatagctttaactccttctgagacagcatccatttctcaagaggcctgagcaggaagctccgggagaaccaagctatgcgggagctgctcagggacgtccactggggaagcctgagtgtccactcccacctgcttggccccatgcaactgggggtccctggagctggccaggctagtggggcgccaagagagacaacagcaccctagtgaccacgcatggagcttctggaccggggtgaaacatgctctagagcctcaagcgcacaccgaggtcaagcgagagctcatgggaagagccaaccatgcactcacgagacccctccacataaccacggacaaaggtctacagggggcaaaaagtcttcaaggccgagggagaaatggccccccgaaaggaaacgaatcaaaagggctcaccaagagccaaatatccagccgcggaatcacccccaggactaagcccctcaaaggggtgggggtaaaacagttctaggaccagggaaaaatgttccacaggggggctgtttcacctgcacaagcgaaaatacgtctatagaggacctggaaatattaaaacggatatcgacaatgtatttaacccccaggtgtctactcccgtgagtggatgcacaccacctttactacctattacgtgggcgtgtaatttcccgccg

SEQ ID NO: 323248 - DNA, 840 bp, Homo Sapiens
tggatagcttatttgacaagctgttatctaagtatgaagtgaaggctcctgttccttctgcctgtttcaggaatatttgtaagcaaatgacaaaaatgcacgaagctatatttgatctccttccagaagaacaaacacagattttatttttaagaattaatgcaagttataaactccacttgaaaaagcagttatctcacttaaatgtgataaatgatggaggacctcaaaatgggttggtcacagcagatgtagctttttacactggaaatcttcaagccttaaaaggccttaaagatttggacctaaatatggccgaaatttgggagcagaagaggtgatgtcatcctggaaaactgggtagttcatctgaccatgggatgtgtttgttatgaagaaaatctggatgcctgtgattcgagaattgaacctgaaacccaaagtgaactggggtgggggaagggaaaaaggaaagtatcaagtgttgggaaactggattcagtgggatctacaaggaatgtcatttttgtgcatcctacagtgaggagtaactgatcaggtgtctataacatttttcattctctctggaaacagactcaggtttctttggaccaaatccaaaagaacacatagctgtaacacagctgtagttgactagaatgctctgtatactttatattaaaaaatgctttgcatttcttccagtgcaatgaaattcatatggtgtcccaccttatttaatgatggtacaatttaaaatcttagtcaacttctgtagaaagttttctctatgaaagtaaagctgtttgaaaaattcaaaacaaacaggaaaaagaaaac

SEQ ID NO: 323249 - DNA, 997 bp, Homo Sapiens
  misc_feature (53)..(63): n is a, c, g, or t
  misc_feature (547)..(574): n is a, c, g, or t
cttagaaaggattttgaagggggggttgcctttggagcacccggttctgtgannnnnnnnnnntacccctttgacccacaaggggggggcccttagaagggccaggggatgggccccaggggtagccttgttatgggaaggtgttccccggcccccatttaggttcaacacccagacgggggacgctgcagggggactgtggggaagccgggagaaggcgctgcccacccctgtggggtccccctcgcctggagaccttgcaggcaacccttcagtgcatgcccacgggggtggtggaggcagagtcctgagaggtgggggtgggagcctccgggtcccctgcaggtcctgacccaccagatgggcccatgtgccccctgtagcttggcggccctggaggtggacaccagcacctcctgactaccagggggagggcctggactgaaacccacaccttcaccattcgccactgggccactctgcaggaactgcagcaccccacagatccttcatgcccagcacgccactcactctcacaccctctcgnnnnnnnnnnnnnnnnnnnnnnnnnnnncaggctcacgcgctccgcacaggtggcacgccaggggcaagcgtgcacgtagactcagagatgcaaggacagtattggcaattcagaggcacagaaagacgctgaggggcccccagcaaggtccccgccctcaggggctgtgttcccctcccagggcacgcacaccacaggcagcaacgcgggtgggggcactgtgacgccagtggggggagagggagcatggcggggcggcaggcagacgcgggttcatctctcttcctggtgtggtgagcctcagcctgatcgtggcactgtaggggctcccgcctctggccgagcctcaatttccaacgacaaacagctcagccctgtctcctcgtcccgaattcgccacccagccgcgcgggggccgggtgggcgcggcgggttgtcgttcgttcgtgg

SEQ ID NO: 323250 - DNA, 997 bp, Homo Sapiens
ggatgcgtccccccggaactcccaggagtccctcgctgagctgctctgttttcgtccaggacgtcaaacttgagctccaggctcttctctagctggtggatcttctccgagagctttcccagcatggagcgcaggaaggcgatctccttgtcctttctggccagagccacgtgcatctcgtggaagcggtcatccgtctgctgcagaaactccttcaggccctcgaagcggcaagtctccaggtgggtctcgtaagtgtcctggttcccgatgaacgtgcacccgtacttggagtgggggcatttgatgtgctcgcacttccttgaggtgggcctccaggttcatcctgagcagcggggggcagctggggttgttgggacaccgcacaggcctgtagtcacagctgccctcgtggtccttccgggcgctgagcttgatggtgaaggggcaccctcgggggtccacctcaaagatggggggcttcccgctgcccgctacccggcagccatgccggcagtggatgaagagctccccgatctgctcggccaccgcgatgttgttcaccaccacggtcagtttgacgttgtccacgggacacttctctgacttcaaggcgcatctcctacagaacgtgtgcccacacgtggtgatcacggggtctttgaagacgctgcagcagagctgacagcacagcttcaccgagggctgctccgcaaacaccagtggctccggctcctcctcctcctcgggcagtgagaatgtggagcgcagagacatgctggactctgagtgcagggagcggacagagatggcggagtcggagcggcggggagtgctgatggggggcatgctgtcctgcagtgctgcttgtaggtgctggtcccgtcagcttttgtgatggtggtgacggctgaaaaggcgggtccgaaggtcgtttccattctggtccctgtggtgacgtccctcgtgccgaattcgccacgcaggcggggtggta

SEQ ID NO: 323251 - DNA, 1093 bp, Homo Sapiens
  misc_feature (342)..(379): n is a, c, g, or t
  misc_feature (561)..(570): n is a, c, g, or t
ttattccacggaatgggtttgttgggggtggtggtccccaggggccaaaaggaacaatgcccccgggggcccccgttaagggtatcctgtaaccaaaggagggggctttcagccctgaaataagggtgaaagaaggtacccacattttaccttacgggagatataattaacctttcaaaggcttttataaagtgcactacatgcatatgagcaaagcaaaagtactagagaattgcctaggaaccccccatacacgggttggctttatcaggaaaagcactaagaataatgtttttttagcctaaaacccctctttctacctttagaaatggtttgctgaannnnnnnnnnnnnnnnnnnnnnnnnnnnnnnnnnnnnnaacacgtaaaggatggaacctaatcctcttcccgagacgcctcctttgtgttaatgcctattcttacaacagagaaacaagtacattaatataaaaacgagttgattattggggtataaaatcctctatcatctgtagcacaaccctccttcccccaccgctcagggttatgcaaatactannnnnnnnnnctctctctctcttttaaagacagtttttgggtaatctttttcttttgcttaagtcagagatggaagggggaaagagcaaaggaaaaaacaaccaacaacaaggagaatgaagctttcccttctggtatcaaaatgctccggagaggagggactgtcagtggagcacctggggccggctccgccctcgctgcgggtggcggtggcgcccgcctgcctggcgccctcagatgtccacgtcccgcacgtcggtgggtgtgcaagccaggtccacctactcctccttctcttcctgctcctcggcggccttggggtccatgttctgctgggcctggcgcaggcttgactccagcagggcttcgatctgctcctggcaggcccggaggcagtctgggtcacacttgatcactctggagaggaagcgtgtgaggcggtagtaggacaggaagttgttggggctcctcaggttcaggccttgcactgcggccaccacgctccccttcgtgctgaattcgccacccaggcc

SEQ ID NO: 323252 - DNA, 970 bp, Homo Sapiens
tttttccccccaggaaaggttccactggggggggcccgtggaacctcccttctggggggttctcccaccatgtaggggatcattcaccccaagtccgggagaaggggttccccaggggttcggtaaaggggcaggttttttctttgtcccacctccccccttgaatggagtccagggtgatgttgaagagcactttgaggatctccatggcccgctcagtctcttgggaaggaaggagcgtgggtgggttcccttcaggagtcacccccagcgtcagctccagtgtgtcagttagcaggcgcactcctttcagctcctgaaacagctgctggcgcacatcggtgcggagtgccgttagcaggaagaggagccgcaagtcaaagaactggacatcgtgggggaagctcctctcacggtacagccccacacgctctgtgagcttcaccactaggcgggcctctgctgccagcatctgtgccacagggctgctgagcacgaggttgcacaggcacttgagggactccagtacaacatccatgtctgcggactctgggacggacccctcagagacagagatgtcagcatagcaggctagtgcctgcaggctctggcggctggtgaacgggtccaggcagttgcggtcccgggacaggattcggacactctgcagccagatgacacggtgggagggtggcaagccctgttccaggacggagaccagcagctccgccagtctcttccggtcctcctgttgggcatcatcaaacgtgaagctctgggagtgctcctggttgtatgaccgcagagcttccataatcacatcctcctcacccgtctccacggcttctgcaaccgcccggggctccatggcgcgccggggaaggcgggacgggcccttcctcagccgttccgggccgcagttcgccggccccgccctcgtccgaattcgccacccaggcctcgctacctt

SEQ ID NO: 323253 - DNA, 1114 bp, Homo Sapiens
ggggggaggggtttaaattattatgttgataagcaagataagtgccaaagggtagataagagtgaaagcattgggaagcctggcagagtgcagtcagcaggtcagttcctggcggttcattgagcagcttggcccaaagatgtaagtgaagtccctcctggtggagggatgagagcagctccagttactcggccttcatgacacaggaagttgaaggtggcacaggcattgggcgtgtcctgcacttccacagcaatgccccgctgcctcatggcttgaagcacctgggactgcagcctctcggtccggtctccagtccccaccaccacgatctctatccggggctccagcaaccagaagagggaaaagctgtcttcggtgatgtcctggtgggatcccacgttccactgcaccaccgagtgcgggagcagagcgcaggggccgagcacgcggtttccgtttatcatgaagccgcggctgttgtagctgtcgatgtacattgcctgagcggcctcgcgttgcagcagagagatgcgcgtccgctgatacagctcgtcatccgccggcgagagccgatgccctcgccgcggggcccagggaagctcaacgggcggacagcgcagcgagggtcgcgctcggtacaagctacgtagcgcgagagcggtggccatggctgaccaacgcgcggcgaagtcgtcaccggcgccgttagtccccgggttgggagggccctgcggagcctgacccagcgtggctgcagcgccccctgcgtcccggagggcaccgcacagctcgaccggcccagcaggcgagtgtcctcagtcttaggaggccgagttccccgacctccggcgcagctccagtgtcagcacctgccgccctccccgccccgggcccttgcccatagtcccgggggagtggaacacctggcagcgtggccaccctcagggcgttgcctgggccgcagccgcggcctggcccccgggctctcagctattaagccgcgctcccggggcggggcgaccgcccacctggtcgcgtcccgaacacctggccaggcggtgggtgccagacttccctcgtgccgaattcgccacccaggcctcgcgtcctt

SEQ ID NO: 323254 - DNA, 838 bp, Homo Sapiens
  misc_feature (97)..(97): n is a, c, g, or t
  misc_feature (100)..(100): n is a, c, g, or t
  misc_feature (121)..(122): n is a, c, g, or t
gtatgacccatgtttccctttacctaccgggggcccgccgcgcccaaccgaaggttttaagaaagcttttgaagggccgaggcggcccgacaaggtnttnccactcttggtttctcctccnnggggagaagtgtataaattattatgttgataagcaagataagtgccaaagggtagataagagtgaaagcattgggaagcctggcagagtgcagtcagcaggtcagttcctggcggttcattgagcagcttggcccaaagatgtaagtgaagtccctcctggtggagggatgagagcagctccagttactcggccttcatgacacaggaagttgaaggtggcacaggcattgggcgtgtcctgcacttccacagcaatgccccgctgcctcatggcttgaagcacctgggactgcagcctctcggtccggtctccagtccccaccaccacgatctctatccggggctccagcaaccagaagagggaaaagctgtcttcggtgatgtcctggtgggatcccacgttccactgcaccaccgagtgcgggagcagagcgcaggggccgagcacgcggtttccgtttatcatgaagccgcggctgttgtagctgtcgatgtacattgcctgagcggcctcgcgttgcagcagagagatgcgcgtccgctgatacagctcgtcatccgccggcgagagccgatgccctcgccgcggggcctttactgagctgcttgggtctcagttcctctcagttgcgccctcaggctggaggtgatgggtgtagacgtgggagagccgaggctggtggccatctccctcgtgccgaattcgccacccagc

SEQ ID NO: 323255 - DNA, 816 bp, Homo Sapiens
  misc_feature (534)..(602): n is a, c, g, or t
acgaagacatagaggatagggatggtcaacttggccttggtgaagtggcgggccacccggtacactgtctcgggcacatattccagcaccagatttaggtaaagctcgtcttttttctcgccactggagtagaaaaagtatctcagcctcgcaatattgcagtggtccagcttacgcatgatctgcagctctcggttcttgaacctcttgtcctggagaaccttcttgatggcgactagttccctggtctctgccagccgtgcctggtacacgaccccaaatgagccattgccaatcactttgatgtccgtgtaagccacttcttgggagcgctctgggccttggcctagagtggctacgactgtggtcaccttcccgctgtcacggcccagcttcaccccgggcggcgggaagctagtgcctgcgccggggcctccgctgcctcctccgccgctgccgccgggtccacccccggagctcgaggccccgacgcccccacccatggccccgacagatgcctttccgccgccggtnnnnnnnnnnnnnnnnnnnnnnnnnnnnnnnnnnnnnnnnnnnnnnnnnnnnnnnnnnnnnnnnnnnnngaacgagctagtccgcgccctgcccgagcccccagggccgcctcccgaaggcccgccgccgctcatggcgccgagcacaggcccaggctgcggggctcgggctgcccgggctgccccagccgccgccgctgccgccgcctcccccgggccctgcctcttccaggccgcgccgctctggcttgggccctcgtgccgaattcgccacccaggcccc

SEQ ID NO: 323256 - DNA, 950 bp, Homo Sapiens
acgcaggtccatcaaaggagcctgtgcgcacaggcctctagtggggagagccttgagggatgggggtgtactccagcaggctagagcagagcgcgatggccctctggcggcgttcgagatttgaacacctttgtcccaggggtgagctttaatctgagggaacttgaactccgtgtagttggggttcatctctcggatttgttcccgggttggtgttcccagcaccttgatgatctccaccagctggtccaccccactgtccccagggaagatgggctggcccaagaggagctctgccagtacacagccagctgaccaaacatcgatggatgaggtgtaatcagtggctccaaagatgagctctggggcccggtagtagcgagaacagatgtaggagacattgggctcccctcggaccaactgctttgcactgccaaaatcgcagagcttgaggacagcagtgtcagggtccaccagcaggttctggggcttgatgtcgcggtgacacacgccctgggagtggatgtaggccaagctgcggaagagctggtacatgtacaccttgacatagaggatagggatggtcaacttggccttggtgaagtggcgggccacccggtacactgtctcgggcacatattccagcaccagatttaggtaaagctcgtctttcttctcgccactggagtagaaaaagtatctcagcctcacaatattgcagtggtccagcttacgcatgatctgcagctctcggttcttgaacctcttgtcctggagaaccttcttgatggcgactagttccctggtctctgccagccgtgcctggtacacgaccccaaatgagccattgccaatcactttgatgtccgtgtaagccacttcttgggagcgctccctcgtgccgaattcgccacccaggcgggaagaaagtcccttgaggaatctttatg

SEQ ID NO: 323257 - DNA, 954 bp, Homo Sapiens
  misc_feature (147)..(156): n is a, c, g, or t
gaaccgtaacccgtggacaataaggggtaaggggacaaaggctgagaccggagctttcgcctagggtatgggaagcctgggggtccccttggactccagggaccttgttcccaggccgtttccacaacagagaattcgttttcaccnnnnnnnnnntttaggctccttccccgcagatccagccgctcagcacatggccgtagcattcagagggtagagggacatcaaacccgcagatcttgcggtaccagagctcagttgggtaggtgagggtgggctatccgtttcgtcctcccacactaaactgtatgtctgttgcacttcagggcccccagaagggcttcctcgaattccagaaagatcttgtcggtggtgccaatgctcagtcgttggattggcagccaccttctctgtgtggcaggctctggccggaatgaaactggtgtactgcctctttagcacacctagcgacacggtcacaatcacatggtccgccgggatcagctcacagtcctcgcactcctaccaccaccgaccactgctcatcctcatcccacctgcccccccggggctcctctccaccctggccaccctccccagtgtcgtgattgtggtcgccctcaccccggggctcaatctcagggcctctggggcgggctgaggcctggtcccagtgaatgcagcggacaggtttccctagctggatgacgtgggcagggatgccctccgccagcagctccacaacccgcatgaagcccgaggggatgatgtggtgagcgccggggatctcggtccactccccgaaggcgctcagggacacctcgtccatgctgtgtgagctgctctcacagctctccaccttcaggtactgctggatcatggcgagcttcaggcgcttggtagcctctgggtcgtcagggcctcgtgccgaattcgccacccaggcctcgctac

SEQ ID NO: 323258 - DNA, 1003 bp, Homo Sapiens
gggaaggggtcaccttttaaaaatcgggtttccggcccccaaaaaaaagggctgggcccggggagaaggaaaataaatttttagggtgaaggaacccgcgggggccgaagggcccatggtttccatggggggccggaagagaagcagaaaaaactttcaggtttttttcatgcattcctatagacccccagaaaggggtgggataagaaagctcagctgggaggccaagaaagagacctcaagagattcgtttatgactgtttctgagaaagcttcctggcatggccatgagtggccttccgggaagttctgtaaaaaggaaagcacagaaaacagggaaagaactctcccctaccacgtccctctctgcctgtttgtgtcctcgggagactccaagcggtggtaaagcaccaacagggctcttcttggagcaagagaaagaaaagactccggggtgaagtaagttctcccaggaaccccacagcaaaccgtgaccttgaacacagaatggcaaggtcaagtcatttacaagtccacattcaaatccaaatttcccacctgcaaaattcttcaccttttctccaagtcccttaattggagttcacatttcccaccttcaccaagccaccgaatcggtgggaaaaaggggcaatgccaagccacccaccaccaaacttttacattcttctcccctctggaatttctttgcacagcaattgtagcaccacttactaagctcctccaccagaaaataagaaaatgtatgcgtgtcgttagttttcaagtattgttataaagccatcgcgattcctacccctgagccctccttaaacaatccaagctcacgacgcccccaagggctaagtgaggtacaagtcgatgcaagtagctgccatagttctcccagtttatcccaggtccttgggcttggatggcccgggaaattctcatgccccacggaagcacccctcgtgccgaattcgccacccaggcctcgctactt

SEQ ID NO: 323259 - DNA, 1179 bp, Homo Sapiens
cagcagacattttaattatgaaatcctataaatcaggaccaccacaatttcagacactccgttgcgaagtgtacatcaatagctacatctggaggatgaacaagccattgaatcttttaaaaattggtttagctaccttaaagtttgggggtggcaccttacaaaagcgccgtcaagtttcatacagccagcggttcttctctgggagagtcacattttaaaaccggtttcagacacaaaagaagggctggcacgggaggaggaaataaattgtgagggtgaggagccgccgaggcggaggcccatggctccatggagggccagaagagagcagaaaaacgtccagggtctctcatgcattcctatagacaccagaaaggggtggaataagaaagctcagctgggagggccaagaaagagactcaagagatcgtttatgactgtttctgagaaagctcctggcatggccatgagtggccttccgggagtcctgtaaaaaggaaagcacagaaaacaggaaagaactctccctacacgtccctctctgcctgtttgtgtcctcgggagactccaagcggtggtaaagcaccaacagggctcttcttggagcaagagaaagaaaagactccggggtgagtaagctctcccaggaaccccacagcaaaccgtgaccttgaacacagatggcaaggtcaagtcatttacaagtccacattcaaatccaaatctcccacctgcaaaattcttcacctctctccagtcccttaattggagttcacatctcccaccttcaccagccaccgaatcggtgggaaaaaggggcaatgccaagccacccaccaccaaacttttacattcttctcccctctggaatttctttgcacagcaattgtagcaccacttactaagctcctccaccagaaaataagaaaatgtatgcgtgtcgttagttttcaagtattgttataaagccatcgcgattcctacccctgagccctccttaaacaatccaagctcacgacgcccccaagggctaagtgaggtacaagtcgatgcaagtagctgccatagttctcccagtttatcccaggtccttgggcttggatggcccgggaaattctcatgccccacggaagcacccctcgtgccgaattcgccacccaggcctcgctacctagg

SEQ ID NO: 323260 - DNA, 976 bp, Homo Sapiens
gggagagtcccatttttaaacccgggtttcggcccccaaagaaagggcttgccacggagggaggaaataaattgtgagggtgaggagccccccgagcccgagggcacatggctccatgaaggcccagaagggagcagaaaaacggtcccgggtctctcatgcattcctatagacaccagaaagggtggaataagaaagctcagctgggaggacaagaaagagactcaagagatcgtttatgactgtttctgagaaagctcctggcatggccatgagtggccttccgggagtcctgtaaaaaggaaagcacagaaaacaggaaagaactctccctacacgtccctctctgcctgtttgtgtcctcgggagactccaagcggtggtaaagcaccaacagggctcttcttggagcaagagaaagaaaagactccggggtgagtaagctctcccaggaaccccacagcaaaaccgtgaccttgaacacagatggcaaggtcaagtcatttacaagtccacattcaaatccaaatctcccacctgcaaaattcttcacctctctccagtcccttaattggagttcacatctcccaccttcaccagccaccgaatcggtgggaaaaaggggcaatgccaagccacccaccaccaaacttttacattcttctcccctctggaatttctttgcacagcaattgtagcaccacttactaagctcctccaccagaaaataagaaaatgtatgcgtgtcgttagttttcaagtattgttataaagccatcgcgattcctacccctgagccctccttaaacaatccaagctcacgacgcccccaagggctaagtgaggtacaagtcgatgcaagtagctgccatagttctcccagtttatcccaggtccttgggcttggatggcccgggaaattctcatgccccacggaagcacccctcgtgccgaattcgccacccaggcctcgcta

SEQ ID NO: 323261 - DNA, 1256 bp, Homo Sapiens
  misc_feature (11)..(11): n is a, c, g, or t
  misc_feature (230)..(230): n is a, c, g, or t
  misc_feature (304)..(304): n is a, c, g, or t
ggaagatagcngagtgagagtagacgagagtacgtcgtgacacgaagagaaagagatagctagtacgcagatcgctcttgtacaggtcgttacggatgtggtgtgtgtcttttaggagatagaagagtcaaatgggggcacgtgtgtgaaggtggactttcgtagaattgtaaggtggcaaggagcgcaacgaatatgtgagaaattcgcgtcggagtacaactgtcagnaacggctatagtgtaagaacgcggtcggccgcaggcgaagtgatatagcatcatgctatgattgttgcagtggngataagacgctggaaggggagggaacaatgggtgtgtcttgtcacgatgtaggagacatagagtctaacgggacaatgagggcgacaaggaattccccctcctggggaggtgctctgagtggtcttcgtaagggtgtctagaacgattaagtgggccccgggtggaccccttttcataatagcatgagagttctgggcggcaaaagacgtggacaacagttttcccggttgggaaaattcgttccaggagggaaaatacaggccacacgtttgcccggacaggcgggacgggggtcacagacgctggggccaccaggggaagagccggccccaatagcctttcgccggaggtataccgccagcctgtgggaggtggagaccatctccattcatctatttatttatcatagcagctaactttaaaaataacaatatgttaatctaatttctcttctggaaaagtttttacattatactcttttcccttttagaaagaatttccatttccattttaacaaaaatcaagtcatccaaggacagagtgagccaccggcactctcagaaaccctcctccagggtggcctggggtcagaacggagcggcaaccccggccagacagggggtatccagagggcccaggacacccaccctgacaatggcgccgggcaggcaccagagccgcagcagactcaggtgcggggtttgacgcccacccacaaggatgcacagtgaggcaagctcaggacaggctggggcgaggggacgcgcagcctttctgtctcaacagtgagcaaaaacagggctccagggaacaaatgcccaaaaacacgaagcagggcttccaggatcagcatccacatgtgataaatgccactggaaccacagcctgggatggggactggcatcaagatcaacccctcgtgccgaattcgccacccaggcctcgctccgt

SEQ ID NO: 323262 - DNA, 1371 bp, Homo Sapiens
  misc_feature (29)..(29): n is a, c, g, or t
ccacccctgggttcagggccgttatgtcngtgaaaggaagaatctccgtccattgtttgccagatgtagatttggacatccggggcccccaaggagccaggtagttaccactcggtccaaagatcagtgactttcctccaaagttgttatccagctgcaaagtctaaaagttcttaagctgcggcagatcccagagctggacagaggagtcatcagccgctgtagccaggtagtaaccattctcagagaaggcgatgctagtgatggggcccgagtggccaggaaagttggccacattagtacgttctttcaagtcccaagatcttgatctgagagtcccatggttcctgttccaaagatgagtccgtcagggtggaactgtgcacaggtgagagagcagccggaggtctcatctgtcaccttggtgagcacacgccctgtctggatgtcagagaaagcccagtactgatcatcggaggagctcaggagatagtcgccagtggcatgaaggctgaggcctgtcacagcactctcatgggcccgaaccacctgtacacaagaggcattggggaccgaccaaatcctgatagtggcatcgggggaagcagaaaacaccaggtcctgggaagggtgaaacaccacgctggtgaccttcttggtatggcctttgagggtagccaggatttgttcagaacttttgtcaaacacaacgacatttttatccgccccaccagtgaggatcttgttggtgtcggacgggcagaggtccagggccaggatcccaggaatgctggcactgtgcaaccccacgtgggatgccacctgccggtatttgctgagctcttctggcttcaccagctcctcaggcacagtcttccctctcttcttgcgctccgtggttagcacagtggctttgtcttgaagcttctgaataatctctggggtcattcccaccagctcacccaaatccattggctcacccgcacccacaacacttggttgggaacttggcacagcctggggcacaatgaggccagcctgtggtttcagggtagccagagcttctcgggcagcagtgacttccttggtgagacgggcaatgacacggcaggcggaatcgtgctggtacagagcgtgtgacagctcttggcgtgttgtctgcagctgctgtcgcagagtgaacctgtgcagcatgactgcattcccactcatcctgcaaagctttcagaatggccgggatgctggtggctgagggaggcttggccggaattgggtgagcaactttgatgtcgatgagctgctcctcgaaaaagcctggttgttaatggggtcggtaccattctccgcaatgtacttctcgatgagccgccg

SEQ ID NO: 323263 - DNA, 915 bp, Homo Sapiens
  misc_feature (32)..(32): n is a, c, g, or t
ttctttacacacccatgcacaccttttccttntgtgatgatgcacttcaccctggtggggtaaaaacccgtctttcctggaccctcagggaattctgcatggagaaggttctggagcacttgattgaaccgtttcttttgtgcattttcttccaagactttttccaggaagatgcgtatgtcattgatctgagtgtttgctggcagaaggttgaggggccttggtggtgtccagtttgctgtggtgtagctggaggacctgcagagcggcctggaggttggcttttggctccagtagttccagcttgattggccccaggcagtgaatgctggggggcgacaggtacatccgaagcagggacagatacacatctttgttgccatctttgtttcggtcatagtgtttgtggcagtactcctcagccatccttgtatccttcaagatgtggacataaatgaaaagagcttgttcatgtttccccatgcgccccaacaggagagctcgttcttctaagaggccatcaaagggaaaatcacagatgagccggcctggatcatagtagctggaaatctccaagaacatgaggagcttttgccggtattctcccagctcaccctcttcctctccagctgggactggggttttgcctgcagggaaggacaggagatactccttcatcagaccttgcaccttctcacagtatagctggatcaggcagttgtggaaccgagagcctgtctcctcccaaacatggatgatgtgttccagataaggaatagccagacccttaaaattctctattaagaagccgaggactcgatcacgtggcagagactccacttccgggagatcttcagtaaatatcttcaggccatcttctgggaagtctccctcgtgccgaattcgccacccagg

SEQ ID NO: 323264 - DNA, 1121 bp, Homo Sapiens
  misc_feature (334)..(334): n is a, c, g, or t
ggaaatgggggcaagagctttttatggtgccaaaacaagttgtttctcagggagtgtcctctatgcaaacaataacaacttttttccaaagcattttcccaaaaaagggggacaggtccttccccagggggggaattgttcctctcgcccctcgttttcgggggaagagggggcgctattcactagtccgggatggaaggcgcactgggtccttcagttgttcggcagctccaaaaagccccagctttccttcatacctcaaacttgccatctccctaagacctaagctccccctgacctcacctgggtggaggagaaagcacttccaatcctnctctgactcaagatcctcctagctggagggcatggcagagggcatgatccaggcctatctcacccctcccctggaaaacagaacctctgaccccaaacctaatcccctggccctgcccctttcggatccatcagatctctgacaactcccgcaatccctgaggctggggtgttgcggggggaagcttaaggtacctcagcccaggttccatccagactcaaactttgccccttcaaaccccaggggactcttgaagttaggccaagagtcctttcatttaccacctctgcaaagtgcagcttgttttgtttccactctttaagggggctgagtttgggtgtccaaagaatggacttgggcctgccttccacctccaccccctctcatccataaatcggtggaggccctcgaaaggcgacttgtttggtctgattttattgatttcttccaccttctattactttccctgggacagtgtctagccccttccccaggcaaagtaagcactttccaggagaggaggtccctcagccctacccgtcctaagggaagtaagttgggggagggggctgattaatcaaggttgggggaaatctttctcaccggccagaccttacactcggaaagcaaacaaggaaaaaacgggaactccaaaactggacaaaagggaaaggtcggcggctgaggctgaagatctcaccaattaagggtcacctgcacttgagggggcctagaaaggggacaggaagggggtgtcttcctcttacccaagttccccgccacccag

SEQ ID NO: 323265 - DNA, 969 bp, Homo Sapiens
  misc_feature (90)..(90): n is a, c, g, or t
  misc_feature (260)..(260): n is a, c, g, or t
ctagggtcggggtccatcttctgggcctttctcttaatctttggggattctagtggtttctttaacctgccctccataggccagaacctntaccttattatatacacccattgtctttctgttctcccggactcacataggctaacccttttcctccagctgagaatggagtagctccccttgaaaaaaccatatttatattcctcccaggaatatagttccgagttttccaggaaactcttaatgtgatgtctagtcanagatgacgttaggttacagaatgacagaatgggggtcagatgtttcttgatgctagtacatgcttgctggaaggcagttatgagcctaatttgcagggtgagtgatgaaaccgttcagacatgcacttttgcccacttcatggttctttagcaccaactactttccaggagaatttctctaatcatccggctgatgtgtggttgtgattatttattacagagcctcatccattgtaacatcacctccgtagtcaaggtatgtgatcaatatatgtgcgaaatgcattaacatgtagtaacttgaaatttggcaactcaggagaattgtgcccatccactgtagaagcaggattctttgaaatcgaaccacacttagttgagaggccatgtcgtggtcttgtaattgtcttgttctgtttttcatctgctgcagtcaggatctgctccaggcctgccaggcctgattgcggtcaattctacttcagagaacatttcagtccatggggttgcctcttccttcatttgtaaaatgtgtacctttggccttctcttgtagatgacacagctaattctgaaacatatggaatcaaggtaaggccttcttcaaaaaagtgtggagcaacatggcctccctgcctggcggtcagctaactcagggactggggacacagagtccatctggctcctcgtgccgaattcgccacccagc

SEQ ID NO: 323266 - DNA, 957 bp, Homo Sapiens
  misc_feature (118)..(142): n is a, c, g, or t
  misc_feature (352)..(614): n is a, c, g, or t
  misc_feature (623)..(642): n is a, c, g, or t
tcaggggcgggcgccccgtcttccggggcgcggggccgaggggcccgcgggtgaggcgcggcccggtacccccaagctcggtgggaggggggcttgtggcggatggttttgccctgtnnnnnnnnnnnnnnnnnnnnnnnnnccacccagatgggagggctgggggtagcacagaggggcccccgggaaaggggactgccccgcagcccggaatgcatgagcagccctgggccccttccgtgtaaaacctgctccgaggccagaaagcccacgcaaggatgtttccacgttcatctcccttacggagtgtgacccttgggaaagaaacaggaagagcaggcaggacgcggtnnnnnnnnnnnnnnnnnnnnnnnnnnnnnnnnnnnnnnnnnnnnnnnnnnnnnnnnnnnnnnnnnnnnnnnnnnnnnnnnnnnnnnnnnnnnnnnnnnnnnnnnnnnnnnnnnnnnnnnnnnnnnnnnnnnnnnnnnnnnnnnnnnnnnnnnnnnnnnnnnnnnnnnnnnnnnnnnnnnnnnnnnnnnnnnnnnnnnnnnnnnnnnnnnnnnnnnnnnnnnnnnnnnnnnnnnnnnnnnnnnnnnnnnnnnnnnnnnnnnnnntccatctcnnnnnnnnnnnnnnnnnnnngaaaagaaactggagagcagaaaaacagatgctctgcagcccagcttgggggcagctgaacgagtcagtcagggtcccacctgttgccggggtcagaggccatcagcccggggctcacaccctcaccgcagacacttctcggggcagagcctgaagccaggattcaatgggagaccttcctaccctctcccccaccctggggtgtgccccaggctcctggtcccaggtgaaggaggagtccctggtgtggaggggctctggctgggaggggctggggctctgcctcctgccctcgtgccgaattcgccacccagc

SEQ ID NO: 323267 - DNA, 950 bp, Homo Sapiens
  misc_feature (54)..(54): n is a, c, g, or t
  misc_feature (68)..(69): n is a, c, g, or t
  misc_feature (119)..(119): n is a, c, g, or t
gccttccctttttttacgaaaaagggatggccaaaagacctaaacagggacctnccaggacgccagannccagggattgcaaccagctggaacttcagtccccggttccaactcgctcnccatgaagcccgcttctggccttcgagcacccagcaagcccttctggatttctccatcaaattgcaaaaatgatcatcaaagctactgaaatggaaggtggtgtttaaaacttaacactgggttttcttaaaatgtaacactgcttttcttatggcatggataaggcactgtgagaaagctgcctccactcccagcacacacgtacacgtgcacacagcagaggctagctgatgtggccacaaggcacaaagaatagatccttctgatcagttctggttctggaactggttggcgagccagttcaggccttcgtaaagcccatgtccagtagtggcacaagtagcctgaatgtgccagtttctgtagcggagggaatggaggccgagcttgtccgttatctctgccgcgttcatagtattagggagatcctggagaaaaaagtcacgtagcggctgatggctatcttcaagtagctgaaagtctatgatgtaaagaggatttaagcgttttatagagctctgtgaggtggactgaagatcagtggtgaaaactacagaagtcagcctagcagagtgtcagcagatgaagatgcaatggctgcctcagaaggcactcctgtcactggagatacttgtttgtgcacaacttcagccacaattcatggggaccctgcagaagagacccttaagaggcatccaagtagcattcatagtgtcaggatataaagacaatactcagaaatgagcaagaagtcttagaaattccctcggttaccaagtataagcaggtaggaaaatcttttgtttcgagcgccacccaggcctcgctac

SEQ ID NO: 323268 - DNA, 1107 bp, Homo Sapiens
  misc_feature (951)..(959): n is a, c, g, or t
  misc_feature (978)..(987): n is a, c, g, or t
ttccttttgccaccgccactagtcacccacccaaggccctgggtggggcccggcccgacccgggcgcgcgcgcggcggaggacgaggaagagttgtggcgaggcatgatcctgccccgtggccgcggccgtctcgtaggtgtcccaccggccttccgggttccagcgccaggcctggtgcctgccccaggaggatgagcatttgcattgcctgcaccttatcgtgcccttccacctgctgaagcagctgtgcctgccgctcttgtgaactgcgaacttccccttacctcctctctctggctcgggagctggctcggccccaggaggctcccgggagcgcctgtcagtgcaatgccgccccatgtggtgctcaccttccggcgcctgggctgcgccttggcctcctgccgggtggcgcctgctgagacacagaggaagtggtcttctgcacacagccccagtggcccgctcggacaggagcgccccggtgttcacccgtgccctggcctttggggacagaatcgccctggttgaccagcacggctgcccacacgtacagggagctttattacccgcagccttcgcctggtcccgggagatctgcaggcctctgccggtcgtgtctccgcgggaccctcccggggagggagaggggtccccctttccctatggggcctaacggacggccctcccttacgttccgtggggccccagtgggggcccttccatgggaatgaaacccgggccgcggggttggggccaaataaacccccccttcttaacaggggaaaaggcattcccccgcggggggccccccaaccttgggagagtaatggttccattgcccggcggaaccttccccacagaaggccttcctgctggggtgccccctctgcccccgcgccccaagagaagctaacccctggggaaggccttcctctgagagcccccnnnnnnnnncccaacggagaaaaccttnnnnnnnnnnttcccgcctctggcgctgtccggcgattcaagacaccccgcgcccttttttaacaccttgtgggagcccgctctaaaagcgcaaacccccgcgcacacaaagggtttcccggcgccctcc

SEQ ID NO: 323269 - DNA, 1173 bp, Homo Sapiens
  misc_feature (1129)..(1129): n is a, c, g, or t
ctttaaaaaaataaatatttataaacttaaggaagattcaaagaatcagggtatcttttcctccaaaaacacaaatgtcccgtgtaagtcaaaccaaggtgcgaccaccaacccatgaatgaagtcccctccccctgcagctacagggttgaggggcaggtgggcaggggagctgctctctctcctgccttcagtcccccttggtgatgaggtcctcaatgtaggcgtccagctcatcatctgtgttgatgtctatgtcctcctgcaccttttgcaggagtgccacgatgttggtcctcagcttctgcagcttctcctccgtctcgcggagcttcctctcggaggtgcgcaggctttcctcggaggccttggccggggagtcagcacggctctggtaggaattgcacaggttttggagccctacttcatattgcttgaagtactccttcagaggaaaagatattagctcatctgaattcatagcactcagctgcttcttggagatggggaaacttggaggcaggaagtaccgtaaacaattccggaggatctggacaagcagtcgatggtctcgtgattggtgctcagggcagtggtgtcaggctcaatgcggaggcattcggaagtggagggctctgcgacagctatggcctgctgggccacagggcccacctccgtccgtccccgccctcctgttgtgtatcaaggctctgatgttccggagaagggggtttcatcagccgcacatcctcactgcctttctccacccagcggtctcttggtgtcgtgtctgtgggcacgtagtcaaacttcaccttccaccgcaccacatgcttgcccacctccacggctgtgacacggcccgtgtaccactccctgttcacacgcacctccacgtgcagccctttatctttctgagctctcttgaggtcagccgagtcctcttccccagcactgtctgagagctcattcgagtccttcgttttcctccttcacaacaaatctgccccgcttgcacctctccttcctcctctcagcttcctcctcaacttcttcctcatcagaaactgcgacactccgcttccgactaggggtagccggggagagtttgatgggtgactctgtccgnacgcgtggtcgacgatatcccgggaattccggacctgtaccagc

SEQ ID NO: 323270 - DNA, 1032 bp, Homo Sapiens
gggggagggcccagtttcttcctgcaaggctggggtttcaaccccaccgccctccccagggggcccttttgacggtggccgcaagcccccagcctttttcccccaaggttagggcaacatccttgcccaggttccacgtgttactgggctcccgggcggcctgctttccaaggccacccgggcggacccctttctcagcccccaggggcctttccaggccccttttgttcaaagggaccggatgcttcacaccgctaagggctttatttcacagatcatggtggtgagtttggatttccagccctcaccacggttaagtcacacatttcccgacacctgctcatttctccagatctgaaacatctcaccccaacacatcctagttgttgtaaaccccaaatgaactttccagaagcaaaaacaataacagattcagagaaccctggtcacacctgctgagcaggtcccctctactctggttgcatatagaatgcttgtttgctcaaaagagaggcgctctcaacatcaaggcacaaagaaagacgtctccaggggcaaaatgatgacgaagtgaccagcggcctctgcgaggcccgaggcagagtcacgggggaggcgagttcagcctgacgggcattgggaggaagagccaaggacaggtctcccgctggggctcaggcgtcctcacgcgtacttctccaggaagttgatgtggaagtctttcaccttctgcagcaccgttttcagcttctccactggagggaggatagtcatcctgaagtggtaagtgccttccctctgcccaaagccactgccgggcacgacacagatgccagtctcctccaggagcttcatgcagtagaacatgtctggagccatttgatgggcctgagcagcctccacagctttggcaggaatgaagatccgagggaaggcgtacatggccccctgcaaggggttgcagtgaattcctgggacttggttaaacaggtcttccgcctcgtgccgaattcgccacccaggcctcgctac

SEQ ID NO: 323271 - DNA, 1129 bp, Homo Sapiens
  misc_feature (946)..(946): n is a, c, g, or t
aaggagcgaggcctgggtggcgaattcggcacgaggagacgtctttctttgtgccttgatgttgagagcgcctctcttttgagcaaacaagcattctatatgcaaccagagtagaggggacctgctcagcaggtgtgaccagggttctctgaatctgttattgtttttgcttctggaaagttcatttggggtttacaacaactaggatgtgttgggtgagatgtttcagatctggagaaatgagcaggtgtcgggaaatgtgtgacttaaccgtggtgagggctggaaatccaaactcaccaccatgatctgtgaaataaagcccttagcggtgtgaagcatccggtcctttgaacagaagggcctggaaggcccctggggctgagaaagggtccgcccggtggcctggaggcaggcgccgggagcgcagtagcacgtggactgggcaggatgttgcactagcttggggtagatgctgggggctgcggccacggtcagagggccccactgtgaggcgtgggtgtgagccaggctgcaggaggaactgggcctccgcttcccagcaacgcagccaggcctgagaattctgtgcgcccggcgggctttgggaaatgaggggttcccttgaacatgcgtaggctggaaccccgtctgagaggtctccctgaatttcagtgacacatagtgcagcccggcagtgtcccacttccgtggagagagccgctggaatggtgtggacccatcccgcgggtgaccggtgcctgttctcccctgaccgagcctgtgagcacatcgcccccctgctggcgacagcggggaaatgagggctgaaaatatcctccccacaagggcaatccccggggacctggccgagcagccaaggccctgtccttttcttgaatgggggcgagcttgaattctgggtcggttttcctaacctttttanggtgggtaaaaagtggcctgggcaagctgggctggccggggggaggaaatcagtcccgggggttggaaaggttcatttgccctggcttttcattggcgggagggggctttggcccttcccttggttaaacctttccggggttccccccttccccaagggttgggggagaatttctggaacctg

SEQ ID NO: 323272 - DNA, 1953 bp, Homo Sapiens
gtgagaacctagacgggaaaacagccacaggttgatctgcatctgttcctccccaacactccacacacaccagaacaggaatagccaggcaagcctctgggtgcccggtgatgcactgtctgaggcacagccccagcacgtgcttcctcagcacatgctacacacacagatctggacgaatgacagaaacttcacagatgtaacttccaagtgcgacctcaaatgacaactttctcaggtggtgcctggataggaaagggccccggaccagaatctgtagaaaacccaaccctatcatgatcagcattcctcccggacgttaacctcctagactagctgaccttatttattttgaaagcaaatcaagtgtatacagtctcttttttaaaaaactgtgtaaacgttgtaaagtttttaggggctgtttataatctgaagatttataaaaaattactggacttgttaggactataaatactaaccccgcctcccccatgaaaaaagcaattgttacaaaaatataaaaaatatactagctttctacgatttaaccttttcacccagaaacctcacgacccctgggactaatcctgggtttatatcccacacagcaagcacaagtgcaattttctccattttttaaggaagaaaaagttttagaacattcccttttgttatttgagattgtggctactttcttcataggggctgtgatgtcggtgggtaaggacagttgggagtttctgtttcctctgcacggacccggtgtggaaatcacagcatagaggctgctgcctcactcctcggcctcttctgctttctctccagcttctccaatcccattttgggacatgcggggtcccaggctcctgagcttccctaacttcccactggggaaggcagggaggatggggaagctcccagtgagggaggcgagggctaagcccgtagcaccgcagcctcgagtgtggtcggcccgcccagggctgctaatggcagagaagccgcatgctgggggatggcaccctcctgtactgggagaagcctgatgccacaggtcagagtctgcagcctgggaggggagccggaagctaacatgaaggcaaaacactccgcatgaaagcacggcaatgaacctccaaccacgactgactcctccacggcagccaagctgccaggcacttttaccacctaaaagctaggaaaccgaccagattcagctcgccaccattcaagaaaggacagggccttggctgctcggcaggtcccggggattgcccttgtggggaggatattttcagccctcatttccccgctgtcgccagcagggggcgatgtgctcacaggctcggtcaggggagaacaggcaccggtcacccgcgggatgggtccacaccattccagcggctctctccacggaagtgggacactgccgggctgcactatgtgtcactgaaattcagggagacctctcagacggggttccagcctacgcatgttcaagggaacccctcattcccaaagcccgccgggcgcacagaattctcaggcctggctgcgttgctgggaagcggaggcccagttcctcctgcagcctggctcacacccacgcctcacagtggggccctctgaccgtggccgcagcccccagcatctaccccaagctagtgcaacatcctgcccagtccacgtgctactgcgctcccggcgcctgcctccaggccaccgggcggaccctttctcagccccaggggccttccaggcccttctgttcaaaggaccggatgcttcacaccgctaagggctttatttcacagatcatggtggtgagtttggatttccagccctcaccacggttaagtcacacatttcccgacacctgctcatttctccagatctgaaacatctcacccaacacatcctagttgcctcgtgccgaattcgccacccagc

SEQ ID NO: 323273 - DNA, 1304 bp, Homo Sapiens
  misc_feature (180)..(188): n is a, c, g, or t
  misc_feature (219)..(229): n is a, c, g, or t
  misc_feature (298)..(298): n is a, c, g, or t
aacccggggctctaaccccgggaaaccccccctgggggcccattttcgccccaattttaggacaataaccgggggttttttccaaagggggcccccccaaggtttttaacttcccggggccctttccaggaaactttcttccgccaaatggtggaaggttagggtttaaaggtaaccaannnnnnnnncattttacccaaggttgaaaagccccacccnnnnnnnnnnncccaggtaatttttgaattcaagcccaaacaaaaaattattcctgggggacctttttctttaaagctanccattacggggcaccatacctattttcgttctaatttcctcatttcttatgcatcagcgcgctccactcagcgtaacccccaggattcaaataggaccgctggtttttaatttgtgaatattcttatttaaatacaatacaagctctacttcagatgtccaaacaaaaatcacacagtagtaaaactgctacaaaatggtactgtcaacaggctggaggtgggggtatgggtgccttctgtgtgtctcagtcacaccggggagttttgcttacctaattctgcttctgaaataagcaacatcaaaacagccaggtgtcaggaatgtgccatttaccgggtggtccccagactctgctgctccttcccagcattactaaggtttctctcccagattccccaccacccaccatacagctcccttcgtgggattgatgcaaggtaggccccatcttgaagagtgacctagaacagggtaccagggcctccagctggaggcagagagagccacccctcctcaagaaacacccttgggtgacagagacagcatgatattctaggcagtgctgcccagcccagactccacaaacaacccttctgaccttgcagaggcagtccagagctgaggggccagcttgagccagcttgcaatccctcgggagtttactgagggctttctgttgttactgatgaccacaattcctccttgtaaatgaccacactacgactccctgtaactcaaaaagcgggaaggaggcggggggaggtgggggacagattcataggtttttgttttcgaagataattccacatcgtgctactaatgggccgctggtaggattcctcttgccaccccacaggccactccaaagcaagttactatcaacacgtttccaactgtgcaggaggtttctagttaactgcaacaagcctgaaaatttggttacgtatgtaggtgcaaagctggttcatcagatccctcctcgtgccgaattcgccacccaggcc

SEQ ID NO: 323274 - DNA, 665 bp, Homo Sapiens
  misc_feature (175)..(175): n is a, c, g, or t
gtttattaggtgttgggttacggactctccacaagagtacaaaatgaagggcagagattaggggttgaaaaacgggcaggaaacacattgacagccgtcatccctggagaaaactgctcaataaaacggctccatatttatttctctgtccacggttcatactccacgattttanccaaggagtcgaggaagctagatactgtaagtgaaccggtgtgtctctggaggtaagcaggcttgctgatttcttgtttgataattcttttggtaattaccaatgtaactactaagagcttccagttcccactggagtggtgcacacatctcattactactaaaaccacaggaatgttccagggaaacagactatcatcactgagcgaggtggaatccagccaaaaccccaggctaacatccagatgcctgcagatcagctaaaatccttttaaaggacttggaatctccagatactagttttaagtcttttctgggaactgggagtttgtactggaggccacttaactatttcaaaaaatattcaccaaaataggtgtctctctgactgcaacggtttgagtcctcctcagccctcatatcctaggcttcggactgttgggaaagtcttatcttcctgacgaaagctcagcagcaacagaacctgttat

SEQ ID NO: 323275 - DNA, 933 bp, Homo Sapiens
ctcccccggggcaaaggaacctttctttctcttccctccctggggaatggcggggattcttttccttggggggccggggcaaccccctccccccaggggccaggctgagcagtgcccccatgggtgctgggacagagccatccccaggtccctgaggggacggtgcagggaactgacaaaactttgcccccggggccctcagggggtgaggtcccaggagtgtggtgggagtgggcagcagtgccaggggggacaccctcaggcctctgctagggccaggcctgcatgtgccaccgtatgcgacccgctgcccccaggacgggtgccccgactgtgatgctgcaagacccagggactcaggccctgtggtgccctaggggacaagctgtgtctacaggccaaccgcaagagggcaggcgctgcctggcccggggaggaggttggcaggcagcgcccagcccggcatgcagcccacacctgtctccatggcggatctcttgtctcttccgtccatcaaaggacacccatgctgtgttccttgcttcaggtgacagcatgatctgagggtcaagcagggagaggtgtgggcccccagctgtggggaggacgcttctaggcacccacccctgagtgctcgccagaggtcgaaggttgggcagctctgaccctgccttgcggacggtggagtgcacgtcctacaggcaccggcccagctcagcaccgccagagaccaacaatggcagaaagcccctcagacccgggccctgggcaccttgatggacagaactcgggcaccagcaagggaaggcttgcatctgagggggcacaggatggccctaggatgacgaggccgcgtctgaggctggagccagcatggcagagcggggtgctaggtcccggctttgtgttgcaccctcgtccgaattgccaccc

SEQ ID NO: 323276 - DNA, 1956 bp, Homo Sapiens
  misc_feature (821)..(821): n is a, c, g, or t
cccattgggtcgacagcgtttattgaaaggaaatcttgctttatccaggaattcactcacatggaggtagctgcaaggagaatgtctctttctcatgacaaccaaagcgaccaaaccataccctaaagcagagacgcaatggaataagtcaacgggcattgtagaacgacactcagaagcaggaaaaaccataaaagatacaggatgattgtctcttcagtattgcatttggccatgtatgtgtttttacataaaatatatgttttctttttaagctagctaaagaaaatactcttgatcggggttagttcttaaagcaaaaaacagaagaaaagtatgtatatataataaaattaaagaacgatagcatgttataccctggaaagggaccgtgggcactaatctgcacttttgttccaggtaatcccatggctctgagagtgagcacactgtcaaggtcactggggtgagatgagctgggacttgaaaacccttctcttaactttcagtctcaactcttcccactccactataccgcatgcgttgccaactccctcagagtgtaggatagcgcaattgtcaaaacgcataacagcctatttttagggtaatgatgcaagtgttttgaaaagtgacctgtgttctctttgcatgggcagttttgcttcttgtagccagccccatggctactggaaagaactggccagaatgaggggcagcttactttctcacaaaccaaaacagacacacactcccaaagttcttgggtgtgctgaccttccccagcagcgtcttctaggtatgagtgggctgaggcttcntctcagcaggcttacgtggcagatgtctaacgatgggagaagcagcagggaaattatgaacatattgagggtcaaagtgagctctagggaaccaggcttgttgcgtcctcagaaggacagacagagggctgagtacagaggtgctcaacctccatgtcgatttgattgtcatttatcaccccctttcctgacactgagctccaggaggggaggaatttttgcctgtttaattcactgctgtattctgtgtgccaaggactgtgcctgacacatcaccgatgcccaataaatatgtggtatatgaatgaatgactaaagggaggaatcggccccaccccacaataagcaggcagaggtgagaatcacccctgggctgtggtgaggatgacagtgaccctgtagatgtggaaggggcttggctgtctggctccagactcccacccttaaactgggctgaccactctgaaacctgccgggtgggctctgacctggcacaggtgggactccatggctactgtcatggagtcctctggccccacaggcccccaccctattgggatggttggggacactgctgaagcagctgaacactaccatctctgccacatatatgtcaccaactcacagggtcctctccctatgtcctgtcccatattctgacctgtggaagcccagctgtgactgggcctggcctgtgggcatgcctggggactgtcacattgtgaagtgacacaggaaggccaggagggagtccctggatatgtagcatcctcccgatgctatgctccctgaaattcctctccagccatgtggcctggcccccagacctcaaccactccctgccagcctgctgctggcgatgtcgctttgttccaggaagttggaaggagtcctccagtttgcacagacacgcctctgcctgacttctgtttctttcttcccttcctcgacataaccctgagatcctgctcaatccacctcttgcccacacatcccccagctttcaagaacttctctgtcttccttctcacactgggccccatacccacatctgcctatctcctctctcatctcccttcccccatgaccttaccagacaccctcgtgccgaattcgccacgcaggcggagggatc

SEQ ID NO: 323277 - DNA, 1779 bp, Homo Sapiens
gtgggttccttgtttggccctctaacttccctttttttgtgccccttttcagggctaatgattcgaggcgttcgggccccagcttttgtttcaaaacttcaatttccactttccatcggtccccaggggattaatgtatccagagaggtcccatgctctttcagcttccctaacttcccttcttgtgtttctcccgaaatttcctttgctgcttcatctaggtcgtcactgagggtcttcatcgtgggctccatgaccacatccttcgctgccaccatctgctcctcaatggccttttccttgaacttcattaaatagcttcacaactttgcggatgatccggttgaaaagtcccatctaactggcccgagggcagctcaatctccttttccagctggtccacagacttatgctgcaggccaatccccaagagaagagccgactgagccgcagacagggccaggtcccccagctggttcaggaaatagatgcgagagatggccgggatcatgtccatgatgagggtgatagtccaccatattccgtgaatacatctccagccgcttcaggtcataggggaggaagagtgcttccagctcctcccggctcagggcaggctgggctggcttccccatgttcctgttctgaatgatgttcagagccagggaaggagagaaggtactgaactggtaggagagcaaggctaggaaccgccgtcggaaatctttccagaaggctgcaagccagcctccctggtcagcctcatcctcatcagtgagcgtcttcagcatgatgcacgagtgctctccggtcaggtcattcggggtctgtctcagataaacaggaacaaatccagctcgtttccagaacttgaggagcctgggggtcaagccataggaaacacccaggtaatccaggcgttcggcaggcctctcattcaatttgaggagtaaaggaggcaggtccttccggggagtgatgacctcttccaacaagctgacagcctcgctgcttacggtgtgaatttcctgtggtgtctcaaggaccttttcctccagacaaggaaacctgccttcatagtacatctgcagcagctgcagagcacggctgccatagcccatcccttgataatctgggtgaacagcaatgcgaacgacccttccaccagacagaccaccaaagtctggatcttggaactgttctgacactgtccatggaatcaggtcccctgaagccttcttgcctcgagacagactgttcaagatggactggcgagaaatctccccttcaaggcacacctggataacagcaagcacttctggaagggcattctgggtggggggcacaggaggcagaaggcagaagagatggtgagcaggtgcatcggagagcatctggagatcattgggagagttcttgtagtgagaagccacgtagagggccataagccgttggaggaaaacttcagaggccttgtggtagcaaaagagggtatctctattaacatagtacagttcacaagcttcaggcaaggggcagcctgagactatccgagtgatgttgaggcaatccaggcacagcaagtcattcagccacttctccactgcatccccaggggcgtatcggattgactcctggagggaaacctcatgcagtgtccgcgctgatgccaatctggctgtcgtcgtggtcttattctcagcagtggtgctgacctggctctgggcgctctgttgacggagctgctgaattagcttgagggacagtgaccggccagtg

SEQ ID NO: 323278 - DNA, 990 bp, Homo Sapiens
  misc_feature (856)..(868): n is a, c, g, or t
aaagagcgaggcctgggtggcgaccgggcttatctggtgctgcgtgctgaccccatggccccgggggtgcagggctctctcctccacgtcccatggcgaggcggtggccagctggacctgctgggtgtgtccttagcctccctgaagaagcaggtcgacggcgagcggcgggagcggctgcttcaggaggcccagaagctttcagacaccctgcacagtctcaggtcgggggaggaggaggcagcccagcccttgggggcccctgaggaggagccgactgacggtcaagacgcctccagtcactgcctctgggtggatgagtttgcaccccgccactacacggagctgctcagtgatgacttcaccaaccgctgcctgctcaagtggctgaagttgtgggacctggtggtgtttggccacgagaggccttcccggaagcccaggcccagtgttgagccggcccgggtcagcaaggaggccacagccccaggcaagtggaagagccacgaacaggtgctggaggagatgctggaggctgggctggacccgagccagcgaccgaagcagaaggtggcactgctctgtgggcccccggggctggggaagaccaccctggcacacgtgattgcgcgtcacgcggggtactctgtggtggagatgaacgccagtgacgaccgtagcccggaggtcttccgcacacgcatcgaggcggccacccagatggagtccggtgctggggtgcctggcggggaaaccccactgccttggtcatcgaatgaagatcgacgggggcccccggtggccggccatcaacggtcctccttgagcatcctggaaccgcaaggggccccaaaannnnnnnnnnnnnccccaggggcccggctttgccctttccggagggggcacaaagggccccgggaaaaagggggggcctcccccctggtggcccattattcgcgtttgggaccgcacccacttcacacacgcccc

SEQ ID NO: 323279 - DNA, 947 bp, Homo Sapiens
  misc_feature (36)..(36): n is a, c, g, or t
  misc_feature (94)..(94): n is a, c, g, or t
aaagggaggtgccattcaggaatatttttattttanccagcccagtacaggcatgcatgttgaccagccagaatgggatgtgatctgtagacanctgtaatggtcatataggtataaaccagctgagtccagagccatgcctggaatctgaccctgcctattcccaagcccaacccttaagaccagctttccaccaaaggaccacccctgcagggcccttgtcttactcgtgtggtatctgaagtgcctaacacaggtccagacatagagttggaatttagtgaaggaatattagactaataaatggctggctgagaagacagtccctacttggcagggtccctgatctggaagtcagtgatggagggctctcctgcccttgtgaagcccccagactgacgggggaaatagagtctcgatctgatgagggactgagagttctgcagctgaagccagctcaggagcactcagatccagccacagggctcccaggcccctagcgggtaatgagataggaaagaaccgccatcagccctaacagggaaaggccatgtgtccttggtagaggcatggcctgtggcaggaagaaggccagctacagaggcacaagggacagagagagtgagatccaagagaacaaatgtctcagctccccagttttgtgagctcaagtcccagctctgaacattggggcctagcatggggcatgtgggggccagcaaggagctagtcttgcaaaagttgcacagaacttgctgggagactcccagtccttgagccatctccttcagtgatgccaaccggcacgttccttctgggcagaggctgcctggctgagggaccatcttcagggctccgcgccccccgccgataggagcgagtgctctcggagctgaatctgcctcgtgccgaattcgccacccaggctcgtacttaggacgtattcg

SEQ ID NO: 323280 - DNA, 1003 bp, Homo Sapiens
  misc_feature (248)..(384): n is a, c, g, or t
aggcgaggaggagacccgcagggaggacggggcgaggaaagtgcgtgtaagcaaggcggcgaggtcggagacgcgtgacgccgcaccagcggtaaatgggtgacgggggggagtaaggtgggtgcgcagcagggagaactctttcattttgtcccgggggttccaagcacattttttctttgctttcagcctttcggagtaagggtgggactcccaaggtgcacgcccccccaccgtacaggtgaccnnnnnnnnnnnnnnnnnnnnnnnnnnnnnnnnnnnnnnnnnnnnnnnnnnnnnnnnnnnnnnnnnnnnnnnnnnnnnnnnnnnnnnnnnnnnnnnnnnnnnnnnnnnnnnnnnnnnnnnnnnnnnnnnnnnnnnnnngcattaacccattctatcctcagactgatgctgtgaggctgctgtccttaccttgctgtactgagcagtgagaaaacttgcttgtaggtgaaagttaaaacctcaaggaggattcttcttgaaagccatcccagggtttttctatttggtgattcatgatcaatcttatgccccaagtccccacattccctctattttgagtcactcagtctcataagagcccctggtgcctttattttgcttcatttgaattctggattcagcgtgcatcagaaatgttctccctgagagctggaaagcatttttgtgatggctgggctggagggccattaagaaaataactttgcacaccaacaaaaaagactaaagtcttaattgctgatcaaaaagtcaacaggaaaggatgcaccactgcatatatggtgagggacgcattgccttggtcagggcacaggtcctttgtccctgagtcctgtttccttgtgtggctagagggcattttcacactctctgtccacaaaagacctcagggggaaccaaagagcagcatgagcagagggccatggtcatgggcattgactgggtgcctcgtgccgaattcgccacccaggcctcgctc

SEQ ID NO: 323281 - DNA, 731 bp, Homo Sapiens
  misc_feature (16)..(16): n is a, c, g, or t
  misc_feature (35)..(35): n is a, c, g, or t
cgacatgtttttggtntgcttctctgcccgtggcnaagaggggtttaaaaaggggcttgtttaattaattacatacaaggatgagtgccagtcaggtcgggggagttgctccacccacggaaagcacacgcctctcggatccgcctcccctgcatacgtctggaatccaggtcccagtgatcagcgactcctgggagagtggaggggtgggctgcaggtctctccaagcccctgtacactggagaggggcccagttatagagttctggaacccacagccctacctacccctgctccagacaggcccctgccagggctggggccaaccaagactcacaaaggaaaacggggccccagtcccccacccacccccacagactaaggcatctcactagcgctgccagaagagggtttgaggctagggacagagaacacagagagccgagggctggatggggcaggaccctccgagcccagctccagaagggcgtcccctgcctccctccccccaggatcccaggcacccatccctggatcctgccaggccggggctgggtccaggtgcacaccagtgccatccaaagcccccctgtccccaagcgagaggcaggacggttctggaacaaaagggggtaccaaaaacctcctgcagccaacagtggggggatccacctttctgggtctgacatggaaccggggacccttctcattccaggctgggggtcctcaatc

SEQ ID NO: 323282 - DNA, 993 bp, Homo Sapiens
  misc_feature (290)..(344): n is a, c, g, or t
gcggttcgttgcacgctcttgtgtgtccgtcttggaggtatccgtcgttaccgccgctgtacttccgggcgcgtttttcccacggggctccgcatcctggcgcgcctgttttaggtctcgccccgtgtcgctttcggtctcacggtcctgcctccagttggcaggcgggccagcaagttgccgccggagacgtcctcgcgcccttgggggggcccgcggagttcccccttgcggcaggggttccccaaagcgtggttccccggccgccttccgttgcgccatgaaagttnnnnnnnnnnnnnnnnnnnnnnnnnnnnnnnnnnnnnnnnnnnnnnnnnnnnnnnttaaaaatggtccaaaaaagtgaagtgttctcttatataaataagaaaggcctaccaggctccccgccggtcaagcccaggcagctggggaggcccggcttgtttccgaccaagattcccggaagcaccagcagcccagccgcgccccctcctcccgcctgccgcgcttggtccgtgcatgctcctcctcgcacccggctcaggtgtgaggaaagcccggcgcttctgaggcagctgtgtggacagtctccacgtaggcggcactggcctggcgtccagccaggagtgtccagctcgagccctcctggcatctgcacaggcggccccgcccatccccgctaggagatcttgcagttactccacgagcagttctggggggggctctggggtggacggatggacttggacctcttgaggctgttgcccttgctgccgccgcccccggccccgctggccagggagtaggaacggccgtgcatcatgaccgcgttcatgccgttggccatcgagaaggacttgaggtggctcttgatggtgacgggcagtggaagcttgtcgatgaggtgcacgggggtgcaggagacgatggcccggcagcagaggtcctgcaggccctcgtgccgaattcgccacccaggcctcgctcctt

SEQ ID NO: 323283 - DNA, 1108 bp, Homo Sapiens
  misc_feature (511)..(511): n is a, c, g, or t
cgaaaaaggggttagtaaagtttattagcacaaaggcaatgcttccccccaagccccattggtagggttccccattccccgtgagaaagggctgccccacatggaagtggaggctaaggggaaaaaggcaagtggctccagtaccccccttttaagaaaaatgggggtgcgccagggaacaggaaactggcttgttgcaaaggccggcctggcccatgaaaaagtgatcgggggtaagtagagggatgcgtctaatggcagcggcctctggcccgctgtcggaatagaagaggtatttttcgcaaccaggggcttgcttggttccttcccattcaaaccctcatgcaccagttgccatcactaccttgggggtcagggctgcagcctgagggagccagtgaagtgatatccacacacaaggaggcttggtaagtgacatggaagtgcctcggaaatgcgtgtgtctggatcgagtgtcttgccacggaccccaccccacccaaaatccctnaaagggtggagagcacgagatacccagaacagaggaaagaggctggaaacctaagacacgacttgtaaattacaggtggagacggaacttctcaccacctccctagctatctaaaactcctactccttgatccatttccatgaacaaggaaaagaaaaagagtctgactcgcaaaagcggcagaaatatttaggttagagtcaagcaactttctgaccatcttggttccctaagcaggaaaacgggacagatggcaaagcacctgtgcctgtaggcaggggcagggctggcctgagcaaggctcttgtctgtaagtaactccactgcctgacagacaagagccttcctatgaagctggagccacagcacgtgacttgctgtcacaggaaaggccacacctggcactgcagccagggacaggctgcattctctttacccagtgtccatctgtgccggctccagtttgtcagtttcccttccataaacccagaaacttcactagacaatgcaagaagtgttccttcttagagctgtaccataagagcctgagagctactccatgtccataagagcctcgtgccgaattcgccacccagg

SEQ ID NO: 323284 - DNA, 977 bp, Homo Sapiens
  misc_feature (187)..(187): n is a, c, g, or t
gaaaggagaagcgagggcgagaaggttgaggtcggtacagcggggtgggggaaaacagcggcgggagcgtttgtgtgtttggggggtgatcgaaaggggagaggcgccgagagaccggtacttcttacggggggaccaggcaatcaagtaatctagaatacttggggaccattcgttttgagctatnagcgggatacaagggttgggtggtataagggtcccgtgttccacgtatgtccgcctaaggcggacttgtgacaccagggcaggtgggcaggcctacagagcctccaattacccaccacgaatgaaacttgaaatgctgcccagtagttgggtcacctctcactctccacgatggctactgcacatttctccaccctcaatggcccaactctcccctcccaatcaatcgctgttctgctgccgtcctctttactcacaaccaatggagtggcctcctacttcactcagaaattagaagtgggcacaaggagactccctcagcttgctgttagcaaacctacaacctgacccacttcgggcctactctctgctctctcctgctataagggagtgggtgtccaacccctccacctctgtcacctcccatccctatccgccttctcaggaacttcacactatccataatatctagaacctgatcccttcttaccacactaggccaccactatcaccctaggccaagcaactgttatctcccacctgggccatcacaatggtcttgtaactggtctccatgcttcagcaattatcctcccttccaccccacagcttttctcaacagcagccagagggatgccctcaaaatgtaactcagatcacaacactcctttgctcaaaatgctccagtagctttccatcccactccgcgtaaaattaaaactctcgatcttggcctccaaacctctatgtgatctggcccctgccctcgtgccgaattcgccacccaggcc

SEQ ID NO: 323285 - DNA, 809 bp, Homo Sapiens
  misc_feature (219)..(219): n is a, c, g, or t
ggtctgcttcgtgacaagcatgatgaccggccgtgctgcccgttgggcctcagcaaagctggagcgctcccactacctgatgcacaactacccagctttcatgatggaaatgaagcatgtctttgaagaccctcagaggcgagaggttgccaaacgcaagatcagacgcctgcgccaaggcatggggtcttgtcatcggactactccaaatgctttccnagatgattgccccaggaccctggattggaacgaagcctgcgctgattgaccagtaccacgagggcctcagcgaccacattcaggaggagctctcccacctcgaggtcgccaagtcgctgtctgctctgattgggcagtgcattcacattgagagaaggctggccagggctgctgcagctcgcaagccacgctcgccaccccgggcgctggtgttgcctcacattgcaagccaccaccaggtagatccaaccgagccggtgggaggtgcccgcatgcgcctgacgcaggaagaacaagaaagacgcagaaagctgaacctgtgcctctactgtggaacaggaggtcactacgctgaccattgtcctgccaagggcctcaaaagtcttcgccggcgggaaactccccggccccgctgtagaggggaccttcaggcgaccgggccagaaatacataaggtccccacaagatgatggctcatctccacacttggcagtgatgctccaggatccatcttccgggcagacacaccctggttcggccgagccatgatcgattctgggtgcttctgggcaacttcattgatcacgaat

SEQ ID NO: 323286 - DNA, 704 bp, Homo Sapiens
  misc_feature (356)..(356): n is a, c, g, or t
gtgcttcggtacctcgagggactttgctccctcaggctcacgccgaatctgcgctgttttggacactcccatgtgctggaccctaggccgtgacttctctactgggccatctttagtgtcaggctccatcagcctggccacttgctcagagtggccctctggtctgaggctctccctgagtatgctgctttctttccccgttcactctttcacaggtggcacacctgtgtcaaccgagtctgagccttcccacctcatcctggtccctctcccctttgtctttcataggcatccccccatatgtcactgtgcacttctcattctctctggtgtctgtttcctagaggaccttaacntgacacggtgactgtgtcatttgactttattggaagccatcccatgcacgcacagagcacatctggactcatgctctgacatcactgggtaccgagtttggggttaattcatgtgatgacttcaatctatgaggctaagttgcatggcttgggccagctcacttatattacctctgccccctaaccttgcctctgttggccccagaaacacacactctctctaattgaatttctggataccattatgaccagtattctagaggtgctttgtaaatgcaagttagctcagcagtgggacccacagtgtaaataaaatgcttccaggattgattgtgtaaactgccaaac

SEQ ID NO: 323287 - DNA, 1236 bp, Homo Sapiens
  misc_feature (318)..(453): n is a, c, g, or t
  misc_feature (536)..(594): n is a, c, g, or t
  misc_feature (624)..(669): n is a, c, g, or t
  misc_feature (765)..(765): n is a, c, g, or t
  misc_feature (1040)..(1040): n is a, c, g, or t
  misc_feature (1156)..(1156): n is a, c, g, or t
  misc_feature (1162)..(1162): n is a, c, g, or t
tcccccgccacgcccccgctggcgcattccgcacgagggccagccgcaagtgagtacgattggagaggactcagacaaaatagaacatcttgtgcaaatcttcccaaaacataggaccatggggcatcctgcttaggctctccaaaaccttgcaaaggggaggccctttgcaagtattatggccccagtaagctcacctctgctaccatacactaagtgtccactatgtggtaggcaggatgttttcacctagggaatcatcatcaggattgatgaaggtcagtgttatcatcgccccatttaacaaagacattgacnnnnnnnnnnnnnnnnnnnnnnnnnnnnnnnnnnnnnnnnnnnnnnnnnnnnnnnnnnnnnnnnnnnnnnnnnnnnnnnnnnnnnnnnnnnnnnnnnnnnnnnnnnnnnnnnnnnnnnnnnnnnnnnnnnnnnnnnactgctcgcaccacggtgcacccaccgcacgcccgcgcagccccccgccaccaacgcccctaccctgcggcacagtccacgcnnnnnnnnnnnnnnnnnnnnnnnnnnnnnnnnnnnnnnnnnnnnnnnnnnnnnnnnnnnacagcgcacccaatccatcataatggatannnnnnnnnnnnnnnnnnnnnnnnnnnnnnnnnnnnnnnnnnnnnngcgcagcacgcgcgcaccggctaccctctaacaacacccacacacccactaaggacgggtcacctctcgcacaacgagcggcaacccatacgcccngcaccgacaaaagcgacaccagcgccacgcactctcactatacactatctccccgacgcgctcaaaaccgccgcgaccgtcacccatacccacactcagcggctccatccccgccgcataccaccccatatctcacatcctccccgacgcgcccccccaccctcctctcccacacccgggccccaccgcattgctacccctcctcgcataccatgccccctacccaaccacactaccacagcatccaccagcgccattctctcaccctccgcacncacctatctaggctaagccagacagactaacccctccccctccgacacgcgcccactctccgcacacggacaacccggccccaccaaccccatcaagccataatatgcatgacgcntaggancgcacatgccttacgtatcactaccttccgttcctccgtcaacccctccactccccccgaacatataatcacag

SEQ ID NO: 323288 - DNA, 1670 bp, Homo Sapiens
  misc_feature (152)..(160): n is a, c, g, or t
  misc_feature (261)..(270): n is a, c, g, or t
  misc_feature (302)..(342): n is a, c, g, or t
  misc_feature (380)..(394): n is a, c, g, or t
  misc_feature (403)..(524): n is a, c, g, or t
gcccccgtttttcccccggggggcaaatttttttccccaagggggcccaggggttgattcccctggggtttcagttttaccaccccttttggggggttttccagttcgccgaaagctttaaggatttcccccagtcttccaataaatgccannnnnnnnnttaatttattttgaggttccttgggctcccgttgatagattccggaaagccctccagaatccctttgggtttttttcaaacccccgggttccccccggggnnnnnnnnnnggggggatcccaacccttgttctggcccgggnnnnnnnnnnnnnnnnnnnnnnnnnnnnnnnnnnnnnnnnngggccccgcgcccaaagaaaggttttgaaaaatttttnnnnnnnnnnnnnnnccccaaagnnnnnnnnnnnnnnnnnnnnnnnnnnnnnnnnnnnnnnnnnnnnnnnnnnnnnnnnnnnnnnnnnnnnnnnnnnnnnnnnnnnnnnnnnnnnnnnnnnnnnnnnnnnnnnnnnnnnnnnnnnatgagatggaaggttttattagactaggagatttgtgggaggtatgagcgctgggccaaggtggcacgggccatgctcaaggcaccctctcgggcgcggtgaccccaatgaagccgcttgcatggacgaagatgcagccagggatcccactgacctggtccagggcctcgtcccgaagaccccgccatggctctggcaggggcagccggctttggaatgagtggggctccttgggcacacactgtattcgccactgtccagcctgggtcagtgtagataacaaagaagatggccactggaggggacagcccagattccagggtggtagagatgctccttccaggggacatgcacctttcgccagttccacaatctctccacttgggtccacctggaatcgctgggcaagggcctcttccaccaaggcccgggctggcagccagctgtgttggtagaaatctaatctctgcagaaactcctcttgaaccagatccattgcacgcttgaaccctgcctcagtgtcttggtcggggtggttccaggtaggattaagtcgagcaactcgtgcactcagggtagtggtcagtgcatatcgaggctcccccttctgcccactgggagatcccattgtccacagcatccacctcctccacaaagttctcatacatcttgtcatagagggtgcccaccatgctgtcctcttcactagtgcccagcaactgggccagcagcttgtgcccgaagtgcagatagatgagtcccgcactgctcagcttggtctgccacggcttcccaggggacagggagctcatggtctctgtgaaagacctctggtgatggtcatatcggtgtctccgagggtcgtactcgccccccacgtccaccacgatgtcacaggaaagcgagtttttcgggatcccgggtccgcacaatctctgcatcccggtactccggcaggaggcgaagcagtgcgcatgccagtgcctcgtcgcagtggaaggtgccattgtgcgtcccgattcggggcggtgccatgagtttgctgcgggatcgttttgggggcgggacggactctggaccgagcatgcggtgccgggtatacaggggtggcggcggcagcagcagcgttaagaaggccgcgcagga

SEQ ID NO: 323289 - DNA, 862 bp, Homo Sapiens
cccgggttttcagccaatgctggctgagtgctcatgggggaagccggtgtgagaaaagggtgatggcccccctaggtgtcccttcctgaggaaaggcagaggcctttttccatactcccataaaggccagcccactgtgccgggtcctgagaggcaaaggcacgagtttggggggaggggttaatctccactttccccagatgtccaaatgggggtgtgggtgggggaagtaatccccttggtccagcattcccaggagacagcctcagggaaggggctcaggatgcccagatcctcctgcccgcctctgcttgctgggccagtggtcaagcagttgccttaccagccacagctgtggtggggggaggtgaggacgcctcaccaccctcccatctctgcttcaatgaactcggtctttcttttacccctcaaaagaaatcaacagcaagttgagaggggagaagcctcaggtgaaggggtgagtatgggccgtggggccgaggggaagaaacactgttaggccctggccctgattccagcccctcaaaccctagagtggaggaacctcaaggggaggccagttgtgaaaggctcagtgccagtgcagagtctgagccaactcagcagcagtgtccagggcatgaggtctggtgggggttggggccagagatccaggctctctcctaccctctagcagagagggctggaatggggaaagcaggcaatgggagtgggaagttccctccaagccacttctctgggggaagagcccccttttctggcagggtctagggcagggccctttctgggcagggcaacatcacacatcagtcatctcatcccccagctctgcatcttctgg

SEQ ID NO: 323290 - DNA, 687 bp, Homo Sapiens
  misc_feature (500)..(500): n is a, c, g, or t
ccatctttttaagaaatccagtaacgttcctttgttcatatactcggtgacgatgtagatgggctcctcagacaccactgcatagagctggaccagcttgtcgtgcttcagcttcttcagtgatctgcgcttcctcaaggaatgattcgggggacattgtgcctggtttaagagtctttatggctacttttgtgtttccattccaggtacccatccatacttccccaaactgcccatttcccagtctcttgatcaacttcagggattctcgagggatttcccagacatctttggttttgacagacagatcggtaagccttggcatccctttgtgacagggaactactaggcggcagcagagacctgcagctctctctgagtaatgttgtacaagctgctgaagtgtttcaaactgggcccgggtggtaatgtagtatccaccattgtcaagtttgcgaattttataatgtttgacatggtctcctttcatatcatcccantcacggatagaaagtgaataggcacctttggtggtttcactctcgcggataagaaaggtacctcttgggtttccaaaggacaatagctgtcgctcagcatcttttcggccaagttttccaaagtaccactcttctgcctggatagagtcaactggagccacataattgctgggaatgtaacctgtcc

SEQ ID NO: 323291 - DNA, 964 bp, Homo Sapiens
gtagttatccttgactccatgcgtaacttctttcagacttcccaggtattacgaaggtcacaatttttgttcacctttggccccagtgctggtcattcataatagatgaatgaaaagtcccagaaacctgttctgtttggaaggttttcttttgtttcaggcttcggtggttaatatgcttgacaatttcagagtctctctgtctctgtagaccaatgccaaagaattgctttctggattcactgttagcagctcttcatcttcacctttggcaatgttaagaagtaaaaccgccataattctggctcccagccttcacagccacagtacagaattaagtctagggcaaattcagccttgctatggtcatgaattaaagtgtagtgaccggtcttccaatgcctcagttccccttggcacatgggaacacttgattctttctttgtttcattttcctctggctctgggtctgtctgctcattgctctgttggctgttgttgctgatggccatctgattattctctggctcaggaggactatggctagtcccttcttcagtgatatcagtggtttctgcctcttttttatcattcatctcatcttcttccgaaggggccaagaaatgaagcttcaggcctgtgaagttggagagcagcaagaatagtgcctcagagcgaaataacttcatgcactccttcaatatctcaggaagcttactctcctcagctttctcataaaaccttttgttagggggacctcggctgctccattccacatgtccatgctccaaggcctcacagactttcgtgaatttctcaggcttaagaaactccttcaggagaatttcagaactttcttcaaactcttcttgaatttgaacttggtaatccatgtccagataagtagggttgatccaatcatacaaaatctcatgatcttgtgggatgtgagggctccgaggcc

SEQ ID NO: 323292 - DNA, 596 bp, Homo Sapiens
  misc_feature (543)..(543): n is a, c, g, or t
  misc_feature (568)..(568): n is a, c, g, or t
  misc_feature (571)..(571): n is a, c, g, or t
acaaagctaacgatcagcttttattctgtgagtcattttacatctgtggctttgatgaacaacttgacattgctgtttttcaggttttatgagaaagctgaggagagtaagcttcctgagatattgaaggagtgcatgaagttatttcgctctgaggcactattcttgctgctctccaacttcacaggcctgaagcttcatttcttggcccctaggaagaagctgtccccactcgcatgattttgaacagtgtgttgatgttattgcttcgaattgcatcccgacaagcagtgatcacctggttctttggttttccaacccgcagacgacctgctctttgaattgcttgatttactgctttgaggtttcccaacagctctgtgtgattgttacagcgaattttatatccgatttagcaagtctctattaaggtcatagagttccatataacgactcttcattgttttcatgtccctcatcagacgagcatcctcagctccgaccagcaaacttcggatcaaattagaatgatcagccatatcngcactgagcttctgatgcactgagnganattcatccacctggagaccatgaac

SEQ ID NO: 323293 - DNA, 947 bp, Homo Sapiens
  misc_feature (164)..(175): n is a, c, g, or t
ccacgtggagcacggggtgaatcaattgaaatgggttccaaaaaagagctttggaagggaccgcccaagggaacagggagtgtccagggctcagccggagccaaaggggggggaatctttggggagaccctgtggccccttccaagccccttcaggaaatccannnnnnnnnnnnttcccccaaggtcccagtcgaaggaggtctttgatgcccttggccttccttgaggcccgaagtggtagtcgagggcctcgtggggtggggaaaggctgatgaactcctcagggaggaggccggagaagtcctcccggcacatgcgtccaggagcgagtcggccgccaccaagcggggacaggcggtcctcgtccacgggagcccgcaggctgcccatccgggacaacagcggttcttgctccaggctgagtagagactggctgggatctgtggtgagggatgaggggggagatgatggtgttggtgacactatggtggcagagtcagtggccctgttctcctcctcagaagtgacctcctgggatggggtcttcccagggctgatcccacctacggtctcctcagggcacaggaaaacatcgatcgggccttgtttgctcttaagggagatctgaaagttctccgaagagtccacggcttggagctgggtctcaggaggggctttgatcaccataaccatctgctctgcagggtctgcaatgctacgaaggtcctgacacgtcacgtaggccaggcgctggctgtcagtgtcctcggagagcaggcgcagctgcgtagtacagatattcatcaggtggtccagctgctgctcgctctcctgcagctgtcggaggtcctgggtcaacccctcaagccgtccgccgacgcccactgtggtgtggctgcccagccactgcctcgtgccgaattcgccacccaggcctcgctacct

SEQ ID NO: 323294 - DNA, 974 bp, Homo Sapiens
ttccatgggctgaggcccgtggttgcctttctctcaggcccaggaggccactccttttttcccttgtgccaggcgctgcagcttcccgcttggtggtgccggttgcagttcctcccatccccctggttggtgcgaggactccatcttttgccaggctgcgctcacatgcctccctgtgagatgtagccccggggggatgtggccatcctcctgggatctcagtgcactctgaggagcctccccttggagacgccacgcctccagctgggcccgaagagcctgaacctccttctcccagtgcctcgtggccgtcacttgggggccctcggcgctctccgcggctttggttgagcagggcagtgaggggcacccgcttattctcccgcaggggcagcttctccagctcctgccacttcttctcgatctcctcactaagccggttttgctggtcctcagtcaggggggcacccaggccccggcgcggcccctcaccagcaggcacctctggggtcctgctgtctgtggcctcaaaccacttgcgccgctcctcggagcgctgggccaggtcccgctccagctcctcctgcttggccaggcggtcaggagtgcgggctggggtgcgggcccgctgcggggaagcctgggtcagcggcgagagctccacgtagtccaaggcctgacgctgcccgtccgccttccgagggccaccccggctgatgacctcagagcccgcccgctgctcccctgccttcagggggcccttctgggtgctgtagctgtgcagcgcgttctccttgttagagtccgagagcttggtgacatctggggctgaagttggacgtacggtctttctcagagcctcgatccagttccgccggatgcctgaggtcatggccgacaaggtatagacagcatccttggtgtggatctggaagccatagttgcgccctcgtgccgaattcgccacccaggcc

SEQ ID NO: 323295 - DNA, 1159 bp, Homo Sapiens
tgggtttcataccttttattacaaaaatcaataacttaattcagttctgtataaagtcgataggacttctggtccaataagcagcctaagctttcattctcatcccaagaagggacaggagtcttggcccagaggctgtggggaccaccaaaagcctcccaggcagctggaacactgtgtccaaaccaaggaagtccaatgtggggtgtggctgagtgaagagctgttcctaaggagccaagtgctgtctatacaggcttgccccctccaggagcattgggtcacctctggggatggccaggctgaatcagcactgccagcctctgcccacctgatctctgcctgggctggaacaggtcacctgagcaaaagcatgtccccaagaaggccagcgatgtcaacatctccaatgatagggcgaaagaagaggtccccaagcaggctggtcggaatggacttgagggtggaggccgtgaggaggacacgggtcaggcggccttgggctgctgggcaccagggttccaggacttcacacagcacccagtgagcctcctgctgcaggtgcccaatgtgggaggcggcttggaggcctggcacatcggggttgaagaggatggtccctttcaggcaggcatattccttggggctaagctccaggctccagaaggactccagacagcattgaagccactgcaccgcagccagggagggctggggtctgtctggcagttggccactgcctccactgctgctgggctcctccagcagaatcttcttgagtatgctgggcaccggggcctcagccacctcaaaggtcacagcatcttgggccaacccaagcaggaagagggggccccagcaaccctgcagcagccgccgctggtcctggggaggcagctgccagaaggatggcaggttcctgaggaaggccactgtcttggccagaacatccaaggcctcccggcaggtgcgatgaggtgcacatagctggacgggccggtgctgcctacataggcagcggctacggggtcgggggacagccttgaggctggagctcagaagtgcgtagagaatggcggggcggcttgcagctccccctcgtgccgaattcgccacccagcccttttgggtaggtgggtagcgcgggcgtggcggggga

SEQ ID NO: 323296 - DNA, 410 bp, Homo Sapiens
  misc_feature (41)..(41): n is a, c, g, or t
  misc_feature (54)..(54): n is a, c, g, or t
  misc_feature (71)..(71): n is a, c, g, or t
  misc_feature (130)..(130): n is a, c, g, or t
  misc_feature (165)..(165): n is a, c, g, or t
aatccttctttaaaataatgcttgggccaaccggggccctnaaagccaaccctnaaaaagtttcaacaacnatcttgggccccaaacccaaaacaaggaaagagggggcccccaagcaaaccctgcaagnagccgcccgctggtccctggggaagcaagctgccnagaaggatggcaggttccctgaggaaaggccactgtcttggccagaacatcccaaagctcccggcaggtgcgatgaggtgcacatagctggacgggccggttctgcctacataggcagcggctacggggtcgggggacaccttgaggctggagctcagaagtgcgtagagaatggcggggcgcttgcagctccctggcaatggcaggcccctggttggctggtgctcatggttagggatctgctc

SEQ ID NO: 323297 - DNA, 1006 bp, Homo Sapiens
aggtttccggcccctcttaaaaaaagaaggaggttttcacgggccctgggtccccaaggttcactggcccacaggaaagttcattcggctccttttgggggggcatagtccttgcaaaaaacgaagttggaaggcgttcaagcccaggtttctcagcctcggtggtggcagctgggaatttggatgcggaccaatgtgaaaggccgaaggttaagaaatgacagttctctccttgttatccactctgctctcaaagaaaagggtactctgtctcccagctctttccggggtcgggtgatgttgtaggtgtctgcggccgtggtgttcctgcttcggctggacatggtggtgttggccacttgcatgacatctctccgcttcctttcaggtctgggcacgaagatggagttgtgcaggaaattctcaaagactttgcggtattcagcctcctccttctcggcctgcttctcggcttcagttttggggcaggcgcagcaaggccctttctccccccaccacacacctcagtcttggggttctctgtgacctcctcaatgtcgatggtgccgtcggcatacttcctgatggggattttgtctttggagcagtaattgtgccggtaaaggtagccgtcctgaggctgccgctgccagcgcacaatgtagtaactcaggttgccgttgggcagagagggagggttccacttcacgattaactgagaagaggagttcgatgctgaaagaacgtccaagggaatggaaggaactgaagcattggtgcgaatgtacaagatctcactcttggccccacggatatggtcgttctccaccatggtgagggtcacagccttgacgtaaacggcgtactgagtccagggcttcagcccatgtagtaagatgccgggctccacgtccttgttgggcgggaggtccacgtccaccatgttccagctgttggagccgcaggcatcctgcccatccctcgtgccgaattcgccacccaggcc

SEQ ID NO: 323298 - DNA, 1301 bp, Homo Sapiens
  misc_feature (76)..(76): n is a, c, g, or t
  misc_feature (140)..(140): n is a, c, g, or t
tttcttgggcagttcccccggggggtacagctcccggtagttcctgagccagatgccccggggatcaccagccggntggatttcgctggtgccctggtagatctccagtgatgcgggcgtcgcggtagtgccgctctgcngggcatctttgtcaaggtagcccatgccgccccaggatctggatggcctggtggctgatggcggtcgcggcctcggaggcggccagcttggccatggctgcctccttgatgaaaggcttcttgttatccttcagcatggcagcgcgccaggtcagcagccgggcactctccagggccagggccatgtctgccaacttgaactggatgacctggagcttggtgaggggcgccccgaaggccatgcgattctcagcgtagttcacagcacaatcgagggcggtctgggcaatgcccagggcctgggaggcgatgccgatgcggcccatgtccagggtttgcatggctatcttgaagcccatccctggctcccccaggatgctgtccttggggatgcgacagtcctcaaagatgaggttggccgtggatgagccccggatgcccagcttgtcttctttcttccccaacgtgagcccaggcgttggcatggggaccaggaaggcactgatgcccttgttttgcagggctctgtccgtgctggcaaagaccacggcagccgaagcctcccaggcattggtgatccaggctttggttccattcagaacccatgagtcgccctcggcccgggcggtggtggacgcagctcctgcatcactgccgttccctggttcgctgagggcaaagcagccaattttgtcaccactggtgaaaggcgtgacccacgcctgcttctgctccttggagccaaacttcaagatgggccccaggtagagagagttgttgacactcatgatgactccggtggaggcgcagccgcggctgatctcctccatggcgatggcgtaggccaggtaatcgaggccagcaccgccaagctcctcgggcacgtccatggccagaagcccaagcccgcccatcttcttcacctgagccgctgggaagagatgttccttatccacctgggctgcaatgggaaacaactccttctcggcaaagtcccggcatgtctggagcaacatctggtgtgtctcgggcagttccacagactggtagatggtgtgtaactgccgccaggccctaggacagagagctctgcgggcagggcccgaggcccgggcgagcagcgcggcggccatgggcgacagacacagtcccaggcttccc

SEQ ID NO: 323299 - DNA, 1209 bp, Homo Sapiens
  misc_feature (1095)..(1095): n is a, c, g, or t
  misc_feature (1185)..(1185): n is a, c, g, or t
ggcctgggtggcgaattcggcacgaggccctgcgcctgcgcggagctggagtccggctgggccgcagccgctgggagaccggcggttgccgtggggaccggtcgggcccctccctcctccggtcccccgccccaggtccttccccaccgagacgcgccggcggaccgcgggcgagtgcagccggtgacccggcgagaggcggcgccgctcccaagatgtcgcagacggccatgtccgaaacctacgattttttgtttaagttcttggttattggaaatgcaggaactggcaaatcttgcttacttcatcagtttattgaaaaaaaattcaaagatgactcaaatcatacaataggagtggaatttggttcaaagataataaatgttggtggtaaatatgtaaagttacaaatatgggatacagcaggacaagaacgattcaggtccgtgacgagaagttattaccgaggcgcggccggggctctcctcgtctatgatatcaccagccgagaaacctacaatgcgcttactaattggttaacagatgcccgaatgctagcgagccagaacattgtgatcatcctttgtggaaacaagaaggacctggatgcagatcgtgaagttaccttcttagaagcctccagatttgctcaagaaaatgagctgatgtttttggaaacaagtgcgctcacaggggagaatgtagaagaggcttttgtacagtgtgcaagaaaaatacttaacaaaatcgaatcaggtgagctggacccagaaagaatgggctcaggtattcagtacggagatgctgccttgagacagctgaggtcaccgcggcgcgcacaaggccccgaacgctcaggagtgtggttgttaggagagcacacaggtgttcatacagtgggcatttgggacacaatcgttggaacctggaagaatctgaagttttttttaccaccatctttttctactctgtatggaagtagatctttatggggaaaagagaatttggggtgttctgcaagccagtcaaagtggcacagcaaatcatataaatcgaattaaatggacaacaccgttagatgtgtatgtaaaaatnttctgtgtcatatttttcctttcactttcggtttaaaacatgctatatgtactgtatgtcctgtagcccagtgcggctccacagcatggnatctgatgtatgatatggtagaat

SEQ ID NO: 323300 - DNA, 1056 bp, Homo Sapiens
  misc_feature (888)..(897): n is a, c, g, or t
  misc_feature (938)..(938): n is a, c, g, or t
  misc_feature (954)..(954): n is a, c, g, or t
ggcctgggtggcgaattcggcacgagggtttcttagtgtaagacatacacatcctgcttgtccagctgttcctccaaaatctactttggcttcagctccgggtcctgtaccagatggaaaatgtttttggtgatctggctgctgcttaaagccagttttccctaagaactccaaaggctaaagtctactaggggcagagtgtgaggatagatttctaatcagagaaaagtggcctccaggagctttcatttatgtcttctccagaccaggttttcctgttatcttcctttaatcccctttcaaccaacaggtgaagttcttccagcccacagaggtagtaatatcatcttttctatctcctcctctcctttggccatgtaatgaagcaaaatattatttatttagcccaggcttgagagccactgtttgtggacagtcttcatctagattccataccctggcctaggcgaggtaaggctctctggttattgccaggatggagcccctctaccccagtctgctgtagggaataccctaattagttgaggcatgcttttggaatcctggcatgttggcatatggctggtctatcctttttaagatctctggttgggggtatctggatatggattaggagggacaaggagcctttttcttggctaatgttttccaatacttttttgaatggtgccagcccctccaggcatcccacccccaaatcatcatctttagtactaacagggtgtctggtcttagaagcctcccttcagatcccacctgaccctggtgactgcctggccttgatgttggctgcagccttctgatagaacacatggattccaccacagctggccaggcttgttacatgggtcagggaatacaaatggnnnnnnnnnnaggaagcagggtgtggcctcagtttttcggggaaccttggnggttgctccttactanagcccattaatctaccccatcaactctctgccatgaaaggccatctccaggaacccttgtttttttggagctgaactgcccaaattatagctgctattgaac

SEQ ID NO: 323301 - DNA, 1140 bp, Homo Sapiens
  misc_feature (647)..(732): n is a, c, g, or t
  misc_feature (819)..(856): n is a, c, g, or t
gagcgaggcctgggtggcgaattcggcacgagggtggtgcttcccacctttatcctggagaagcgatctttgctggagatgtatgcagatttcatggcgcacccagacctactgctggccatcaccgctggggccacaccagaggagagagtcatttgcttcgttgagtattatctcacagcctttcacgagggccgcaagggcgctttagccaagaagccctacaaccccatcataggcgagacatttcactgctcctgggaagttcccaaggacagggtcaagcctaagaggactgcttcccgctctcctgccagctgtcacgaacacccaatggccgatgacccttccaaaagctacaaactaaggtttgtggctgagcaagtgtcccatcacccacccatctcctgcttctactgtgagtgcgaggagaagagactgtgcgtcaacactcatgtatggaccaaaagcaagttcatgggcatgtccgtgggggtctctatgataggggaaggcgcgccgccgctcccgggaacagcggacggatacccctacccccccgctcgcggccaagtccgagcgaccgcaactgacccatcccccgcatcctaaacgcacgccgccaccccccgcacgccgcaccgagnnnnnnnnnnnnnnnnnnnnnnnnnnnnnnnnnnnnnnnnnnnnnnnnnnnnnnnnnnnnnnnnnnnnnnnnnnnnnnnnnnnnnntcgctttactccctttcctcttatccctccttgcccactttctccacctttaccccacgaatacactccccgccctcaaacctattnnnnnnnnnnnnnnnnnnnnnnnnnnnnnnnnnnnnnngttcattatccctaaccctgtccatccaccgatacttgcctgtgctctcttcaggcgggcatcccccgctcaagagtaaccccgtcctcgccctaagtccttgacgtccctgacactatctacgttcttccctcctcaccctcgcacgctattagtaatcgagtctcccctcttatcactaagctgtcacggacacctccgtcccctccaatacatatatatcggctctgcactaccacaaccccaactcgacctgctacccacaccctacacatcttccacgc

SEQ ID NO: 323302 - DNA, 950 bp, Homo Sapiens
  misc_feature (755)..(842): n is a, c, g, or t
  misc_feature (848)..(866): n is a, c, g, or t
ggcccccggaggagaggcgcgcagcctgggcccttaccaaaagttggggggattaacgggggtggaagcccccctgggccaggggggttttttccttttcgagaggccctccgttctttgtgtgcaggcatttacctttcgggagtccaagtttgttcatattcccccttgtattgtgctttttgaagacatcccagggtttggaccaggagagtgttagccctaggggaaaaggtggatgtgtgctaaatttttctttcaagggtcaggggaactttgaagcggtgagggagggacctttctgttcccctgaagtttttgaactgcttctgcaagtgtggtctgggaacggtaacatcattatctgggagtctgttggaaatgcaaattcctgggtcccaactagaactactgaatcagaatctgttgggaggagggtccagcaatctgttttgaaaagccctgcagctgattctgatgcttgccaacatgcaggaagcactggactataccatcttgttattagacaactatgcaggaaaatagctgtgttatcagactgtattcaaaggccctgaaacctaaatatttgctgattctgatgcttgctaaagtgcaagaagcactgggctataccatcttgttattagacaactatgcaggaaaatagctatgttatcagggcctgtattcaaaggccctgaagcttaaatattttaaaatatttcttacagctggacatggcagctcacacnnnnnnnnnnnnnnnnnnnnnnnnnnnnnnnnnnnnnnnnnnnnnnnnnnnnnnnnnnnnnnnnnnnnnnnnnnnnnnnnnnnnnnnntctttnnnnnnnnnnnnnnnnnnngccaggcacgaggctctcatgcctataatcccagcactttggaggccacggcaggcagatcatgagcctcgtgccgaattcgcc

SEQ ID NO: 323303 - DNA, 1045 bp, Homo Sapiens
ggcctgggtggcgaattcggcacgaggccccagaccagctcatcagcctcttgctaaccatgtttgaggccctgggagaccccgaaaagaactgctcccgagcagctaccgtcatgatcaactgcctgctgcaggagcggggcggtgtgctccaggagaaggtgcccgagatcgtgagcgtcctgcgctccaagcttcaggaggcccagggagagcacgtcctgccggccgcccagcacagcgtgtacctcctggccacccagcactgcgcagccgtggtgtccagcctcctgggcagccccttgcccttggacagccacacctgcatgctgtggcgggcgctggcggtggagcctcgcctagctgcccaggtcctggggctgctgctggagaagatgagtagggacgtccctttcaaggagagccgggccttcctgctgggccgcaccccagaccgcgtggccacgctgctgcctctctcggctacctgtgcactgtttgaggtcatgtccacgcctgcagcggggcccgcggtgctcgagctctacccccagctgtttgtggtgcttctgctgcgcgtcagctgcaccgtgggtgtccagctgccccggaacctgcaggcccaggaaaggaggggtgccagtccagccctagccaccaggaacctggaaccctgcagctctgcagtggacaccctgcggtccatgctactccgcagcggcagcgaggatgtggtacagcgcatggacctggagggaggctgggaactgctcaggacctccggcggggcatggaggagggggcccccaggttggccagggcccatggctgaacacgcaaggccccgactccccctggtgctgaagaccctggcatggccccccagcagggggtattaaaaaccggagggtgacccccacccccttccggggccgagcgtgttaaaagaacctgggcaaagaactcctggtcctggaatcccttcctggaaaacccggccggttcgcacaaaaggaacatttgccccagcctgcgggaagttgga

SEQ ID NO: 323304 - DNA, 991 bp, Homo Sapiens
  misc_feature (148)..(148): n is a, c, g, or t
ggggaaccattgctgggacccactgccttgtgaatgggaggagggaggcctcagggacccggaaaaagacttggatgccatggctaaggggaactttggttttgtggaccaggcggtggaatacgtggcacttgagggggctccctcnccaagatgggacagtcagaggaccagacttagggggcaacaggtcgacagaaggggttctcattgttctggggcactgtctccagcaactggtgcaaaaaattcttgaggccctccagctgagcaggcggcagcccttgctttaggaggccctccccgtcaggtccaggatcttcctcagggaatggcctttctgccctatgatcgggatggaaggccccaagtgcagagaaggccccagctgtggatgaagtgaggtctggtttgggctccaggggctggaaagaatgctggctctgaaaagaggggcccaacaggaggctaagatctgaggaggaactgcaaagaacaggaggcgctccaggtagctcgtcccttgcttcccggctctgctgcaatacaggcttcagggccacggccatgggaggcatagtccagaccctcctctcctccttctccggctcctgaggcccggggctggagggtccagcaggaggagcttgagggttgggcggcgggagagtggtgctgagcagctggttggcctcatcccagtgggcctgcagcatggcctgcagtctttccaccagctccacccgctgctcctccagctgctggttcccactctgcagttcgcacactcgcgcttgctcccgggccagtctgagctcgtagtcctcagccacctgctgttgccgttcctctcgttctgccatttccaccttgaactgagctagctgactggccagctcctgctggtgctgtccactcaggtcctgcagctgcttcctgtgatgttccctgagggagcctcgtgccgaattcgccacccaggcctcgctac

SEQ ID NO: 323305 - DNA, 1005 bp, Homo Sapiens
  misc_feature (65)..(65): n is a, c, g, or t
ccggcaagaacccacctgccccattttttaaaggggggcttgggtgactcagaagaaggctccancttggcccgtcataaagccccagagtcttccggcaacagaaaccagcccccccccccttttagctgtgatggaggagacataggatttagggttccacgtaattggcatccccctgtgaccagcacgtgccgctctttggtgtagagctcagtgggggtctcaggctcctttggggtttctcactttctcctttgactttcctgtatagtttcccaaagcctttgcttatctgccctccatctggcacatcctctggagccccttcttgtgtcaggggacttacttctttactttctgattcaaacttagattcactttcctctttaagtaccacctgtaccagctttgtgtcttccaaaccttttaatggtgcatcttccagagctccgttggttttgtcttttgttataatctcttttctccttggaacattcttggggagggctttttgtcttggttttgctgctgttatatcctgcagagctctggtaagatctttcccaccggatccagtgctgagagagactccatggctctgggtgaacaggggaatgggagtttcaatgaaggcagaggtcagcctgttgccttcaatctcgatgatacgatgataccggtccagctcattcttcagggtttgctgggcgaccgccagctgccggcagtcgtaagaagacttctccaggacccgctctgtctcctcaatctccttgcgcagtgtctcaatctgctcgttataaagctgaatctcatcgtcataacactcatgggcacttttaatagcttgttccagagttgttgtctgtgcctgcagctccactctctgcgcctgcaggtgggagagcacctcccggccctcctccagctgactccgcagggcggccacctcccgctccgtcaggagcttctcctccccctcgtccgaattcgccacccagc

SEQ ID NO: 323306 - DNA, 924 bp, Homo Sapiens
gcccctttaaccctgtgatgggagggaggaccattagaattcttagggttcccacgtaaattggccatcccccctgtggacccagcacggtgccgcttcttttggtgtagagccccagtgggggttctccaggctctttgggggtttctcacttttctcccttgaccttcctgtatagtttcccaaagcctttgcttatctgccctccatctgggcacatcctctggagccccttcttgtgtcaggggacttacttctttactttctgattcaaacttagattcactttcctctttaagtaccacctgtaccagctttgtgtcttccaaaccttttaatggtgcatcttccagagctccgttggttttgtcttttgttataatctcttttctccttggaacattcttggggagggctttttgtcttggttttgctgctgttatatcctgcagagctctggtaagatctttcccaccggatccagtgctgagagagactccatggctctgggtgaacaggggaatgggagtttcaatgaaggcagaggtcagcctgttgccttcaatctcgatgatacgatgataccggtccagctcattcttcagggtttgctgggcgaccgccagctgccggcagtcgtaagaagacttctccaggacccgctctgtctcctcaatctccttgcgcagtgtctcaatctgctcgttataaagctgaatctcatcgtcataacactcatgggcacttttaatagcttgttccagagttgttgtctgtgcctgcagctccactctctgcgcctgcaggtgggagagcacctcccggccctcctccagctgactccgcagggcggccacctcccgctccgtcaggagcttctcctccccctcgtgccgaattcgccacccaggcctcgctccttag

SEQ ID NO: 323307 - DNA, 1080 bp, Homo Sapiens
  misc_feature (195)..(215): n is a, c, g, or t
  misc_feature (232)..(232): n is a, c, g, or t
tgtggggaaacttcctttttataaacaaaagttaaatttattgtttaccaaaaaataaaccaatttttaccccaacaaggaggttccaaaaggattttgggatatccaaactccgagggaaggggggaaagcctggttttggctgctttgagggtttttcattgaaaggcaaatgagggcggaaagggccccggnnnnnnnnnnnnnnnnnnnnnagtctggctcaaaccancaccttggttccttgaaccccagtcttggctcatgctgaggtgtgcacttctgccccttgaccccttggggctggcctgggagtgtcccctgtcgggaggtcagagatagcctcccccaggtacagaatcacccacatccttggagcatcccccgccaagtctcctgtccagacctaagctgagagaacactccacgatggattgtccccacgcagcccccaccgcctgctgtggcatgtgcagcagcagcagcaggggctttagctacattctcacactattgaacacagtgatggggctgcccacggaaccgtcccagggaggggcacagcccccagttggggagactagcctgagcttgcttacagcccacagggttggagaggcagtcatacccccatgattcctggactaggagccagcagtcccatagctaggctggtaaactcacattttaacatttggcattattgcacgtttgtcctggtcacatctgtctgtctgggatgttagctttgtctgcaggggttcccaggtgacatgcagtgctgccagtgcaagtcactccctccgcaggcaagcccagctgctgaggatagtcagctggtcagccgagccctcagataggtcagccagaggccttcacatatgtggtcttgttgggatcagggaccacttggctccatccagtcttgaaaaagaccagctgccgacctgtccaggtggtctggttggtgaccacaaaggcccgacactgggcatggctctcacagacatccacagcctcagccaggtgaacacgaaaggaggccctcgtgccgaattcgccacccaggcctcgctccct

SEQ ID NO: 323308 - DNA, 1047 bp, Homo Sapiens
tatcccgcccctgttcgcccacccgccacccgcctcctcaccacccacaaccaccaggcctgggtggcgaattcggcacgagggttcaaagggatcctgattccactgtgcgagtctggcacttgtaccctccgggaagccatcattgtgggtagcatcatcaccaagtgctccatccctgtgttgcactccagtgcggccatgctgaaaattgctgagatggaatacagcggtgccaacagcatcttcctgcgactgctgctggataagaagtatgcactgccttaccgggtgctggatgccctagtcttccacttcctggggttccggacagagaagcgtgaactgcctgtgctgtggcaccagtgcctcctgactttggtccagcgctacaaggccgacttggccacagaccagaaagaggccctcttagaactgctccggctgcagccccatccacagctatcgcccgaaatcaggcgtgagcttcagagtgcagtctcccgcgatgtggaagatgttcccatcaccgtggagtgaggaaaacagtcagctgtcctggccaaaggggtttggaaggacaccaagacccccgttggtgactgaagatgacactgagctttaatggctgaagacccagatcagggcagtgacagatcacagggacatctgtggctcccagtccaggacaggaaggactgagggtctggctggttccctcttccattctaggcccttatccctgtttagttctgagagccaacttgagataccatatgctagcattcccagtccccagctggggcttgggtgtgagtactttttctatggctattgtgtcaggtcactgtggataaaggcaaagacagatatttattgaacctctgtgtttggtgtagtcaatggaggtaggcattactcctggtagtatttgggaggacggaggacattccttggcctgggtaaaaaaggaccccccctcccctttgtcctccaaagcttgggttctcccaggcgtggcgctcgccttttggtaacgcccccagg

SEQ ID NO: 323309 - DNA, 1058 bp, Homo Sapiens
  misc_feature (173)..(173): n is a, c, g, or t
gaggttttttagggagaatgcagggtggcgcaaaaattccggttttcctggcccccattcaccggtggcccccaaaaggggtgagggggaatggggggctccccatgaaattaacaccccaaggtggcccgccccagtggcttcccatgggccccagtccagagggtaggatngcgccaccaggcaggggctttgcatagttgggtgccctggtttgtcactgagccacggctcagggtccaccacccccccgggaggtggacagccactgtgcaagctgccaggccacgggtgcctccactacccaatttgtgaaatgggactctaaacagaaaacactacttgttctaagtgtaatgacagaagcagagttaaagggacctgcgagtgtcctagggccctgattatgggatgtggggaaagatccttcgaccaacctcagtcgctctaagtgagcgctgggctccgagaacggggcgtctgcctgctcccggagaggggcagcccagggaagtgaaagctggggctcagggctgcgagggcctcgggcgcccgtagatgtctgagtttgccacctccggctgagggagacgaaagtaccaaggactgagaggacaagcagagaccaaaaccgaaccggtgcggagggtgccggggtgacctcggtgcaagtgtgggtagagaagaggaggcggctcgagaataaggcttcaaactccctcaggaccctgtcaacacccgcgacccgtctgcctggccgtaagtttggtatctggctttttctcctcctagattcttcaggccatacaagaagtggaaataaatatccgcagacgacaagtttcaagttttcccactgaagctccgccctttggaaacctacaaggcctcccctcgccgcgcgcagttaaaccttcgggacagactcggatgaccgggagggcccaagtctctcactgaggaatgggaagaagtggtcagccaaacccaccggcctcccaggcatcccgctggcccacctgggcctcgtgccgaattcgccacccaggcctcgctac

SEQ ID NO: 323310 - DNA, 1365 bp, Homo Sapiens
  misc_feature (150)..(150): n is a, c, g, or t
  misc_feature (219)..(219): n is a, c, g, or t
  misc_feature (751)..(760): n is a, c, g, or t
ctcgtttagtatgcgcgccgacacagtctacacacttatcttgcgtgtggttaaggtgggagcgcgcagatgtggtatgtctgtgctcttgagctccgtccgcgcgtcggttatctcaatcgagagtggcggtcgtcgcctgagaaagcnctgctatcacatatctctgtctcaaagtgttccgccgcgcgtgacgtcacatgcgagcgccgcgatgcngcgcgcgcgacgcgttcgggcgcggcccaatacatgcggccagccactccactgcgcgcctcttcaccgtgtgaagcgcacgggacgtcataggcgagcagcttatcggcgtgacgagagccaaacacaagcctaagagcgccgcacgtcaacgcgtcgtcggcggcggttcttgtcaacctgcgcagcacagaacttgcgactctctgccgggtcggggacgttatagcgcttgccgcggccgtgtcaccgcacgttgagtgtggaggaggttgcgggcgcgcgctattgtccgccgcgcggccgtccgtcgggtgttgttcgacgtaagccgcgcggcaatcctgagatgggatgagactagagtcgcaggtacggcggtaccggaatactcgcggcgctcgcgcgtggtgtgtggaagggcgcgggtgagtgcggcggccgagggtgcctgtggcgcgcccaaggggcggcccggcccccgtgccattgacggcgtcgcaacgtccggcatttccgctctatgcaggcnnnnnnnnnncgacataccggggggaccacccctagaccgggctttacgtggggcctgccctgagataggttcttttcaaggtccgctgaacgacgcggaggcctcttgtggggcccctgcaggtgtgagcgcggcggtagctggacggtggcgtctggaaggggccattgctggggttcgggaagtgcgggggcctctgccgaggctgcgtgggcaaggcccctgcctgcaaagtcagctaccagggagcagattctgggctctgcacgttgaccactgtgtctcagtctccccacctgtgaaactggagttaagtgtccgcctcacagggctcccgtcaagatgatgtcagctgattcacatcacatgccggctgttgggaaggcagcctccccagaacttggtgtgaaaaagggccctctcctccccatggagcctcccagcggggggcggggaacggcaaccagcgggacactgccgccctcccccagttactgcccgggggtccgactccgtgggtgggtggcagctcgcctccgaaagtctggcagcaccggccctcatcagcagccctttctttcccaccccctcgtgccgaattcgccacccaggcc

SEQ ID NO: 323311 - DNA, 1052 bp, Homo Sapiens
gttcgactgaacctacaacccgagtattttcatttttttggaactctggttgccccccgtgttttcaggacttttttgctccaggctttgaaaatgctttcatcactattggaaatggtttccttgggaattctttaattttacattttgtttcaatttcgttcagtttttctgaaattcacgtcttcttttttccctttcctcttcagggggctgaggagatgagttgtcactggatccaactgttgacttagagtggcgatcatttccactccctttagactttctggatcctacaataggaggtagtgaagaagctttctgaccaaaaggccttctcatcgttgacttgtcaaaaagtaactcaccgtaaggcagtttcttaaacttatctctgccaacagccacataaaactgcccattctccaactctgctccactctcaacaagttttccttctaaagtataaagcctgtgaacagccccgctcctcagagtgattttttctgtgaccatttgtagtacatgatcccactgattcaaggtttttctggggataaggaggcgagaagctgggtttatgaggtctccatttgcaatcaagaagatagtgcacggctcctgaagcggttttctaaagcgagctgacacgttgatcctgctatggattactggttttacctctgtattaacaacttccattggtcttttcttgatttctcctatgtccaagtaattgagtttcttgaaggcttcctggcctccagccacgtaattgcccccgctctggatctggtctagcttccggattcggtggccagtccgcggggtgtagatgttcctgacggccccaaagggtgcctgaacgccgccggtcacctccttcaggaagacttcgaagctggacaccttcttctcatggatgacgacgcggcgccccgcgtagaaggggtccccgttgcggtacacaagcacgctcttcacgacgggctgagacaggtggctggacctggcgctgctgccgccctcgtgccgaattcgccacccaggcc

SEQ ID NO: 323312 - DNA, 862 bp, Homo Sapiens
agacggtgcagggagagcaaaaagtacacgggcgggtcaacgcggtcgaaaatgttgaggaaaggtggtgtggattgagggatgcggggaagggctaaagtggtgaggtccacgggaggttggtcgcggaggaatggggagtgccggtcaggtcgagatgttgtggcatgacgaacacacaatggggcgggagagagcagtgtagtacgcaggaaaggacagaggaggtggggaaggaggaggaggggtacgtacggaggggtgcgtccaggtgaaagtgtgtgtgacgggggagcaggcggaactgtccccgccaatggcaaggagagtttgaggggcatcgaatcacaccgagaagtcccagcccctcaaccactgaggtgtgggggggtagggatctgcatttcttcatatcaaccccacactatagggcacctaaatgggtgggcggtgggggagaccgactcacttgagtttcttgaaggcttcctggcctccagccacgtaattgcccccgctctggatctggtctagcttccggattcggtggccagtccgcggggtgtagatgttcctgacggccccaaagggtgcctgaacgccgccggtcacctccttcaggaagacttcgaagctggacaccttcttctcatggatgacgacgcggcgccccgcgtagaaggggtccccgttgcggtacacaagcacgctcttcacgacgggctgagacaggtggctggacctggcgctgctgccgctcatcttccccgctggccgccgcctcagctcgctgcttcgcgtcgggaggcacctccgctgtcccagcggcctcaccgcacccagggcgcgggatcgcctcctg

SEQ ID NO: 323313 - DNA, 1160 bp, Homo Sapiens
  misc_feature (25)..(25): n is a, c, g, or t
gttgttcgagacgtagtggtgcgtntcaccttcgtcttggagtgcgtgcggggattcctcctccactccttcgttcacccggcgcgcgcagcgtatcggtgtaacacgcgcgtagtgtgcgtagtgccgttgagcggagcgggcggcgcataacgtgatcgacgatggttaaggtgtctggtcgaagcgccgtaacacacggacgatgggcggcaccccgaagcgcggctcctctcggggatcgtaccgtgcgcgcggcaaacaccgtgcgcgcgggcgagaaatcagacgtcgcacagtgcatccgctttacggggaatcgcgagtggggggtgcgagcgccgctggtgacatgcgccgtccgggcgcgctgagacgcagccacgggtgtgtagatttgatatgacggggcggggggcgtaggaggcgacggagcggcacgggcgtatggagcggggggaccaggggctacaggtgagggaggcctgtcgagtttggcaacgaggggcactgagttggatagggaacgcggagcgcggcgggggcaggaagaggagagaacctgcgggggagaaggggcggggaggggctctgggtggactagcgcctccgcaggcctggggctggtggtaaccgctcaggtcaggacgggggcccagcgctggctgtgctggactgaccgccgggctgcttcctcggggcgtcccgagccaggccacaggcggtcatgctgctggaggcctggggaggttccgagtgctctgcggactccaacaccgtggccatgaacgggagggtggacttcccgaaaaagaagctggcccaccaatgacccgggtcagccttggggagacctggggggtggggaatggcttccccggggcactcggtactgctgcaggagctgttgctggaagtggaacccaggcggcgccggtagtagtcgtgggtggccacgagcgagccgctggaggggatggccgccatgctttagcttgctggctggtgggatctgggcggcgacccctcgcgggcctcggcgcacgatcacgggtggcggggacgggggcgctaggccacggagcccatttgcagagaagaccgcgggaagccgcgccacgacagagcctcgtgccgaattcgccacccaggcctcgctc

SEQ ID NO: 323314 - DNA, 1050 bp, Homo Sapiens
  misc_feature (71)..(71): n is a, c, g, or t
ccattccaacccggtggattctgggaatccccataattcataggtgtaagtccacataataggggaggctnttagtcctttggggcccggtcttttggcagaacccttcctttttgctcctggtgagccccagtgataacccttattccaacccccttttcaaggctccccaaacactttggctcccctttctttttggagtctcctcccatatgtgcttggttgagatcccaatttccactgagcgggcaccgcttctcaggggctaatgacacctgtcattaacttgtctgttccctgttgaatttactggtattttaattggagtttctttcaggcactggtttctagcttttgagggtgtagtgtaacgatttggcgtagtgagtatttctctcttatgctggttcttattaactggagtctttggctcaggaaacataaagtactcttcattctttacagcagacttaggagtatatacattttctttgttctttaatttatttgcaggtgttctgcataaggctggagttaatgatttagattccaccccatttgattctgtccagtacttggtaaactgtgatgttcggggagtagcagcacctgttgataaatcatcttcacaccaatcatagtctattaatcccgccacataatttttatcacttgcggtcacatcttccagactccaattatttgacttgatgtctgtgaatggggtagcactggcttgtccacaggagaaagaagaaagccttaaacgaactggttttccccgagccttcttggctagaagcagaagataggtagccgtgaggtgatcatactgccacagtgaaattaaatcctccattgtttgcctgttgtttctgtgatgtacagaaagttctgttacgcaatcatcatcgaggtgaataaaaggattcttgctttgccactcaacaggatagttgtaatcttgcatgatccagggatggttcaatagatttttcatagaaatccgtttctttgggtccacctcgtgccgagttcgccacccaggcc

SEQ ID NO: 323315 - DNA, 1039 bp, Homo Sapiens
ttttgaagtggcatgttttttccaaggcccatttgcgtgtctatgaggtgagcgcccattttattcaggtcttgtccccaatattttaagggccccagcttccagctgcaaaagtgccaatgtgggggtttccaccaaggggcttgggcattggaatcaggccggttgttttaaagggtattggcccccattcgggtgttccttaatatgccgcaatcattaggcagggttgtccatatttgttggccatgcggaggtggccatattttcagccaagtttttcccaatgtccagtctgccatcaaaagcatggtgcccgcagggggggttgaattagttactgtggtagggttcaacgtgggctccagggctgactagaagtttaacaacttcaaaatgtcctgctccagctgcacaccaaagagcagtggcaccatcaatgacatacccgtcgaagcggacggtgccagtctgctgagtctgcacccggtaatgttctaagagcaagcgtaccgcctttgcgtgtccattgcgggcttgcgatgatgaggggcgtggagcgctgccctccctgctggctgacatagccaagcagatagcggatgtcgctttcagaccggttgagaagcaaggcggccagagtcagcaccttgccctcgctggccgccttgtatacatagccagccaggccctccatggccgccgccaactccaacacccgtttggtcgccaccgctgcagctgccgtgcgcccccggaggccgcgttcgccagcgctttaaacctgggccctcacagcccattcaacagggcgccgtcgccgccgccgcgcccaggcagcagtgcggcccagggaaggcggagacgcagaggaggccgagtgccgcgaagggcacgtccgcgacccagcccgcgcagggaggaaggcggtcagggccgcccgccaggtcccaggcgccggccctggaccgaggggatctccatggcggacgccgccccgggcctcaggccctcgtgccgaattcgccacccaggcctc

SEQ ID NO: 323316 - DNA, 1081 bp, Homo Sapiens
  misc_feature (129)..(138): n is a, c, g, or t
taatagcgctctcccctatagggaggacgccggccaattttctcccctttttgttccaaagaaaaactggggtccggggaaacccagcttttggaccgaggggccccttttacattaccctcttttttnnnnnnnnnngaacaatagaacccctcggaagtagtatttgggtcttttcgttgggcggtgggtgggctgtttttttacggaataaaagcacccaacttttattcccgaagttggtgggtatgacaagtgatgccgaggtataggacaaagggagtgcagtgattgctgctggcaccgggagcggggagcaggtagggatcacaggcacagcagcgcggacccggcaggcccacttcttcttttacacacaagcatgtggcacttagcgcgccaacacacacctgttcagtttcacagggaacacgacacagcttttcaaaaggaattcttttaaacatttgctttcatatttccaaaaggggagggagggcaggaagaaccacacgccttccaacatttgaaaaaattccataaacccaacttaaaatcaaagaactcagagagcttcaatgcggagtcatcagcaactcgcaggaaccacacacatgattggacaagtctgtacataaaaccccaaaagaacatcagttttgtggacaatggtttcctctgctgtaaagaaacgtatgcatatatgatcagtaagcagctcacatctttctgaatgtcaaggtctacaggattgtctctgtccacctttggtcaatgggttcaggaagtgactcatgggaactgcactcttaggagaaacacttttgggaataattttattgaataacaaccaccactcaattacactaagcttcagaaattgttggatttgtttaattttgctgtgtacctatacattgtttagaaagtttcttttggcttaaactgaccatttccccccttctttttgagttttccatgattaaacttgcccaaataaaaacataacaatccatatgcaaagcatatctgccaccacctccccctcgtgccgaattcgccacccaggcctcgctacctt

SEQ ID NO: 323317 - DNA, 1056 bp, Homo Sapiens
  misc_feature (367)..(405): n is a, c, g, or t
ccccccaggggagggtttcttgggcccagtgacggtggaaagttttccctttacctttgggggattaaggggccacggtttccccggagttttgtgaggtttggggaggaattccacttaagccggggtcccgggggtggtttttccccttccggggagttttttccccagccttaggttggttccttgcccagcttcaaccccagggttgcctttcagcacctcgctccaggccggcctgtgagagcgcagagctgtacatagaatccccccagggggcggctggtatcaaagcactcaggcaggatgatgatgtaatcctctgaggaagcagaggactgactttgaacttcatctttgagatcannnnnnnnnnnnnnnnnnnnnnnnnnnnnnnnnnnnnnnatgacagcttcttcctcagcgatatggataatctcctccttctcatttccaagtggtccttcaggcaaggcaaatgtcatctgcaaggacttctgtctgcaaggagggttgtggtctggggcagcatccaaggtaagggatcggattactgtctcacacacaaactgggtcccactcaggtcttcttctgcttcctccacagaagcaatgttctcagccttcctctttactgacaccatagaatcaggaagtgctttaaatcctgccccttcattctcttcctctatctgccccaagcctggcttctctattaaaggactgtcatgtggcagaggagacatgcagggagtcacatccacaggggtgttgtggggcactctctccaactcttgaacaatgtttatatccaacagctcaaaggacagcaggtcctgggcagtcagaagatccacagatgggatgtagagctccctctcactggcaacattttttgccttctgtgggatgcaggctgctgtcccttctgtctgctcagtcacttcaccaagctgtctttcttctttagccagaagaaaagtttcctcttgctggcaggtgagatcatcagttttgcttgagctgatccctcgtgccgaattcgccacccaggcc

SEQ ID NO: 323318 - DNA, 1365 bp, Homo Sapiens
  misc_feature (301)..(301): n is a, c, g, or t
tcttctcacacaatttttccgggtagggtcttgtgcggagcggggaagctcccccccttctagagccgcacacgcgctctccgcctcggggcggcgtgagttttcgtccgccctcctcccccacagaggggcagggtctctttttgcgccgcaccacccccttaagagagggggggtgtttccctgaggcgctgcgaacgcccgctcataagatctcgcgcagggggagattgtcgctcgcgtatatcgacgcacctactcctttgctgactttgcgccagagactcgccggggtgcgttntgggggagagaggggcgcgcgccaaaagagactctcggtgtctccccagagggagacagtatcccgcgccccccgcgggggagggggcccgggcgcccgtgtgtgttgatttcacaaaaaagcgccgatcttcccaccgggggccagaggggggagctgggagagggcagatgtgtggacaccccccctctccgtgcgggggggaaacaacgcacacggtggagggtggcctgtgggtcgcgttctgtcgaaaactcttctcccgtctcgttggtgagaaagggtgtcgaatcgctttgcgctgccttctcattgaaatgcccctggcgtgacaatgccgtgccctgccctgctgtgccccatggagcaagggtttttttccctttcagggcggaataagggggataaatcgctccctccctttcctccttttcccaaagggggttcctttcagggccaagggcaaaaggtccttctgccaagggacttctgtttgccaaggaggggttctggtctgggggcagcatcccaaggtaaggggatcgggattcctgtgtcaccacaccaaacttgggtcccacttcaggtcttcttctgcttcctcccacagaagcaatgttttccagcctttcctctttgctgccacccatagaatcaggaagtgctttaaatcctgcgccttcattctcttcctctatctgccccaagcctggcttctctattaaaggactgtcatgtggcagaggagacatgcagggagtcacatccccaggggtgttgtggggcactctctccaactcttgaacaatgtttatatccaacagctcaaaggacagcaggtcctgggcagtcagaagatccacagatgggatgtagagctccctctcactggcaacattttttgccttctgtgggatgcaggctgctgtcccttctgtctgctcagtcacttcaccaagctgtctttcttctttagccagaagaaaagtttcctcttgctggcaggtgagatcatcagttttgcttgagctgatccctcgtgccgaattcgccacccagccgtc

SEQ ID NO: 323319 - DNA, 1726 bp, Homo Sapiens
ccgagaacacacgtccgtggggaaggtgacaccataagggtcccccccaccggcggatgttcgtcccttccacaaagcccccggggttgcggggttggtgaaaccacccgaaagaggttccccaggaaggggggtgtcaccccatgggtcgctgccgccaatatccgtttgtgacacatcagggtttccacctggtttggggcccgcaatgtcccctttcttcagagcttgatgggcgaacagctcccccattgggccggaattcggagaggagcaccttcccaaaatgaccccgacccagcgccgccaggaacttgaaatcttcgagggtcagaggtgacttcctcagagggctgcacagggcggggcctggggtctcctgggtctccgaaggcagctcgggagcagtggattcctggatgggggagctcaggttcgattggctggaaggagtatcccgcgagctcttctgaggtgaagctgtccgagtcagtgccgaggttcagtttcttcccaccgatatgtcacccgtggtcacgggcactcggatcctggaggaagccccagggcttaaaggtgcctgtgcccgtggcattggggaatgagcctccggaagcagccgcacccacgtggcgacatcgatgttcatctgcctagcacgctggaacgccttcccttgctgcttggagaaaattttcgttctgccgtcggagccgaggaatcctctcaatgacagggttgcggaagggtgacctcagccaccaggcagccctggggttccatgtccagctgcacctcatgcctctcattgtccaagaaatcctccaacttcaggaatttgagggcacacagggcccccgctggtcccgccagaacacagccaaactccagttcccgtgccctttccagctcccagagtgaagctctggtcccaggcattggggccacatggcttccaagacgtctgcccccaccactgtgttatccagcttaagcacagtgctgacttcactggtgttctcggcttctgctttgaggctgctccggccactgaggcttccgcttcggctgtaaaggccccgggctgggcggctcaggaagggggggcggctgtctggggtcccaggtccccccattgagggggtagggttccacgggatggtctctgggaggtctctgcagcccaccactcgtacctccagggtccctgtgagcggcgcgggcttgcacagggtgctgtagtgcgtggcgggaaagggcccggccaggcgggtgctgaaggcagcggaggaggccgcagcgagctcttctcgcagcagccgccccttggggtggtcggcgggcagctccccaagtctccgctccagagcctcccgcagcagccccagcttctggttggattctgtcaatttctcctgggcctcgctgactgccttgcggtccggggccttggcagcgctgagcaggcgcagtacgttcttggcaccctcggccaccgcgtgctccactcggaagtggtgccgcagctcttcgatgcgcagctccacagcccccaggtcaggactcccttgggtgtcatccggggctgcctggttctccagctggccggcctgcagcgcccggcggagttgcatgcggatgatgtcaatcttggtcttactgtcctgcaacatctgctgggctgtcagcagcagcttcccctcgtgccgaattcgccacccaggcc

SEQ ID NO: 323320 - DNA, 1668 bp, Homo Sapiens
cttcactggccaggtcacctgtcctccctttgtttcttgggtactcgctcgtctcctctttttctcctcctattgactccctcgtctcaatgcacggcgtctcccggcgctgacccaatgtcccggtcggggcgctggcccgttgcattgataagtcgtccatcccactgcctagcccgcctctactgcttcagacagctccttcagctgatccctgcaggaaattccccagcaggtgtcccagaaggaacatgatgtcttctcaggccctgcctgactcttcagggattggagagaagccacccactccctcatgccaggtgcaatgctcccagtcccttttcaagagggggaagaaccaccactgtgggccccagtggccccatctcaggaatgacaggccattgctgcagggtggcacacttctgaggctcttaggcccctgtgcatctggatgaaggagaggacgtcctccttggacagcttgtcctggtcctggggcttctgggagtcatgcacacgaatgccatccccccactcccagaagagccggccatagtagcaaatgtgaaattggggcaatggagtctgcagggagcgtcaaaagtagagtccttggttttcttgttgtaggagaccttcttcttgaagctttttgctgaatccccatagtccaggggctcattcactgtcctgacgatgtagaggcccatgggtacaaagtgccggtcatcacgccctgtgtagactgagctttggggtgccactggagcccttgatgatcttcatctccaacctgacaaaatcttctccatctcttccagtctgtacacctccttcaccctgatggggattcatgtcgggccgactaggcttggaaacggctttcacaaatttcatcggcaagctgatttcgctggttaaagtgctgttcccgaacgtcggtgccattcagcacaaggacatggaggatgtggatggcactgatcttcctctgggctttcccctcccctttcagctcatgcacaatttccacagatagcagagtgtcccggggcagctctgtcttcaggtctagcttgatccagcggtctgactggcggccatcccatgtgtagatctgggatttccccaggccgatgaggaacttctgctcactgccagataccatgcagcggtagtcaaacacagggcggatcttctccagggttttagaggtgagcagtgtgggcttgtagctgaagatgtcaatctcagtgccctggattagctcaaagaacttcgatttagggtcggaggaagaaggagccacacgagcctggtctgggatcccccagagtcggaggcactccttccgtatctctgcctgtcgaggctcactcagtgtcgtgtcttgaacaaaggcatggattttcgccagagctttgatctgcagactacagtggctctcattggaccgtatcatgtagtcagtaaattcatggtctcccttgatcacctccagggggaccaccaagttgacgtcggaatccgtgttccgcagctgattgagtttaatattcactgcgaagaggtaatcccgaacatcatctatgcccaccttcaggcccttgcacaccacatacctctctcctcgtgccgaattcgccacccaggcctcgctaccta

SEQ ID NO: 323321 - DNA, 1182 bp, Homo Sapiens
  misc_feature (93)..(93): n is a, c, g, or t
cgagggcgaaggatgcggcattggacggtaccggtggggaaggtgatgcgcaggaggtgctgtatgacatcgcgactcctttcgtgtgtaaantgtgaaggctgtcggggtatggttttgctatgagataacgttttgtgtgagactcgcggagttgcggtgaaatctgttgcatgtggatcttgggtggagagtctcttggagggtgaaggttgatattgggttgtaccacattcgtattgtggtattcttgttggggtgttcacgtcaagctgggagggcctgaggatgagctttggtggcataatggggttttatccctgtgcgccccgttttacagggtgtttcctaacacgggttgtatgttggatccggaggggtacttgagggcaagcgattttttttgcttctgggggtggaggtttttctcattccgtccccaataagggcttgtaaatgctccacggaaaggagtgggctccgtcttcaattggggggggaggcattgatcgcagaatgcagttgtgcaattccaagggacggaacaggccatgtcaactgcacttctagttgatgatgaagagtttgattctccaatgaacagttttgcagaaactttcatttcttctctttcatcaggatttatcttttctactgcatgagatacagtgcattccaagacatctggaaactccctgaccaaatctgggttgatttgggaactccattcattcaaggttttttggatacaatcatgaagctcctcgctgtgcgtggacgggcacttcttccgcaggcggccccagttcagcaggttccccgtctgcaggtgcagggtgcgggcccgcgccaggagcgccttggccgcgcggctgtcggtgcccatggcagcggccgcccaggggccgcgcagcgaaggggctgcgggcgggcgggcaggcaggcggccgccccacaggacgcggtgcccgaggcccgagagagacccgagagggagcgcgaggctgccggcgccgcgcggctggagcctggtctgcgctcgggcccgagggaggccggacggcggctgggcggcggcgggaaaggaaggcaccggtggctgcggctccggctccggctactgcggccgcagcgggagagctgattccaaactgagggagctgtttcctggaagacaatccc

SEQ ID NO: 323322 - DNA, 1063 bp, Homo Sapiens
  misc_feature (101)..(109): n is a, c, g, or t
ttgggtttcccgaaaggcttgatttacaaaaggggccttttcgtttccattcaagggggaggcccccggaatagaggtgccccaggtggttcccggccccnnnnnnnnnattacggatctttttccctggggagcaaggctcgatttggtgtccctttttacagtcagcggcacggacgatcacatctcgggtgacctctatgacatagagcctttcttttaggccgactgcaatccctgtttgcatccacgatggcagctgtcaggatggccttgatgagaggcagcgagctgtcgtaggcttccaagggaacatgcacgacctgattcctcagccggtttttatgaaggatggactggagtccttctagaatcccaacccacttcctcttttcattctcattttctgtcagaatgagcagcgagctggtcttagaaggtgcacctaagagagaggccgtcaccctgaatatacatggaatatctcggcgtgtagcatgaatgacatttgaggccaggactgagctcacgggaaaactggtcattctctgagatccaagacttggctcgcaatgacaccaggctgggtggattttccttcaggcagatcatacaggaagagcttgcagtcacagacgactgcatatgcgcgctgccatcccttcttcacccccgtgggctttgggaccttgacatggcctttgtaggctgttccgatgcctcgctgcacgtccacgcccagaggcctcttggactgctcgggaggtattgggcacacctggggggcaccgtctttgcaggacacgtggcaagcaaaggaacacacctcgcaggcgtagccctgccggatcagcccaaccatcagggaggtgcagtggctgcactgagtagggctggagaaggacttgatgctgaactggtgagcttttggcttcggtccagccagagccagggcctgcgtggtgggcaacggcacagcggatggcctctgcgggggccgagccattcctcctgctgctctgatgcagccacagaccctcgtgccgaattcgccacccaggcc

SEQ ID NO: 323323 - DNA, 1062 bp, Homo Sapiens
  misc_feature (262)..(263): n is a, c, g, or t
gttgccatataggtgtataataaagacggggtagcctttcctctggggatgttccaaaaattatttaaattccctgtcacgggacacttttgtttcactaataagtagacacgtgtaagcaatcccgtcaacatctttgcacttttattttttggtataagtattccttaggataaaatcccagaaatggaattgcaaggtataaaagattattaacatttttcaaggctttaagatgcctttacggtgtatctgtacatcnntgcttccacacaaattcttctgtatagccagtacccaagctgcagctctcagcacaggtgaagacagccaggatgccccagtcaatgctcttgcccagtctgtcagccttcaggtagtttaggagctgaggcatgacctggaattccaatattctcttggcaccacaggggcaatctggaatatccttttcttgaggaatattttcaccagaaatccagatgggggcaatacctctgccatatctaagaatctgttctggttcaagggctatctgagttttaaacttctgaaaaattttatcttccctggattcatgttttgccatggaatccagttcttcctcaagtgcttcacccatgctccctataatctctgagtaatcttccttttccacaacctcaggcataatctcatcttctgtttctattacaatttcaaattctggaaaaaggaagttgtggtctggaattatatggtccagatgatctggttgtgcacaagcctgcttatgtcccaatctccagtctagggtctgatgctccttgctgcagtaatatgctttgtggcatctggagcacgttttggggcctaaacagccacaaaccctgcagagatgagcaccagacttaagctggagacacactgattctcctgtttctgggagaggattctcagaaggtggctcatatgagtaaaaatcgtttttcctgggtagttgattcctaaaaactcgcaggccggcacagcacggctgctcgcggcagcagaagagcctcgtgccgaattcgccacccaggc

SEQ ID NO: 323324 - DNA, 1133 bp, Homo Sapiens
  misc_feature (34)..(34): n is a, c, g, or t
  misc_feature (70)..(70): n is a, c, g, or t
  misc_feature (288)..(288): n is a, c, g, or t
cctatgaacgcgtagaaaatgcgggggtggcagngagtgtagtcgcagaagccggatggcgatcacgtgnccgtgtccatgggtggctgcggagcctggcgtgggtcgcttggtggcagctctgacaagtgtcatatactctccgaggagcccaggagtaggacgctatcaacgtggtgaagaagcgtggcgtggaggagaaccgagaggcggaatgaatggtgggcgaataacagtacatgctcggggctaaagtggcgcatgggggccggggtggcggcgcgggtngacacgggaattaaaggtgacgagaaagtgagagagggatgctaacagacagtgggggtacgaactcgaaagtccaccaccgcgcgggaggggtgtagatcgtcggcaccgccacaccgccggggtgcctcccaaatgagcatagttagtatgctctcagcggggggagccggagggaagcgaaggcagcggggaccgataggtcaggcggaggcgacacttcaccaggccgaagcgcgccacgccggagcctgcagcagcgccgggtccgcggggtacccgcgaccgcgtcgggcccgagccgcgccactacggccagcagcgtggccagcgccgcctccagcaccaccgctgcctcggcgtcgcccgctccctgcagcgccaggtccaggcgcacagctcgcaagcggtctgccacgaagctggccacctcggcgcgggcgatgtcggcgctctccgccacctcaccggccatgtagcgcagggtggtcagcaggagggagggcggacgcatctgtctgggcggtggccggggcttgccggcggcgggtcggctgtactccttcaccgcgcggtgcggatccgtcgcggggcgggtcctggcggcaacccggcaccacctccaagcggtgcaggcggtgctccctttcgcgctgggcgcgctcggcggccgggcacatgtccgggcaggtgcccacgggcagctcgcagccgggcatgagggggctgcggggagacggtgggcgctcagcatcccggcctcgtgccgaattcgccacccaggcctcgcgacggagggaggggagtgggcgtgggcgtgtgtggggggtgtagttgggtgtgta

SEQ ID NO: 323325 - DNA, 1244 bp, Homo Sapiens
cacgggtagactggttaacgagaagtgcccccaagagtggcacgagtggtatcagcagcgtgtaaatgctctatagaggccgtctgcgcagacatggtcgtcgatcgagaaggccgggccaatacgctgcgcgtgcaatcgttggtgccgtgcggggcatcccgcacgggttcactgcgtcgtcaggctcgcccaaccggccgtgcgagctgggcaccggtgtactccgcgtgttgcgttctcaagagtggcaccgcggatggggcctccgttaggcatgagaggcggcgggtaccaggaggccgcacgtgacgctcgtgtccgcctataagcgggttaatgaggggatgttggtgtcgtgggtagatgaccggatccctgaggttggggggcaggatagtatacacgattgggtgtgacttttggagtgggacggatgctgggtcggctcgcggacttaggcccccggccgaccgcccttgaccggccgggtacgccgtggtcgtgcctgtcattaagtgccccgacaggagggacagttctgtgcctttccgtccaagggcagcccgtgggcctggcacaggtcccgtgcttccctgagtccatccagggcccaagaggttgaccatgaagccccagaggcaaggtctggcccttgggggtgctaaaggcacgagcgaagcgggccagggcttcccggcgggcatggcccacatggcactgcacagcgcaacttggcaggtagggcagggtctggagcagacggaacaggcgggcagcattgccctctcggaaggcagcatctaccgccaaggccttgcggaggggcgggcaggcgcgcagggcagcaggcagctgtagaacctcatgcagggcttccaccgagcccaggttatagagcagaaagaggccctggaaggcgggttggcgggggtgcggcccggcgccccgcgcgtagcagcgccgcagcgagccgaagccctcctgcacctgggcctgcagcagcaccgggtccgcgggtccccgcgccgcgtcgggcccgagccgcgccactacggccagcagcgtggccagcgccgcctccagcaccaccgctgcctcggcgtcgcccgctccctgcagcgccaggtccaggcgcacagctcgcaagcggtctgccacgaagctggcctcgtgccgaattcgccacccaggcctctcatcaatcggggcgggggggttggcctctcctcggttgggtgtct

SEQ ID NO: 323326 - DNA, 983 bp, Homo Sapiens
aaaccggcgtggaggcttttagccaggtaccaggccccccattattggtttgccatttaactctggccagctgaaattgttttccccatcaccccccaaggtgtggttaaggattttatatacaggagtttacaaaactgcgtgactaaaaaagcttcatggcactcctattactcccgctctggagagttggtagaaaaaaagaatgtgttttgataaaccctctgatcctcactgttcacatccatgtaacagggctcggtcccctcaaaatctcatgatacagcttctgggaaggagttattaaccctgtcacttcccagattgctgatactcacaatgtttccatttgcagattcctgccaagaatgatgaggcaggattaggcccaactggtgctctcccactagctgctgtatttacatacacttctgttcatcatctctgcccgtttcaggagtagctgagagcttgaataggtggcggtaagctcccaccaccaccccatgcccagtgcagctacccgcctgaatgaaggcagctcctgggacatgtgaggtgtgaggagtggggggaagatccagggaagtcagctgctttgtatttgggtttgtgggatgtaatggccttggcaggaatggtggggcctgaactggtatcctgcagagaaatgcttctatatccatctatcacctccttgccctctgtcttcccaatgctaagcccatctggtcttccttgcatgcttttctatgctctggtggtaagtcaaatcctttaagtgaacccgacattggaaacaaatcagtttaattaaagtctctctgctgagataatgtagtgactgctaggattccagatatttaactagaatctaaatagtcaagagttcttccttttctttccctccttggctgagagattcactactctgggtggaactgtgccctcgtgccgaattcgccacccaggcctcgctacct

SEQ ID NO: 323327 - DNA, 1124 bp, Homo Sapiens
gggggaaatttttagtgtgcccatataaggttccccgggacttcttcccggggaagtgtaaagactggggtgggggcttaaaccaggccagagaggccccctggttttctttacctttatttttcgggcattcaccttgatgtttctgggccacttccaagggactgacaaattttgtgtgagaagaatgaaatcgccctttttatacatgtgaaatggtaagcttttaaacttgcctccagaggcatatgcttggtgggggacattcggaggaggttcatgaatatagaggaatattgaaggggtcacacaggggaaccaccttttcattatgaaaaactgggagactgccatttaaatggtttatctgcatgattaaattaatcacatttccaacagtgcatcaagcatctgagaataacattattttgagtaaaaacagaaactcttcgggagagaccccctccccacaggtcaggctgctcaaatgtccaccatgtctagcagcgcagagagatggagctcagaggcaacttcctcttcccttgaactccggatcagcctttccaggtgctttagtcgttcgcctagacacgttcctgtcgcctctgacagctgcagttgctccctcatcatgtcactctgtgggctagtagttacagatgttttcatcacaggttcaatagtgtgagaaagagacactagagtctgaggaagatagaggggaagggaagttaaatccgtaaatgctcctgagtcttcagacaaccattgctgaagctgatcttcaaacctcttgttctcttctttctccagcagcagactgctcgacaaacactgcgccaagagctcctcagcagaagctcctcgcatcagatcctctgtgctgggaatcctcccctcttgagcacactctgtgctcctcttccagttacggtgcatgtgaagcaatggtatgggaaaattgtttgcagaaggatgaaaaggctttattgccaaacgtccctctctcagctgtagctccttctgcgtctgcaacctggcttgttcccacgacaaaggaacatcatattttttcaaatcgtttttaaaaaaatacacacatatctgaccctcgtgccgaa

SEQ ID NO: 323328 - DNA, 445 bp, Homo Sapiens
  misc_feature (13)..(13): n is a, c, g, or t
  misc_feature (35)..(35): n is a, c, g, or t
  misc_feature (220)..(220): n is a, c, g, or t
  misc_feature (430)..(430): n is a, c, g, or t
ggttgtcctgaanacctcggggagcaatttacggnatttaaccttccccttcccccttctatccttccctcatacctcctagtgtcctctttcctcacacctattgaaccctgtgatgaaaacatcctgtaacctacctagccccacagagtgacatgatgagggagcaactgcagctgtcagaggcgacaggaacgtgtctaggcgaacgactaaagcnccctggaaaggctgatccggagttcaagggaagaggaagttgcctctgagctccatctctctgcgctgctagacatggtggacatttgagcagcctgacctgtggggagggggtctctcccgaagagtttctgtttttactcaaaataatgttattctcagatgcttgatgcactgttggaaatgtgattaatttaatcatgcagataanccatttaaatgtatt

SEQ ID NO: 323329 - DNA, 1104 bp, Homo Sapiens
aatctaataagagttaatatctttgcttttgagttttttttccaaccttaaatattacatacatacaccaaaaattacatagctgcaatgtgctcaacagcatcctctcggcctggagcttcacattatcaaaagcttagaaaacttgtaaacctctgggcctgtctctgggcactaggagagcccccgcaggccgtccccttcggattgagcctgcagtttgtaagcgaagggctgacagtaggccttctagtccaagagagggctggctcgcttggagttcagtgagctgcacgcctgtcccagtgtgaccatgtgatgggggaggggccctagcacttgccctggccttgtgcagctgctcttgcccccagcagcctccgacagaagagcaaggcacctatagctgttgctttccctgcagctccctggtcctcaactccatgtgcatgtgtgaaggccaccacctctcctgggcgtcacccggaacctagcctggtcccaacctctcttagagagcaagttcaacaggcctgagggctataacgtggtcgacaggccatgtatagccgggagtcagtgacagcagctacaactcccaagggatagtgttgacgctggaggactagggaggacctgggtggtggtggcagcaggagggtctgggacacagggaggcttgagttgaactaaacaggttgaaagggaccaggggaattgttggcgcaacccacacttcatgcaaggcacatgtgctctcctgcgggtctgcagggaaccggcccagagagccccgcggcaggccctggaacacccgcctctgacctgagaaggggcagcaagggagcaagtgccggacattctgctggggtgacaaatggaaaatcggcaacagggttccgattttctttgccacaggggacccgcctgttgaaagctcgcttcaaaatagaaacggcagcatctcaacacacttcttgcacttcagcatcaaactcaccttggggagaagagggcagtgggtttgcagtggggacagaggggcatggaagaggggtgattccggggggcctcgtgccgaattcgccacccaggcctcgctac

SEQ ID NO: 323330 - DNA, 983 bp, Homo Sapiens
  misc_feature (225)..(262): n is a, c, g, or t
  misc_feature (273)..(279): n is a, c, g, or t
  misc_feature (281)..(284): n is a, c, g, or t
  misc_feature (286)..(295): n is a, c, g, or t
  misc_feature (297)..(318): n is a, c, g, or t
  misc_feature (320)..(327): n is a, c, g, or t
ccaagcaaccagattaatctgcagaaaaaaaaggatttcaagaaagttccttggattcccaaaaaaaagcccgctccatagggggggtaaatcccggggtactgcagcggattcattaatgcagggtaacctgggctatggaaattaattcggctccctttaggggggccggcagatttaccacttttacaagaaaggtgggtcaggaaacagctatgaccatgnnnnnnnnnnnnnnnnnnnnnnnnnnnnnnnnnnnnnngcctcgaggtnnnnnnntnnnntnnnnnnnnnntnnnnnnnnnnnnnnnnnnnnnntnnnnnnnntcgcagccaaagccagcctccgactttcttcccttaacttttccaagtctaactcctctaacaaaatgctggcgtttttgtttgcttcagcagcctgtctatctttggcttgtactattgactccatacaaagatgacacttcttcagcatctccttatcagtgatggttgctatgtatctcatacattcagaatctgatggaaactgattgacttctttgactaagtagcgcaccaccttcacatgaccctttctaaatgctgccataagaggagttatcttgcggttatctgctgcatccacatctgcacctgcttgcaccagtaactgaaccacatcgaggtgtccaccatttgctgctagccacaatggagtgttccccttcttgttacgtacatcaatatgagctcccctgccaataagaagctcacagaatttgtaatgccctttatctgctgctatggttaaagctgtatctcttgaggagggaactggaggggcattaacatcagcacctttatccaaaagaactcggcccacctccgcatatccaccagaggcagcttccattagtggtgtgagaccagtcttagctctgtgttcaacatttgcttttctatcaagcagaagcctcgtgccgaattcgccacccagc

SEQ ID NO: 323331 - DNA, 1103 bp, Homo Sapiens
  misc_feature (274)..(287): n is a, c, g, or t
  misc_feature (902)..(902): n is a, c, g, or t
gtagcgaggcctgggtggcgaattcggcacgagggtaccctccaaaaccaagagccggaggtggcccccttgtcctgcagatgggaaaacaggatggggagctggcaagaggagctgcttgttcccaccaggaccagaggaggctgcgtttccccgtttccatctctttccctggggtgtccccagccagacctgcgcgtcctgtccctcacatttgatcactgtgaccttctgggggaggggggagttgaaaatgcacatcggcctcagatannnnnnnnnnnnnnctcctatttggtgttaacatacacccaagcccacccggcccgtcgtgacctctgatctgtgcccactcctccggttccagacgcacctctctcctctgtcttcacagtggggtgtggggcccgtgggatgggcctcaggccaccaggcaataaccacagggcctgcagcagtgcccctgccagccccgaatcccacccccgggaccagccacatccacagcacaactgccccgctggagaggcaccatgggcgtggaggggcttcccggacaccgcccacccgggacccgcctcttccaccaagacagagacgttagcaacgcatggcgggtggggacctggggtgctcaggagggggtacccggggccccggccagagatacatcaattacacccccgtggggggacagccgatgggagccagcaccagcaggatccgagggcgcccccggacagaggtctgccccacccactttcctccccaccacctgttgccccagaaaacaaggcctgcccccggaaggcgagcgccccgaaaacccagtgttaccctgcacccatgaaaggtcccgagcgagtccttcaagaaaaaactcagctgaactcccttataangtgggatcccaccgcccaaagcttttatctctcctttgtaactccctctcccctatcgctttttcaccacgcctcccctcgttgccttccgtaccactcgctcttaacctactcaacatcatactagttgacgcttcctaacttagcacgtcccgctgcgctgattcctcgtgccgcctgccgggttgagtaccgcgaccc

SEQ ID NO: 323332 - DNA, 1091 bp, Homo Sapiens
ggagcgaggcctgggtggcgaattcggcacgaggcccagcacagcccggcggctcggcggtggccgcaggtagtggacgtggcaagggatggtgagggcgccgccgagcacgccctgcagtggcgcgtcgcccgcgatgcgcacgcgaaaagcgcggtcctctgtgaacgggtggagccggctggaacttaacgctgtcgaccctcagagtcccacccggtggcctccaagccccgctccaggatccctccttccggccccaggattccccggcccccctaggaccaggggccaggggccaggggccagggtcctgcagccctacctctaggtcctccaggaccaccccgacggtctccagacccatcccccaaagtctcccagtcaattcagcccccaggattccttgccctgctctcagagtcttccacttcctctccaaaattcctagaccacaccccagggtcctccaacctcgccccctgagtcctccagcccagtttcccagtctgctccctttagggcctccttcagggtttctcccagttccacccctttcccacctcctagcttcaggatcccctatcctccaccttaggggcccaaagccttgcacccagtgcccttccctagtcctgccccatgatttctccaacccaccagatgctcacagctcagcccttatttccaagtgttccagcctggacgctttcccaccagccctccaattcttctctcttcctggggcccctaagcctggaagcagttggttagggctgaaccagaccgagacggtgaccccaaatgggggttgcttacctgagctgtctccttccagaacatctgcttaaagctgcaggaacctgggcccagtaccagggctggccatcagggggaaggaacagctggggccctgctgcaaggttgaaagaggggacttgaaaaagggaaaggagggggttaaaacctcaaggatggaatttcccccctggtttccctataacacccttgggggggttccaacctattcctgggttcccgaaaaaccccctaactttaaattcaccctagagaatccccggattcccgaa

SEQ ID NO: 323333 - DNA, 1086 bp, Homo Sapiens
  misc_feature (601)..(601): n is a, c, g, or t
  misc_feature (626)..(626): n is a, c, g, or t
  misc_feature (632)..(632): n is a, c, g, or t
  misc_feature (958)..(966): n is a, c, g, or t
gtagcgaggcctgggtggcgaattcggcacgaggcactgtcctgaggctgtggccctcagggacccttacaccctttggcttttgtgctgggccattgactgtgccctcgctagaggcagcttctccaccccttcctcacaggtgacgggtgaagctgccctgcggggcacgacgctgcagtcgctgggcctgaccgggggcagcgccaccatcaggtttgtcatgaagtgctacgaccccgtgggcaagaccccaggaagcctgggctcgtcagcgtcggctggccaggcagccgccagcgctccacttcccttggaatctggggagctcagccgcggcgacttgagccgtccggaggacgcggacacctcagggccctgctgcgagcacactcaggagaagcagagcacaagggcacccgcagctgccccctttgttcctttctcgggtgggggacagagacaggggggccctcctgggcccacgaggcctctgacatcatcttcagctaagttgccgaagtccctctccagccctggaggcccctccaagccaaagaagtccaagtcgggccaggatcgccggcaggagcaggagcangagcggggagcgggatccccagcangagcangagcgggagcggcccgtggaccgggagcccgtggacgggaagcccggtggtgtgccaccccgacctggaagagcggctgcaggcctggccagcggagctgcctgatgagttctttgaactgacgggggacgacgtgaagaaaacgcttggccccactcaagagtgaaccggaaaccccctggaaaaaaccccccctgggggaccaaggccttccggggaggggcaaaataaagggaaaaacttggaacgccttcccccaaggggggcttcttaaaggggctctggttcccccgaaccgcctacgatctctaaagggggtattcttnnnnnnnnnaagcaagacacaatggggggcgatcttttcaaaacctctcgtcccgagagaaccccacctggtgtcggcaccccgcccagtctgggcaattttgtgacacgtgggcttcaccaccgcccc

SEQ ID NO: 323334 - DNA, 1258 bp, Homo Sapiens
  misc_feature (819)..(873): n is a, c, g, or t
gagggatgcacaagtctttattccctgctggcagaggaggtgttcctgtggctggcggagtgggcacctcaggctggcagctctcacctcttgctggccggcagcttcagccacttgggcaccttgcccaggctcctcttcacgggctgggccgtccctgggatgggctcaggggggaccagcgccccctcctcagcagctggctcagacttaggtgcagggtcaggggctggcaatggggaaggggacccggcggccctggacatgtacctggccaccagcacgtcggctgtagatggggagatggtgtgttctagcaggccaggttccaggtagagacctgttggttcttcggctcccaagtgcaccagagcggccggggaagaggtttcgcctgaaagagggtctgcgtgtggtcgtccaggactgttttttgaggggtggatgaacaggtaaaatggagagctcggggttccccaggtggctcctcacgaagtctcgcaagtcccccactgtctcgctggggcggaagaagccctgtaggacgtagcggtcggggaacaggaccctcagagccacctttgggtagcgctccagcttctcctttatctgcgcctccctgaaggccttggtcaccaagggggcttcttccaggcgcttccgctcactcttgagctgggccaagcgtcttctcacgtcgtccaccgtcagctcaaagaactcatcaggcagctccgctggccaggcctgcagccgctcctccaggtcggggtggcacaccaccggctcccggtccacgggctcccggtccacgggccnnnnnnnnnnnnnnnnnnnnnnnnnnnnnnnnnnnnnnnnnnnnnnnnnnnnnnnctggggatcctggcccgacttggacttctttggcttggaggggcctccagggctggagagggacttcggcaacttagctgaagatgatgtcagaggcctcgtgggcccaggagggcccccctgtctctgtcccccacccgagaaaggaacaaagggggcagctgcgggtgcccttgtgctctgcttctcctgagtgtgctcgcagcagggccctgaggtgtccgcgtcctccggacggctcaagtcgccgcggctgagctccccagattccaagggaagtggagcgctggcggctgcctggccagccgacgctgacgagcccaggcttcctggggtcttgcccacggggtcgtagcaccctcgtgccgaattcgccacccaggcc

SEQ ID NO: 323335 - DNA, 1122 bp, Homo Sapiens
ggggggggtggagacccagggtaaaattacaacttcggggttcccccaggtggttcctccggaagttttccaaagtcccccactttcttgtgggggcggaaggaaaccctttaggatgtaccggtcgggggaacagcaccctcagagcccctttggggtagcgctccagcttctcctttatttgcccctcccgaaagcccttggtcaccaagggggctttttccagggcgcttccgcttcacttttgagctgggccaagggtttttctcaggttgttccccgtcagttcaaagaactcatcaggcagctccgctggccaggcctgcagccgctcctccaggtcgggggtggcacaccaccggctcccggtccacgggctcccggtccacgggccgctcccgctcctgctcctgctggggatcccgctcccgctcctgctcctgctcctgctggggatcctggcccgacttggacttctttggcttggaggggcctccagggctggagagggacttcggcaacttagctgaagatgatgtcagaggcctcgtgggcccaggagggcccccctgtctctgtcccccacccgagaaaggaacaaagggggcagctgcgggtgcccttgtgctctgcttctcctgagtgtgctcgcagcagggccctgaggtgtccgcgtcctccggacggctcaagtcgccgcggctgagctccccagattccaagggaagtggagcgctggcggctgcctggccagccgacgctgacgagcccaggcttcctggggtcttgcccacggggtcgtagcacttcatgacaaacctgatggtggcgctgcccccggtcaggcccagcgactgcagcgtcgtgccccgcagggcagcttcacccgtcacctcatccctcgtgtacacgcagactggggtggccccgccggggtgctgcaggcactccctgatctgtggaaaatggctgagaagctcccagagggtctggcctgaacagaaagagtcctgcaacctcgagccatcgtccagctgcaaagcgatgcgaaccatgttctcaggcccctcacggctccgggaagcgggcctcgtgccgaattcgccacccaggcctcgctac

SEQ ID NO: 323336 - DNA, 1087 bp, Homo Sapiens
  misc_feature (1062)..(1062): n is a, c, g, or t
taggtggcgaattcagcacgaagccttgacaccctggcgggggttcgctggctgcagccccggctccggcccccgcaagagcagcaccccccggggaaagacattttctgctcccaccgagttggcaaggcctgcttcctgaatctcctgggtgtgtcttaactgacagtcccagcacctcctgaaagccccactctcctccagtggtcacagtgagaaagatcatgggagaaacagaagggaagaaagatgaggctgactataagcgactgcagaccttccctctggtcaggcactcggacatgccagaagagatgcgcgtggagaccatggagctatgtgtcacagcctgtgagaaattctccaacaacaacgagagcgccgccaagatgatcaaagagacaatggacaagaagttcggctcctcctggcacgtggtgatcggcgagaggctttgggtttgagatcacccacgaagtgaagaacctcctctacctgtacttcgggggcaccctggctgtgtgcgtctggaagtgctcctgacactctgtcccctgccccgtcccctgcaaggccttttcctgccactcatctggggtggggagcagccctaggcaggtcctggtttttccaaaaagagttggggtcttttctttttgtctttgtgtaccagtttcctgagccacgcccagtgtgtgaacttgacatctccatccccaggctctcaacctgtctccctcggagtctcaggggtgtggacggggcagcggggcatgggtctgtgtgggaaaactggggggtgggggccgtgtgacagggtaaaaagaggcgggaaaatcaaacctttccgaccaggcaatcatcctagttcccctttttcctcaagagctggccttccccccctagatccctgggaaaagcccaccgggcccagcctatccccgtgtggctggccgtggaattggtgtcgaccgtacctttgctccttaacgtcgcgactttcataaatgtcccccccacagacacaaaaagtctttcttctccacaggtgtaaccaggganagtttattccgcctcggtgagcctg

SEQ ID NO: 323337 - DNA, 1064 bp, Homo Sapiens
tgtggtttcccgcccaggggggagacaacctttttttcaagccaggcggttggtttccagggtattttttgggctttcgggggtgccagagttctgggggtcaaggtggtttgggctccttccccggggaatgagggtattttttccttccacgggccaaccgtggtgaagtccggagggggcctgcagggcctcaattgactgggccttcactttctgccttcctgtctttccgctggacggagacgatcacttggactacatcacccctgggctttctcttttcacacatatgattaggccaactgtggagcaaacaatgacgatgacgaggctccctgagagaaaccaccatacccagtgggagctgctggtcccagctccggccttcgtcaccagccagctgcacttggtctggtgctgacattcctccagggtcccattgggagagaaggtccccggggggcagttctgacacagggtgtcctgactctcggtgcctcccttctgcaccctctggcccgggctggaggtggcgtaagcgcggcacgcggcgcagtggtccccgtcctggacgatgcagaagtggcctgggctgcagccacacacggcgttctctgtcctggagcagttccggctcgcgcgcaggcccatggctgggtcacacatttggcactgcagacacttgcttaggccattgaggtgggcaatgtaggtgcctggagggcagggttcacacactgtgcccgtcagctccccgcaggcctccttcacacgataacctggactgcacttggggcagcactcggagcccactgggtactcgtcctccttgcaggacggcagagctggggcgtagcagggggctcccaggaaggtgagatacagcaccagcctcaagacgtcggttttgggggtggatctccagggaggaggcccccagtctccaggaggctccatgcctcaggctcagaccggcagctcgggaacccagctagcaggatgaactccagcagaggaactcagcgccattgctgcggccctcgtgccgaattcgccaccca

SEQ ID NO: 323338 - DNA, 1451 bp, Homo Sapiens
taggagattcaaggtatataatttattttgagaagcactctgtaaggcaaggatgcattcaaaaaatggctttgaggattaatcttctctttaggtaatttgcataagaacaataaaagcattttaaaagtccactgccgccttagaaactcatcttcttccacacaggcaaatttaggtcttccttgtgatgttctcgaaaaaggaaccttgattctctgagtgaatatatatttaaccacatacggatccaaagcaaaaataagggctttaatttcttctcatcttgatttctgggatatctttcaatctcagaataagctgaagaaaactgcactgtaaacaatttctggggcagactatctagtcctcctcctaggagatccactgctcccatctgcatggaggacacctgtggcacattgactgggggaccgaggtcaaggtttaaaagatcccctagaagatcaccttgagagggggataacctgaggctgttccaggttcgttgcagtggtagtgccaacagggctgtcacctgcatcagtgctcccatgatgaattggcaagtgtttacgatgaattccatgacttctttccacaaaagcattgggaggcttatgatacacagaggccaaagaaccaatgtggcagattagctcatccaagcagagttggctcaataaggtccgtctcctcagagatcagtggcttctcagacaagactacttctttagctgtaacagggtcagttgagagaaggcgccaataaatatagccccggtctcgaaggtcaggattatcagaatcctgtgttgccaaactcaagacctgctggactagctcctgtgtttctgatggtttcttgagaaacagcttcactatggcagtaagcagagtgagctgcacctgggtgctttcatcgtgaaaaccctccaggaagctttctagtaactcatctgcattgtcaattctttcagcatattctcccacaatccaaatcatagctgctcgagcatctggctcatccagcgagtctaagttctcacacagagtggcgatgatactttcatacttgttggggtatttgcggaagatgtccctgatgacaacaattgcttcttggaccacataattcactttggtctggattagatcaagcaatgtgcttacacagcgctctgcagattgctccaccttgatggcacaccgtccaatggcccgcacagcttttcgaacaaagtcaacatccacctctgtagcatattctttcagttctgccagaacctgagcaatgttggcttgagatgccaaacgaatcatgatgtccaacttctctagtttaacatagatgggatcattgtaccttcacaaagaagactttgatttcctgcttcaagatttcagcggacgcgtgggtcgacgatatcccggtattccggaccggtacc

SEQ ID NO: 323339 - DNA, 971 bp, Homo Sapiens
  misc_feature (137)..(197): n is a, c, g, or t
agacctagctgagcgactggcaggaagcgggacaggtctaggagtcccttagggaataaaccagccccgtttctatcagcccggccagcatgcaggtctccacatcaccatctagagtatcacgcacacatctaccnnnnnnnnnnnnnnnnnnnnnnnnnnnnnnnnnnnnnnnnnnnnnnnnnnnnnnnnnnnnncacacatacatatctagaatgtgtatccgcggcgcccagaagcctcggtttggcccacctgtgagtggggcagggaggggttccggttgtgcagagaacagagtgttctgggcaaagaggaaatcccacagcagcgcagagggacctggggcctgggaggggcagggctggggcaacccggcttggcggcaaagcccagccccttctcagaccagctccccacattcctgaattccacttccaggcagaaaggagtgggctccccctactccctcagaggaactgactcaccggctgtcctagaatgggcaggggcagagcgaagttctgggtgggatgaccgcactgggggaggggcctcagtccagaaacctcgaccgctagctccacctgccttggccaccagggcagccccaggggatccgggctgctgggcagcaagtcggcgggaccacatgcctgggtctcaccctcagctccgagggccgagggctttccccaccccaccctcctcctggcgggcagtcggccctgtctattcatctgcgtcaggcttagcccggggggccccccgtgtgtgccccttggtcacgtgtgtcgtcttcaaggatgttttgctgctgtggctcctgctgtgtcccctcctggcccatcctcatcctcatcttcatcctcatcctcatctgtgcaaccgcccgtcctccttttctaagtttctgatgtttgtaaccagacccagctgtgtcattaaacagacccgttcttgctgtaaaa

SEQ ID NO: 323340 - DNA, 884 bp, Homo Sapiens
  misc_feature (50)..(67): n is a, c, g, or t
  misc_feature (109)..(109): n is a, c, g, or t
  misc_feature (111)..(111): n is a, c, g, or t
  misc_feature (124)..(124): n is a, c, g, or t
  misc_feature (131)..(131): n is a, c, g, or t
  misc_feature (133)..(133): n is a, c, g, or t
gggtggggtggacagggactgttttctttccttggcccgggcccgggaannnnnnnnnnnnnnnnnnttgaacatcttgaagatggtgcttgaccaccaaatcagtttntntctgcaggcctcntgagttntncgggcagggaccgcactgttgcaggagcaggcagagccagcggaggccacacgtgggcagccccagccccagccgtcagccccacaggaccctggggagcgggggctctgaactagggatggaaagctgctgtccttcatcttgtcccagttacaaatatatcacctgtagaaaagggagactcagaagggacagttcactgtgctctttgatcaagagtcaccacggccccctcggagcctggtggccacagggggcatgcagacaggaggccggctcacaacggggtccggagcagcccctcggcaaagtctggggagccgagggctccatgctgccagctcggccaggctctcagagtggggtcagctcggcggcgctgggatcggggctggggccaccaagtggaggccaggtggggctggtggtggcgaggccgtgggccgtctccatggaggtgggccgtcctggcaggtagatgtcagcaggtgggcctcggccacagtgctcggggctgctgtcctgcaggacattctcaatggaagctgctcgggtcccttgctgtggtgacgacgactcatcaacctcttctgttatgaaactctcaggggagctgctttcccgcagggccagctctgcgccacccagtgggggaggggcgtccacgtcctcggagagcttctcctcatcctcttcgtggatgggggaagacggggaccgtagggtgctgtcgggggccttgctctgcgcc

SEQ ID NO: 323341 - DNA, 960 bp, Homo Sapiens
  misc_feature (332)..(332): n is a, c, g, or t
  misc_feature (364)..(656): n is a, c, g, or t
  misc_feature (902)..(918): n is a, c, g, or t
aattcccaaagaatttcttcaaaaggccaattttgcccaatgttttcccccccttttattaatgagggaaagaatggcagccaaaaaaggaacgggcttggccccggtcattgttcaggctaaccccacccagacccagcggctgagaggtccacattgctttctggttctgaggacttcttaaagaggttttttccttgtaaaatgacaaaggttatgggtttttgtccaacagtaaaaaggagattgctcttaaaggaaaggatgataaactcatttgccttcccttaaatgacaaattacactcaacttaaataacttgggactcttanaaatcttatcttttttaagctcttcttccaannnnnnnnnnnnnnnnnnnnnnnnnnnnnnnnnnnnnnnnnnnnnnnnnnnnnnnnnnnnnnnnnnnnnnnnnnnnnnnnnnnnnnnnnnnnnnnnnnnnnnnnnnnnnnnnnnnnnnnnnnnnnnnnnnnnnnnnnnnnnnnnnnnnnnnnnnnnnnnnnnnnnnnnnnnnnnnnnnnnnnnnnnnnnnnnnnnnnnnnnnnnnnnnnnnnnnnnnnnnnnnnnnnnnnnnnnnnnnnnnnnnnnnnnnnnnnnnnnnnnnnnnnnnnnnnnnnnnnnnnnnnnnnnnnnnntccttccaatgttttatgtgaaatttggtcagagatgcaagcttgggaaaacttaaatttttttaatactcatgggcagggaaaccaaatcctttatctcaatgaataatctatacttttgcaacactctatcaatcctctcctctcccttacctctaacggatacccagtgggtacacaggaaccctgtcaagctctaccccataccttctagattcatccaggatggtactcaggcatacagannnnnnnnnnnnnnnnnaactctcacctcgtgccgaattcgccacccaggcctcgctac

SEQ ID NO: 323342 - DNA, 1386 bp, Homo Sapiens
  misc_feature (71)..(363): n is a, c, g, or t
agtattaaaaaaatttaagttttcccaagcttgcatctctgaccaaatttcacataaaacattggaaggannnnnnnnnnnnnnnnnnnnnnnnnnnnnnnnnnnnnnnnnnnnnnnnnnnnnnnnnnnnnnnnnnnnnnnnnnnnnnnnnnnnnnnnnnnnnnnnnnnnnnnnnnnnnnnnnnnnnnnnnnnnnnnnnnnnnnnnnnnnnnnnnnnnnnnnnnnnnnnnnnnnnnnnnnnnnnnnnnnnnnnnnnnnnnnnnnnnnnnnnnnnnnnnnnnnnnnnnnnnnnnnnnnnnnnnnnnnnnnnnnnnnnnnnnnnnnnnnnnnnnnnnnnnnnnnnnnnnnnnnnnnnnnnnnnnnttggaagaagagcttaaaaaagataagattttaaagagtcccaagttatttaagttgagtgtaattgtcatttaaggaaggcaaatgagtttatcatccttcttaaagagcatctcttttaactgttggacaaaaccataactttgtcattttacaaggaagaacctcttaagaagtcctcagaaccagaagcaatgtgaactctcagcgctggtcctggtgggtttgctgaccatgactgggcaagccgttctttttgctgccatcttcctcatcataaagtgttggaacataggcaattgctttgagattcttggatagaagaggacaacattctgcacctgccccctttattttaaatctttggggaacagatgagtaactttccccactactctgccttcctgttcagtaactcttacttttgcctgaaggtaacaagcatcttctacttctccatctagagatttcgtgtgtgtgccatcaaggttagcaaacttcatacgtagcctaacacttaaaaaatgcactcattatcttaaaacctaataaattccacgagtttcaattgtggttctcctctggttgcccttcctaaaaaatgagctgaacgatgacagctattttctctttacatgcttgggttatgactatcttaaacgttcttattctaacactaaactgttgaagcctcaaggtattacagaagcgctcgcaccaggcccattggtctcctgggtcccggacaacctgtccatataccacatttgctgacctgtgctccctgcactccactcacacgttgaaagctcaaactacgtcttgaaaggggaatcagccttcagcgatccgcacggaaccccacgagaaggccccgaacttgcacagcgtcctgtacaatacacgactactgcagagtgtccataacctctctgccatgaatacttccttgcgcaacctgcatttggctacacaacgtgtcagacacacgatccgccaacacttgccctctgtcaaacctcc

SEQ ID NO: 323343 - DNA, 1099 bp, Homo Sapiens
  misc_feature (18)..(18): n is a, c, g, or t
  misc_feature (387)..(387): n is a, c, g, or t
  misc_feature (503)..(503): n is a, c, g, or t
cagcgctggaagtatttnttttaaaaatttcttaaaaaaggcaagtcccatttggaaaaatgggggttccagggggatgtggttattccccagcccttaaaagaatccccttttcgggggttttaaaaggttttcggcgttatttctaacaaaagccggaattgtggaatcgattttcccccaggaaacgggccagggactttccccagggaaagctgaagggcccatggggtggggtgggacgggggaggagcccctctctcgttagaaacgggcccttgctggttgggctgaaaagtcccaggagaggctccaaccagcaattcccaacctcagggggactctctggggccacaggcatcatctggctagaaaagccccagagancatgagtgggctcaagtgtgtcctaatgggatagagagtcccaagtctgcagcccctaaactggcaggggccttccccatggtcacacttgaccatgcaaggggacactcagatancacggtgaccagcccggccgactggacttcagggggacagcatgtggccgcccatccacggggccccggtggcaggtgaccacaaacacaacagccaagggacacgcttcccggtcggaagtggcagggggttcgggccctccaggcccgtggacagggcccccagggattgcggctcagtatacaaaccccccagccaggccccaagggtcagcctggttcagccagccccccacatcgaccgtcccccgagccccctcatgtcacccagaacgcatcccctcgacccaaacttcacagagcaacagtccccatgagagagccgtggagacgccgggagccccaggagccaggtggggcgtggctggccgggagagaggcccccttcctcttgtgacaaaccaagggtccctggcgtcccaggctcctgcagcttctcgaggtgactgagaccgatgggcggcggctccgcctctcaccaccacaggttcggcggttcctcggccactctgctcttaaataaggtgatctcatccaggtgcaccagggggacgtcccggatgacgtcgcctcgtgccgaattcgccacccaggcc

SEQ ID NO: 323344 - DNA, 1073 bp, Homo Sapiens
  misc_feature (56)..(115): n is a, c, g, or t
atttgttaaaaaacggagggttcgtgtttgtttttaaaaaaaatgtttctaacatnnnnnnnnnnnnnnnnnnnnnnnnnnnnnnnnnnnnnnnnnnnnnnnnnnnnnnnnnnnnttcctttaccagagaggagggctttttttggagggaaaagtggtgaagggccagaagggctccccttgccccgggcaggggccttgaccgggccacccttcccatcccctgccattcaccccttcctttttccttttaaaaaagcaaaaccccccttcttgggcctcgggtcgtcttccgatccctggtggaaagtgcggcgggctacttggcgtcgagcttggccatctcctgcacgtagatgccgatgcttctcgctgtcgaagagcaggaagtacacgttcttcagcgaggacgcgctcgagtcatcaaagtgggctgagatggctttgagggtcacctgggccgcagtctgtttgggaaagcagtttctgccgctggggaaaggcgggaacgcgacggactttagcttcttgtcctccgccgctgacaggcagtttttgatggtctcttcaagctgttcttcacatttgtcggagccccactgagggatgtgacagtggatgacaaatttggctgcgagtccactggattggctgacggcggcttcggcgacttccaaagggccttgggatttgcgaagctcctttaccgtttccaagaactcttttcccccagccttttccaaggctttacctatatcttctttgaggtcaatttcggctgtggttgggtggacaatgccctccactctcatggagccaatatggctgatgtcactctgggttaaggacagcttctgtcccagaacaaggctcttagaagacagaatggtgaatccatcccctggcccatcttcagaggtggaatttgaagttccttctttatcgctgtcctttggtttggactttttggacgtccgtggtttggcagcccctcgtgccgaattcgccacccagccctgggggggatcttgttttgtgcaagagtcgggttggtggagacgggggcgggtcgc

SEQ ID NO: 323345 - DNA, 266 bp, Homo Sapiens
  misc_feature (192)..(192): n is a, c, g, or t
aacttgagttctcttacgcttcctgggatttctttccaggccgagacatagaaatcacaaatgaatgaatgtgatcaaacttgaaggccatttctaaagaaaagctttagctcaggccccattctgtgattgcctgttaatgcctccttgtgatttcagcggaaattctagaattgggccggcaatggccgnaggtacaacaagaaggcccggatagccccgaggacacatcttgctgggcagttgccaatgacgaggggctcaac

SEQ ID NO: 323346 - DNA, 767 bp, Homo Sapiens
  misc_feature (680)..(680): n is a, c, g, or t
taagaattttgaaaggatttttttcttgtgtgaatgtgtgtaaaagtcaatgctataaatctaaaacgaggtctgtttttttaaaaaagttctaaaacaacaggaggaaaacacatggaaagaaacccctcgcggagacctgcttccttacagatggaggctcttttggaggagagtgtgaagggcagagggctccctgcgccggcagaacctgcccggccaccctccactcccctgccatcacccctcctctctccttttaaaaagcaaaaccccactcttgggactcgggtcgtcctccgatccctgctggaaagtgcggcggctacttggcgtcgagcttggccatctcctgcacgtagatgccgatgctctcgctgtcgaagagcaggaagtacacgttcttcagcgaggacgcgctcgagtcatcaaagtgggctgagatggctttgagggtcacctgggccgcagtctgtttgggaaagcagtttctgccgctggggaaaggcgtgaacgctacgtgactttagcttcttgtcctccgccgctgacaggcagtttttgatggtctcttcaagctgttcttcacatttgtcggagccccactgaggcatgtgacagtggatgacaaatttggctgcgagttcactggattggctgacagcggctccagcgacttncaaagggccttgggatttgcgaagctcctttaccgtttccaagaactcttttccccagcccttttccaaggtttaccctatttctcc

SEQ ID NO: 323347 - DNA, 918 bp, Homo Sapiens
  misc_feature (189)..(189): n is a, c, g, or t
ggcgggcccccccgtttccatggcgccccgccccaggatggcggttctggccccgcctttcccctggggcgcttcccagtttcccgcgggacccaggaactggggttcggggggggaagcttaccagggcgctcacttcttgcaccaggggcccgctgaagagcgcacagcggctgcgcgccagctcantgggcgccaccttcacttcgcgcacgcaggccagcagcgccgacgcggtggtgctcatgcacttgacgcccagcttgaactgctcccgcgaaaagcggtcccgtgacttgtcactggccagggcgcacgcgtccgtcaggaacttgaggttgcgcgacaggccctgcgacacctccagcagcagctgcggcgtcatgtcggccagcggcgtggcgcgcagcacggcgcaaccctgctccacctcgtggcggcatcgcgtcacgcggtagcggtccaccaggcccggctgcgcgggctgggcgcccggcgtggccacagcggccagataggccgcgtgggccgagcactcggtcagcgacaccaccaggtcgcccagctccaccaggctgtcccccgcctccccgaagcggcccatgttgagctggctctgcacgtcgtgggtgaggatggagagccccttggtgcgcgcgatgatggtgtcccggcactgctcgaaggactcggcgccggcaccagaggaggcggggccctcgaagagcacgggccgcgcctcgctcgacagcagcagcaggtcagccaccagctgcatcttgcccttgcagtggtcgcagacggataccagcctcttccgcggctgcgagctggccccgccgatggcgctcgcaggagccggagaagccgcctcgccagtgggcttcccggcctcgtgctgagttcgccacccaggcc

SEQ ID NO: 323348 - DNA, 944 bp, Homo Sapiens
  misc_feature (893)..(902): n is a, c, g, or t
taggagcgaggcctgggtggcgaattcggcacgaggctaggtgctgaggagagcgcgactggggcagtgggccggcggccggcgttggggcggggcctgggtcgctgatggccggtggtcctcaggtgtctgcggcgccgagggggcccctacaagaccgagcccgccaccgacctcggccgctggcgactcaactgcgagaggggccggcagacgtggacctacctgcaggacgagcgcgccggccgcgagcagaccggcctggaagcctacgccctggggctggacaccaagaattactttaaggacttgcccaaagcccacaccgcctttgagggggctctgaacgggatgacattttacgtggggctgcaggctgaggatgggcactggacgggtgattatggtggcccacttttcctcctgccaggcctcctgatcacttgccacgtggcacgcatccctctgccagccggatacagagaagagattgtgcggtacctgcggtcagtgcagctccctgacggtggctggggcctgcacattgaggataagtccaccgtgtttgggactgcgctcaactatgtgtctctcagaattctgggtgttgggcctgacgatcctgacctggtacgagcccggaacattcttcacaagaaagggggtgctgtggccatcccctcctgggggaagttctggctggctgtcctgaatgtttacagctggggaagggcctcaataccctgtttccagagatgtggctgtttcctgcctgggcaccgggacaccccctccacactctggtgccactggcccggaggtgtccgtgccccctgaacgccggctacgccgatcccctgagggccccgggaaacaccctggtggcccaaaannnnnnnnnnggacagccccagcggcggcgactcgccccccaggaccgcacc

SEQ ID NO: 323349 - DNA, 1383 bp, Homo Sapiens
ggcctgggtggcgttttcggcacgaggggtatatatgtcattttcttttcgcttacacatgtgttcaaagtggatttttaaaaagtgttttagcaatactccttaaccaaataaaccttcggagaacgtcactaagcttttccagagagaagaccctagatgaagttggaaaagagctctggctgactccacccactgtccccaagcattaaaggtgtggccatgagtttacagaattacccacattccagttgccactgggatgaaaagctttgtgctcagagctctgggaatcatgggatcacatggttactgtttaccccaacagcatgctctgtctagactggacctcccagccccttgtgttgggaaggcaaagcttttgtggagtcaggggggagactgagaaaaaatgaattaaccctgtgttgtcatcctcatgacattcctgaggattcaccaggttagaagtgaggacgtttatctttgtgattcataattttcatttgtgaaggccacaacactccccttgaaatacagggcaggaaagagctgaggttcttggtggtgtctcccattcccctggctaatttcagacagctgtggtcaagggattttacttgggatcaacttttccttttttccttgacattaattttagagaagtcatcaagtcatgtgatttgtttagcacataggtttatttatggtttgattttttttaggcagttatattactagattaagcttgtgagggaatgaaaatgttttttatttcttatctacacactcgaaaaagagaaaccagctgcggtactgtcccatttttgtcatcagcaccagtgtccgtcaggaagggaggtggtggtgcagaaacatgatggctggctgattttcgtggctaaaggggtaggccttatgttgattgggatgctcccctacagccttacaggtagaatagaaggtgagttctggaagtgcaaagaagcaccattaagtgcatcttctagaagttgtacagaaggactaaagcttatcaagtcaacaaagaacttaccttggaggatagagagagagaagggaccaattatgaggactgacatcctggccactctccttaaaataaacactgacatttttcttgcttgttctctctgtactcaaacctgtggcaaattcatcctagcaacgttatttgacgaggggcatgaacatttatagttgaaactgtagaaagggtcaggttggaggtgtgtaataaaaaagaattacctaggttgccaaaggtaatttaggaagggtctgatcatttagatgagagttctttggggcttatttttctgggtaaggctcatctttaaaaactggttcagaggggagagg

SEQ ID NO: 323350 - DNA, 1019 bp, Homo Sapiens
  misc_feature (110)..(111): n is a, c, g, or t
caaggctgcgcggatttttggttggagggaacggtaggtttcctggctgaattgcatttgaatgtttttccctctaatttaccggaggtgaaacacccattcctcccttnntgtcagctgtttctcttagcccactccggccagatccttatttattgtccccaaccataagcctttcactgttccttccacttccacaaacccagcgctttaacatggcttgaatctggccatcagtcagctcagggttggcattgtggattttcttcttgaccaggtcctccagcagaagacgcctcagccgccagtagaagaaggtacgggatgttttccaatccaggatatcgctaataacacccttctcctgcatccggcctggtgtgtcgtgcaagtcagcaaactgcacggctacctgatggtaaatgggaattaggaattcctcccgctccttcaacttgttctccaactccttccgctcagctgtgcttagctctggggtccccaatcgctcagccaagtggatgtagactgggtccacccgacgcatggttttcaccagatcctttctgcggaatttgatttctactgtcccttctggctccagaacagatcccctgctttctcggtcagcatacatctccatgtgccgggggttgatggaggagtcaatcaccacccaggagccaccccgcagctcagcctggggaggaatgtaaaccagcacaggctggcagcactccctcaagccatccacaatgtaagcaccaaacttcagcacttggtcgtacatatctttcattccaccagagaagcctctccagttggcaaagaccatcagaggcagcccttcccggttgaagtccttgatggcctgatacgtcttaaacgcagaatctgggaaccaaacctggccagcctgctggattatcttggcttcagaatccaggtttgctggatcagctgggatacttagttctactgttcgggtttctcctcgtgccgaattcgccacccaggcc

SEQ ID NO: 323351 - DNA, 1208 bp, Homo Sapiens
ctttccccacacccccaacagcttttagggatcgaggcctgggtggcgaattcggcacgagggctcagcgcgcagcctgcgggcagcccacgggccagcctggcggggtccgacggcggcggcggtggcggcagcgcccgatccagcggcatcagcctgggctacgaccagcgccacggcagcccgcgctccggtcgctcggacccgcgtcccggtcccgggccgccttcggtgggcagcgcccgctccagcgtttccagcctcggctcccggggctcggccggcgcctacgctgacttcctcccgcccggcgcctgccccgcgcccgctcgctccccggagcctgcggggccggcccccttcccgctgcctgcactcccgctgccccctggccgggagggcggcccaagcgcggccgaacggcggctggaggcgctcacccgggagctggagcgggcgctcgaggcgcgcacggcgcgggactacttcggcatttgcatcaagtgtgggcttggcatctacggagcccagcaggcgtgccaggcaatggggagtctttatcacactgactgcttcacctgcgactcgtgtgggagacgactccgtgggaaggcgttctacaacgtggcgtgataaagtgtactgcccggaggacttcctgtactccggggttccagccagacggccgacaaatgcagcggtttgtgggacatctccatcatgggaaaatgatccttggcaagcccctggggaaaggtcctaccaaccccaggcttgctttccgggtggctccggagaggcaatgcaggtggcctgggaccgggggtttcccctttccacccgcggggaagggtggaaggaaaaaaccttctacttggcggtggcctagaacttatttaacacggcgttttttggcaagccaaaaggtggccccctccctttggggccccgccccccagttcttcaccatgcacatgggggatttcacaagagacaccgcctccggtggtggtgggcccgaggtgtacccgggaattaaggctgttttaccgggcattacaaccgcgcacttcgcatctgctcgagagtccctaaactccccccccgccaaataggtgtgtaaccgatgggccgttgcacgcgctcgcagcgcgccaccttgttggtgttttgtgcgaaatgggagccgtccaggtggaacagccgcc

SEQ ID NO: 323352 - DNA, 1492 bp, Homo Sapiens
gttggggttgtttcagggattttttgttatcccacccttgaatgggaagccttgttattgtaagggagggggcccgatttccatgcttccccccaggagggaggtcccttggggccctttttggttttcccatcccacaaggccctgactcctttcaggcaggcagcccccttccttttttggggtcccatcggatgcagggcaagccggaggcagtaagaagggcatccccatgtccccaggtcaccttctatgggggtgactaggaggtccccggtaactagggcagcccaggcccagcaggttgcaaaagcagctgcaagtttcagaaacccacttcctccaacaccagggaggtggcagagagcccatccaaaagcccactgggagaggcataagattctgtgccaggcccccaggtcccctctgtgtcaggtaggctctgctactggcctctgaagtaaaggcaaacacaaacgggcagggcagggtggcaggaataaaaaactctggacagaaaccctttttaataaaggaatttccaccccctcccaatccttccatggaagggtgagaccttaatgtgatgtaagaggaagggtcttctctggctttcaggggaaccagctgcagctgaaacttaggggcccattccagggcacttttcaccacagccagtgcagccgctccaagtgccactgtcagccccatcactgccaatttcacaaagcggttggtccttggcttggtcaggacatcttttgttcgatcttcaggccgcagaagtccccgaaaaccgctgccgcagcaccatatcaggcctctgctgggctgatgccagctcaaagtctttgaaagtagaggctgccgtcctctcagcttgctgttgggcagcggcctcccgagcaagttcggatgggggaaactgaacaaaaaggtctcctgctctgctgatcagtgtctcatagggcaagtcctgagggatctgggacaacaggtggtggaccgaggccatgtcacagtcacagtccaggacttcctgctcgcgatacaacacaatcacggctgcaaagtaaatcggcatcagtgggtggcaggccaggaagaagtcatataaccgcacgacgtgcctgaagtcagacaggacatgcccaaaccaggtgatgagccagctgagggcaaagatggtccctacctcagcactctgcatgaagtcatggagctctggattcacctggtcaatgatgggcatcagatagtttaatatatgcttggtgttgtccattgttggatccataaaatccctgaggtggtgggtagataatttttctaccagggatgttgccagcctctcgcctaccaccagcagaaatgtgaccacaatgtcatggtagccctggtagtagtgcagctgagggttgcgctccaagatgaggaggatgatgtcaatcagttcttccctcgtgccgaattcgccacccaggcctcgctc

SEQ ID NO: 323353 - DNA, 1055 bp, Homo Sapiens
  misc_feature (266)..(266): n is a, c, g, or t
agggataaaagtgtacctttgaccacccaagttgttaaagcaatttatttccccccaatttcaatccgggtaattgaagttcaattttgatatcccccaaggggcaataaggcttggaagttcccaataaggggagttaaagggacctgggaatttcttctatgaagggttgggttattagtcattttttccatttttccccctttttccagggattacttccaggcaaccccagtcttcgtgccatgtcggacccccatcaccgnttgacgtcggggggaagctctatacaacctcactgggcgaccctgaccagcttccctgactccatgctaggcgccatgttcagcgggaagatgcccaccaagagggacagccagggcaactgcttcattgaccgtgacggcaaagtgttccgctatatcctcaacttcctgcggacctcccaccttgacctgcctgaggacttccaggagatggggctgctccgcagggaggccgacttctaccaggtgcagcccctgattgaggccctgcaggagaaggaagtggagctctccaaggccgagaagaatgccatgctcaacatcacactgaaccagcgtgtgcagacggtccacttcactgtgcgcgaggcaccccagatctacagcctctcctcttccagcatggaggtcttcaacgccaacatcttcagcacctcctgcctcttcctcaagctccttggctctaagctcttctactgctccaatggcaatctctcctccatcaccagccacttgcaggaccccaaccacctgactctggactgggtggccaatgtggagggcctgccagaggaggagtacaccaagcagaacctcaagaggctctgggtggtgcccgccaacaagcagatcaacagcttccaggtcttcgtggaagaggtactgaaaatcgctctgagcgatggcttctgcatcgattcttctcacccacatgctctggattttatgaacaataagattattcgattaatacggtacaggcctcgtgccgaattcgccacccaggcc

SEQ ID NO: 323354 - DNA, 946 bp, Homo Sapiens
caggcccccccttgatgcaggtaaatggggttcccccctccctggatgaaagcccacaaagtttttggggctttcgggcaggcctaattcaggcccaaggtggggaagtgcaggtgcacaaggagagcccttgaggcctttgttcttggaactgcaggctcagcacgcgttccacatgggtttcggtgctgcggacgctgctcaatgccaggctcaggggcaccgtgcacccatgggctggcccctctcggtggggaagtagcgtgccactttttgcttctccatctcagcctcagaaaccagcatgacaatgactgacactttctgctcatggaccatgagccagaagtcagcagctgtgccaggcagtggggcctgggttgccactagcggggggcagtatggggagagcccctccacgcagctggcattgatgtagtcatccttgcctgagcgcagcaccacacggttactgtcatagggcatgacatcctggtgccggttcttcagtgagtagcagcgggcaatggcgatggaacggcctcgggcatcatgttcctgcgcatcttgcagctctcgccagacagtgtccagagctcccacatcccccagctgaccccgaaaggcctccagctcctgctgcaactgccgcagcctctcaggatgctcataggggtcccgctcaatcagccgcagggcctgcggccgacgaccctcagctgcatccaccttggtgggctgcagcaggggctgcccacccccaggagactgagtgccgccatgctggctctccgggctggaggagagcaggtctgcagctgcggcgcctcggcgcaggcaagggggtggttctgctgctggggggcgagggggtaccggaccaggccctggagatggggcaggtgaaggcaccctcgtgccgaattcgccacccaggcctcgctcc

SEQ ID NO: 323355 - DNA, 973 bp, Homo Sapiens
  misc_feature (98)..(107): n is a, c, g, or t
cccttaacacattttttaaaacccgggagaccattcccaattcccccaggtaaaaaaggcccttttcgaagggtgggggcccggcccggggatttttnnnnnnnnnnagttgggtttgggccattttttcttggcgtaaaagggcattgtagcaacccgctgcagaaactggtggcggcactgggtacagtgaaagtgcatgcagcctcctcgggccagggcgtacgagaacttgcatttggggcagtcaatgccgttttcctgaagatacattgctaggccctgggcctggtattctgggtcgttcatgcgtttccagttctggaagtcctcacagctccgacctcggtgctgctcctcccactggcgcttgcagcgcacacagaaggtctggtgacactggggacaagttgcctccagctgctcacgctcatatatgaagccaaaggagcactgggcacaccacaagaacttggggtcccgcatcagcacaccctcggtcagcttcttatggaacaacgcataggcatctggctctaggctctcgcgaagctggatgtcaagggtagagaagtagctgagcaactgtgtgtcatcggtgaggtcggggcggccacaggcagggcacaccatgtctgtgatgtgcttctccttcaaggcgatggtgaagtgctggcggaagcagtcaggacagatggtgcactcacaggaagtcagggcctgcatccggttgtggggcagggcccagccacacacggcacactcctgggcaagcaagcggcgcaggaaggcccggtcctggctgtgcctcacagcttctaccacatcccccaactcatagttcctgggtgtctcctgcagcagtgacagtgccagctctgcccggccccagctggggagtgcgtagactgccaaaagccgcctgaccaggctctgcttgtctggccctcgtgccgaattcgccacccaggcc

SEQ ID NO: 323356 - DNA, 1145 bp, Homo Sapiens
  misc_feature (725)..(735): n is a, c, g, or t
gagactgaagcagtccaaagtcagtttatttccccacggggggaaaatgtgacctcaaatgaagagaagtcagcaagccccgactccaccttgtaaacaggactccagttaacaccaggtaccaaatggttcaggctggtgccaactggaatggactgatgggaatggattcacggtgtgtaaacagtgttcactgcaatcactctaaggctaacagcttggcaagggaggtgaaatggtgtgtctgaggtgactgtgtaaacggtaccgttgctggacaacactgactgaaaacggaggtgctggtacaggaggaatgggtgggcgagaaataaaggccttctctcctgcccattggttggaagcaggcaatggagccaagtgaccttctacagcagggcctgaccaactgactgctgtggggtctgcaggttgggaccagaaggtgggcttcttgggcaatttctctagaggtcatccaaggtgaaaccctctgtgtctccaagaggcctccccattctccaaagagaaggaggttctggcgctttggagaggaagagggccaagtgtggctcccgattcaggtcaaaaaaataaaagtaaataatacctgaagtcctacggtatgagatcttttcacggggttggggctcaaggctccttctggaatcgatcctagagcctgaacccccaaaccaagtgctcctgtatacagacactggaannnnnnnnnnngaacccagctctgaaagctcagctgccttcatgggggacacagacggggtgggtactaaggctccataacagagccaaaaactgagctgagggcctctgtgggggctactggaatgcttgatggaaacgaggcagggtggtgctactcaggccagacgtgaagacaggaggcaaggagtgcagaggcccaaagttcagtggtcccccagctcctggggaatcttgaggctgagcttgcaaagtggtaagcaggggctgtgcctcagcctgggagtagcccatgaccaggcctcctgtggccccaggtgggttacacgggggcaggttgagtggaagaaagcccagtaggtgggagaagtccacattagcagcgcagagggcctcagagcgccacccaggcctcgctcttt

SEQ ID NO: 323357 - DNA, 898 bp, Homo Sapiens
  misc_feature (150)..(163): n is a, c, g, or t
ataggggggctccaagggcctggggggcacccccactcttttaggggccccagagaaactccctttttgggccccaaggggtgggggggaaacaattctcggatgtgtgggggtttgaggtaggagggtggggtaaggaaatagtggaannnnnnnnnnnnnntgtttttatttggcctgtcacaataaagtttattatgaaaacaggctggtgtggggacatggggacagataagtacatttaggttgggtggctcaggtgaagtagtgcggcttcttcacattgatgccatactcgctgagggcaggggtcaagtcctccatggttagagtgtacttgcggtccttgctcttgctccgggagctgccggaggccgtgcccttcattttgcagtgctgtagggcatcattggcaatatctgagatgaatttctgggcagctaaggagatgagccgaattatgcgtgggtctgaggcctcaaagccagcacggttcaggtagtaaccagtcactgcatctgggatcgtaggcgtgtaatcttccagctgcatcaagaagtccaccaaaggcgtgctggacaccacgggcttcacgtctccgttggccgcgctcggcagtacgtaaaccccgttagatatggccccctccgggggcgccgcgccacccgccgacaccggagccgccccacgccgctcagctggctccccggcccgcgccgccaagggtcccgtgcccccagcagctgctccagccccaggtccccccgctgtccccgcggggctggccttgttctccgcggcggtgctggagggcagcgcggcgggagccgagaccgggggcgcggggcccggggccgaggcggcggaggcccctcgtgccgaattcgccacccaggcc

SEQ ID NO: 323358 - DNA, 1034 bp, Homo Sapiens
ttggccccaaaaagcaaggccccagtgcccaagtgaacccattgggccatcacaatggcctgggttcgactttcatgcaactagggaggggtctatgctgagtactggtgccccggttttggttgggcccaggccacaagctgccttgtaccagggttgatcgcgccaggaaagacgttctcagggccaatccaggccagttgatgaccagttcccacagggctagtgggcagatctgcaggtggaaagagtgccatctgaaagtccctatgagcagagagcagcccaggctgggactagggcccaggtcaccccaagggtgtctttgttttccagacaccactcgaatgcctctccaaaggctggccttcttaaagctgggccagggcacaggccctaggagttgcaagctggctgggctgagtgctagagaccaagtgcatgtcagcccagcagaccactgccctcctggagttctcaggatgaaccattgtcgtcctgagtgtgcagagcttctcagggcacaaagccctcacctcctctgccttctcaggcatgcctctgtatatccaactaatgccctgggcaccttatgacctctgggaaggcagagtccactgtcaaggtggccatcacagggaaaccccactcaggtccagcaaaaacaggagctgactgctatctgctgacccaagaagggtgagcaggtgagagcatgcttattctattccagctggcctactcattctactctagcaagcctgtcccctctcgtactcattatctcacaggaatgggtcctccactcagcccaaccttaattaagaattaagagggaacctattactattctcccaggctcctctgctctaaccaggcttctgggacagtattagaaaaggatgtctcaacaagtatgtagatcctgtactggcctaagaagttaaactgagaatagcataaatcagaccaaacttaatggtcgttgagacttgtgcctcgtgccgaattcgccacccaggcctcgctaccta

SEQ ID NO: 323359 - DNA, 1047 bp, Homo Sapiens
  misc_feature (156)..(176): n is a, c, g, or t
ctagtgtgttcgggtatattacattggtcggtcttcgggaaggtaagagaggggccccaatccttttttgggctggggaggatttaaggatctcccggagggaccagaaggggaaccccgacccgaccaaaagcgcggggcagtgtttccctttannnnnnnnnnnnnnnnnnnnnagttagtttgggccccacccgtggggcagcccctcctcagtcccttgaaggaccggttccaggggaggtggaggaacttgcccccttccttttcattccacatccggaaggcggacccggagctggtagacgcagccgcagttctctcgagcgccccaccagtcagccacacagatctcaatctgggcgctgtccagcagctcctgccacacccctttccatcaccaggtccacaagctgcctcttggagcactcgaaagaggtcacgaagcaggtctgcgaaggagccccaggcaccggtgttaggttcttttctatggcccagccgttcccgccatgctccacctcccagcctctgaagccctgctctccgcaggagttgaagatgagattgcggccgaagggcgcgcgcagacagtagcgcgccagggcgcacagcgggaactcctccttgtcttcgttgctgggcaggcagcgttgagccactgcgtagagtgcgcggccctcggcgctgcggtcgcgggccagctgcagcagccacacagtgggcccgtccactatgtcgcgccaggcgcggcacactgggcggcatcgcgtgaccaaggagcgtggcggcacgtggctcagcacctgcaccagcagctccgggggcagcgcgtccagggccagggatgggtccgccggcagccgtcgccgcgatagccgggcgcccatctccagtagccagagtcctggcgggctgctcggaggcggcagcggcgggctaagcttccctttcccactttgttctgggaggcagtcgaggggctccccgtgatcggcgtggcccagggggccccctcgtgccgaattcgccacccaggcctcgcta

SEQ ID NO: 323360 - DNA, 1094 bp, Homo Sapiens
accggtttctgggcccccttttagcgcccaaaagaatggcgcaagcaccctttggagacccccccttccaaattcccaagagaggttggccccagggggccttggcccccttccctgggaacacaggtcccttgttgggaagggccttgtgggggagaaagaaccttttcccagctcgaaaggacccaaggcctgccccttgtgcaagcaaggtggattatgggattcgtcttccggcatcgaaaattcacagccttggtggccctcaggtccttcccccttccttttttggtgactggccgggacacgagccatcacttggatgttccctttcagccgcacgagctcattgtgggcactttttacgcagctgcagctcgcggcggtacttgcgcagcagctcctggttgttgctgttgacctcctcgatggcctggcctatctcggccttgacactcctgagggcctcctgcagcagcagtgggaagccgcgcacctgccgcttgagcccattgtagtcgttggtgagggtccgcagtgccggctgcaaggtcagcaagttggtccggacgcctgctagattctcgtgcacagccttcatctccacctgggctctggcaaaggcctcctcaatggcccggttcttgtcctcttccagggactgcatctcctccagcatctgcccatgggcccgctccagctctgactcgtacatggcaatctgcgcccggagccgcgcggtcagctggtgtgagctctgcagctgctgttccatctccttcagcacctgcctctgcatagccacctgctcctgcaggtgctggttccgggcctgggactcgctgagggcctgcttggtcttggacgactccacctccactgtcttgatgacatacttgacaggtggggactgggcccgcaggctggcaatggtctcgtggctgtcacgcaggcgccgactgagccgctcctcctcctgtgccttctcagccaggcagtccttgagtcgcagctccacctcagccagccggtcggtcttctgctgcacctctaggttcagctctgaccctcgtgccgaattcgccacccaggcc

SEQ ID NO: 323361 - DNA, 1080 bp, Homo Sapiens
gggggggatttaccccaagggcccctttttccccaagtgggttttccttccagaaaaagtggaatgtttttgttcccccaaacccttcagggaggggggtaacccctggattaaaggaggttggttttcccctaccagcattcgggatggcggtaggccaaattttaattttatttggcaggtattctgcataggttttggcatgacccaatttctcttcaatcttcttcctctggttcatcatctcttttacaacaggaaccttccatggttggggaaaaaactcctcatctttcatgtcgtttatcccacattctagctccttctttattagaaggctctttctttactgtaccattgcttacatcagtagctgctgttgctactggctgagcaatattagcaggtggctttagtttcatcagttcattaagactattatttttcagtagatctttaagctgaacttggtcttttgaaggtgcagaggtcatggcatttcgtactgttggtgctgagactgacgggcgtgtgcttgcagtagtctggataaacttagttaaagtgatggtttgcctgttggttgttacaggtggtgttttagtcattacaattgtagatcccaagggtggaagatgatttatttgattcagcacaaatgttgtagtagatggaggctgctgcctcacatttaatagtgctggagtaggtacagtctctggttcttgtttaacaggaactgctgcttcggtctccaaacctagttctaatgcactaagtggcactgactgctgaactgacggggtaggcattggagttgcaagccctgcatctccaccatcaatatcaaagaggtcattcggactaattccactctcactcaaagcagcaagcagtaaatcttgccctggctccaccattttccccgcgggacccggcgccaggacagctcctcccgggaggtgtgagtttgaaggaccagaggcgactggagcggaggcggcggtggcggcggcagcagcggcgtcctgctctgcctacctccccctcgtgccgaattcgccacccaggcctcgctcc

SEQ ID NO: 323362 - DNA, 1030 bp, Homo Sapiens
  misc_feature (301)..(301): n is a, c, g, or t
gggttcccgccaaaaaatgaggtgtcgggtccacacactttcgggaggggtaaccgccggataaagaggcggttctcccactaccagcctcgggatgggcggagggccaatttttagttgttatggggcagttatttggcatagggttttggccggaccccatttgtttgtcatctttcttcctcggggtgcatcattttctttaccaacagggaccttcatggttggggaaaaactcctcatcttcatgtcgtttatccacattctagctccttctttattagaagactctttctttacntgtaccattgcttacatcagtagctgctgttgctactggctgagcaatattagcaggtggctttagtttcatcagttcattaagactattatttttcagtagatctttaagctgaacttggtcttttgaaggtgcagaggtcatggcatttcgtactgttggtgctgagactgacgggcgtgtgcttgcagtagtctggataaacttagttaaagtgatggtttgcctgttggttgttacaggtggtgttttagtcattacaattgtagatcccaagggtggaagatgatttatttgattcagcacaaatgttgtagtagatggaggctgctgcctcacatttaatagtgctggagtaggtacagtctctggttcttgtttaacaggaactgctgcttcggtctccaaacctagttctaatgcactaagtggcactgactgctgaactgacggggtaggcattggagttgcaagccctgcatctccaccatcaatatcaaagaggtcattcggactaattccactctcactcaaagcagcaagcagtaaatcttgccctggctccaccattttccccgcgggacccggcgccaggacagctcctcccgggaggtgtgagtttgaaggaccagaggcgactggagcggaggcggcggtggcggcggcagcagcggcgtcctgctctgcctacctccccctcgtgccgaattcgccacccaggcctcgctc

SEQ ID NO: 323363 - DNA, 1054 bp, Homo Sapiens
  misc_feature (140)..(148): n is a, c, g, or t
  misc_feature (292)..(292): n is a, c, g, or t
gttaaaccaaccaccctgaaagtttccacatgtgaaatatagatacaacagtgaacaaaatatgtggcctcccatgtacattggttacctatgtacaagtatcctatacaccagtaaaacagcagggcaattagtcaatnnnnnnnnntagtacatgttatgtgtaataaaattaaattacaaaggcttttccactcgtggatttgattctttttttgaggagggagtaatcctggagcaaccacttgcccgtctcagactctacactagaacatttctggttgctggttgngatttgccagtgggcccgtgaggtcatcgggaattagggaacagcgggtgaacactgcctcagatgaataccattaggggggccacagatgggccctaagtcaacaccgttcttcatgtagtacttctccagcttggccagaatgtgcttgccataggtgtacttacgaagagttgcgatgtggggccggatcttatgcatgacgatcttccgactgcgcctggctccgccacgtcaatcatcttctggaccacgtagttggcatactggtccttcatcatggtgtataaggcactgtggggaccgtcgttcatggtgcacacctcatcgatgagcacagcgcgctccgtacgtgaggcgtgagtaacacacttctccacaacattgcttgcaaatttgtgctgactcaatacaagtacattgcctcggatttctgctacaattttgcttttatcctcaggacgaccgtgctccagtacatgttggattacataatttccatattgatcctgtacaagctgctctgtgtgctggtgaagctcctctaaaatagggagtgtctggtcagggagacagtgctccaggattctctgaatcactcggcagccataaggatgtgtggataaggcaaatacctgtcccttaaacgcatcgatgataaattgcaaagactggggctgtacacattcaatgcatttctgaaccacgtgattgccattctgatctttcacacacttcaagacatggccatctagttcccga

SEQ ID NO: 323364 - DNA, 1437 bp, Homo Sapiens
  misc_feature (85)..(116): n is a, c, g, or t
  misc_feature (156)..(156): n is a, c, g, or t
  misc_feature (320)..(378): n is a, c, g, or t
  misc_feature (396)..(447): n is a, c, g, or t
  misc_feature (1392)..(1392): n is a, c, g, or t
cactacccggaggggggcccaatcatgaagggcccccccacgtgttatcatggcgggggggagttataataatgagcacctaccnnnnnnnnnnnnnnnnnnnnnnnnnnnnnnnncccccacagccccgagagaagggaggcccacaaaggtgtncttccccccttgttgggcgcacataggggatgggttgtgggggcccctcccctgatatgtaattccgccaaggggggccccctccccgcgtgttgttatggaccccctacacttttgttttaccggtgtgtagggggcctcaaatttgggggggcgccaattannnnnnnnnnnnnnnnnnnnnnnnnnnnnnnnnnnnnnnnnnnnnnnnnnnnnnnnnnncccccaagggaggtggtnnnnnnnnnnnnnnnnnnnnnnnnnnnnnnnnnnnnnnnnnnnnnnnnnnnnacccaaattcgtttgtggaaggggcgttaatccatggggaacaaatatcctctttaaaaagtgtggattttttttgggtaattacccattggcctttccattgccatggtgaggcaatttcagaggaattcacattttgtgttggcttggcttgcgttggcatggtgtagatggtctgaaaaatcatgtggggtcggaattgcggaaggatgtttgggcttggctggatggctagagggccagtttgtaggggctgtgggcctgcttgcctattagggggctagtgggtggggggtgcccacatgctggcatgagttgaggagggcatctgcgggaagtgggcttctgttcaaactggttgagaaggataacctggtggccggtttgaaaattctggcagtttagggcctgagttatccaagttaattccttgttctccaggcaacggtggctgatcagcctcttccagaccagctgggcgagtatctggggtgtttagatcttgctgactatttttcttcttccgagggggtttcttcttcttcggtttatttgcgttggtattattttgcttattgtttaccccaaaatggcctgcagatatgtcactctgcaataagttgaccaacaatgggctcgttagcgtgacatccttattgactgggaagcctggattttgaccacaggacatctgatttccattgggagctccactgaaaggtgcattgaaagacatcccatggcctgagaagtggtttcccgaggcactgtttccctgcatggcctgcacatgaggggggaccatgttggtttgttgaatgctaacatcaggcatcatctgagataaactgacatcgttatttgctgtagtagcaggatcaccatgctgctgggccatgttgggccctcgtgccgaattcgccacccaggcctcgttacatatanaggatgagggagtatggtagtctatttttttgtcgtatggttgtg

SEQ ID NO: 323365 - DNA, 1083 bp, Homo Sapiens
  misc_feature (71)..(71): n is a, c, g, or t
  misc_feature (142)..(142): n is a, c, g, or t
  misc_feature (150)..(150): n is a, c, g, or t
  misc_feature (204)..(205): n is a, c, g, or t
  misc_feature (373)..(373): n is a, c, g, or t
tttttccccttctatagggagggatttacccaatgccatggcctttcagggggaccctttttgcctttttnccctcccccatttaaccacaaccccagattcccccttgccctggtgctttcttgaagaggggtagaaaganggcatctngaaagtcaaatgacaaacggagaaatgaaagttgcccatggaagaagcaaagcnnagcacctcttttgcctggtgttcaatccctccacacaaagtgggaatcaagggagaatgtgcacagccaggccagaggctgctctgagcttggggggcacagcatcttccttagaagtctctgcagaacaaactttcaaaaagataggaacttaatcacatttgtccncaggggtttctctatagtataccagcactagggaaaagcaaaatcatctttgcagagagctgatggaagaaaggcaggaatatgaatgagcatccattaaggctctctctcttaagcctaaggaattaagatattcgaggctatgagacaggtgcagagagggagagcctggcaggaacgccaagaaaagacctgtgactgctggttacacagtgctctgcttccttgcttgaggccaacagcatgtgtctgcctgtcaccaggctaacccgggacccatgaggggacagggagaagactggttttcagttcctgcatgatcaacttgtagggtgtgtgggttcctcctaaagatccaggaggaggactctgggatcctctaccgctgccttgattttgcggaggaaagtcacagcctctctgccatcaatcagccggtgatcataggtcagtgccacgtacatcatgggccgcacctctaccttgcctcctatagccactggcctgtcaaagatgccatgcatccccaggatggcagactgaggggggttgataatgggtgttccaaagagcgagccaaaaacgcctccattgctaatggtgaaggtaccgccatccatatcttcaatggcaagttcattctttcgggccttctctcccagttcagtgatggcctcgtgccgaattcgccacccaggcctcgctaccta

SEQ ID NO: 323366 - DNA, 1091 bp, Homo Sapiens
  misc_feature (162)..(162): n is a, c, g, or t
tgggcgaggcgagagatttttttcccctgtaaagattcctgtggggggtgggaaccaggtgtccaggccttttggggcaggaggcgcatttctttgaaaggggcccggggcccttggaatggccccatgttgtttccagccctttgggccaatggtctcttngtaagaaagttctggaagttttaaaccatggaccaggggcgcggttcccggtcccaggttccatgcaggggaacccaggtactccgatgctgggtcggtgtttttttgtcttcttcagagatcaaaaacccagcccaaagtcggcataggtgatcttcctttccttctgcacttttctgcctcgtgtgactgctcctgagaagatcctgtctatcatcttggtagaaagggcgtggtcattgtgccgcgccaggtcgtccgcgtcgatgagcaggtcgtggtccgtgtccagctcccagaacttgcagtagatgacgtagaaatgctcgtacgagaagaattcggtcagctggttgatgtccgcctcctcctccagcagcgccacattctgcaggaaggagctcctccgcagctcggcgcaggtgatcctgccggaccaggaccggttcacggcgtagaagatccgctggatgaccgtggtgatgtagcgcgagtggaactcggacgcctccttcaggaacgacagccccgggtgcgtgttcaccacgtcctgcaagaaggggacaaagtcctcctgcaccaggtagttgcagccggggctcatgagcagatggacgaacttggccgcgtcgtcgtggcagttctggaggatttttctccacatggcgacgaacttgtggacggacacggagcccgtgcgctccccgccggcgccatagaagagcggccccttccagtagagggggcagccgcaggccttggccaccaggcccatgtcgtccatggtggccctctcgtgggggaaccgggcgaaggtgctctcgatcttgctgatgacggcatccacgttgacggagtcctgcgggcgtcctctagggaagtagaaggtcggaatgctttggcctcgtgccgaattcgccacccaggcc

SEQ ID NO: 323367 - DNA, 1016 bp, Homo Sapiens
gttcctcccccttgtaacccttccacccttttccccagtttgcttataggataatcaggctcacatcctccagtggagacttcccagatcttctgacaggagaatcagtaccaacatcagtgctgggggatgcacccccacttagaaaatgtcatgttcgggctccaaggtgaagccacccgtatcttcattagtgtccccatcctgtagaattattcagggacatggaattggcaagggggattactaagggagatcattttcatgttttaggagaaccaatgggaatggttatgatgcatgtgaacaaatccttatttggaactctatttatcttaatagggccaagctcagccaccaagctctacaatgagatgcagagacaaaacccagtccagtggggtcctctctgccaagcaaaagccaaggggtctgtctctgacacaaggggatgacatcttataatttaaaacagggaagaaggagagaaagaggaagtcccttccgatttcaggggttctatcgctgtccagcctcacggatgcggcaggccacagcagtgatgagcgccgcccccttcccgctgccatcctctgactgcaggaaagacacatcacatttcggagccaggtccttcactgtctcatgcatgactttggcaaagtgaggatgtagcttgtagagggtcccatccacacccactgtcactttgagagcgtccagcccacggttttctcgtatcctgtccaccacagcggccatgcctgcgccacagagctgggctgcccgccgggccaccacagtgcacacctccttaacaatgatgctgtcgtcacaggtgctctcaagccctaagtgttgcaggatggctcggacttgcagcagggccaggcagtcactctcaatctgagacaagaacttggtttcaaagatgccccttgtcttgagcctcgtgccgaattcgccacccaggcctggttatggggtggagtgggggggggcgctggaggagaggg

SEQ ID NO: 323368 - DNA, 1007 bp, Homo Sapiens
gaagggatcatccggatcgctgcaagttaaggtgccgtgtggcgtacgcgcgccactcgcttttcttgcgccaattctgccgggggggcactctctacgaagaggtactgtcgccctgggcaaagatgggcaggcgatgaacgagaagtaggagccccgagtccatccaccaaggggcgggttcttccagagttggggggagaaagaaaagggcgtttccaaattgccccacgggcaggcccagagagtggagcagggcatcaggcagaggcatgcatgtggacaggacgtggcaggagggacaaggctgggcctcaggacaggagcaggccctgtcaccctcatcccatcgattccgctcaccggcgccaggcccggcaggccaccagcagggcaggaccagcacggccagcacttcccttttgtgtgggctgccccgagggcagaggaggttggtgactgaggtcactgagtgagagagttcacagcaaggggttcccaaaggcgggctattgctgtcagcaggccccaaacctgcttcagacctgagcatggcctcccgatgccacggtgggccggcagagttggagagaggccccgaggctgagcgtcaggaagggctggggggcgcagcctactctccatgggcagggaagggtctcctggcatctcatgcggccacatgccagctaagcagctaggactctcccaatctcttgccaatcctggtgacagccttggacgcctgctctggcagctgtgccgggtctgtgaggatggaggtggaggtgctcagctgccgcagcgtgctcaataccatcggcctgaggatgggcagggagcagtgctggtccagccaggagagcgccgtccggtgcagctcctccaggctgctggtggacaccatgcccttgaacgactcaaacagcggcttgatgatgatgctgaaaatccagaacttccaattctgcaaggtccgggcctcgtgccgaattcgccacccaggc

SEQ ID NO: 323369 - DNA, 1236 bp, Homo Sapiens
  misc_feature (585)..(648): n is a, c, g, or t
  misc_feature (680)..(701): n is a, c, g, or t
ctttttggctggcgcggtctaccgttccgcacctcccccctcttcacggcccgggtggcgactcagcacgaggagctaaccttttgtctcttctccgccctccctcgccgcctatgcaggaccgcacccccagcgcctccccggacctgggcaagcactcgcccctggcattgctggccgccacctgtagccgcatcggccagccgggcgcggcggcgcccccggacttcctgcaggtgccctacgaccccgcgctgggctcaccctccaggctcttccacccgtggaccgccgacatgccggcgcactcgccaggcgcactgccgcccccgcatcccagcttggggctgacgccgcagaagacgcacctgcagccgtccttcggggctgcgcacgagcttccccttacaccccccgccgacccctcgtaccgctacgagttctcgccggtcccgatgctgcccccatagcatggccggctctgcccaaccagctgccgcgcccgccttacgttgaccctacccgggtcgcgacccccctccggccggctccggcctactccagccgctcgcctcgtcatccgcnnnnnnnnnnnnnnnnnnnnnnnnnnnnnnnnnnnnnnnnnnnnnnnnnnnnnnnnnnnnnnnngcctcgcccaccttacggcctcatcctggttnnnnnnnnnnnnnnnnnnnnnnttgtcctatggcccgcaacacgaaccctcactacgtaccccggtcaccgccgccctcaatatcttgtacacccttcgccccgcaatcccaattacctcgaaggccgtccgctatcaaccgctgtgcgcgaatacctctccagccgcgtggtacactcgctgtcttgcccgttactctgtcgggtcgcccgccttgcacctgaccgctctcgcggtgccacgctcctagtgcctcggtacgccaccgcgcgcgggctcgtgcccactaaccgatacagcctccgtgcactccagccaagtcgccttcaggccgtccgcccgtcatctgcatcaccactcgtctccccatacatttcgtcccgcgtgtttgtccttcccgccgtacgcgcccggcgcgcccactgctacgtgtgtcgtcctagttactattcccatcatgctgcgctgcccgcgcgtctctcggtatgccctcgtcctcatccgcaccctcgttccaccgcgcccgaccgcgctgtttcttaccccgatccctctct

SEQ ID NO: 323370 - DNA, 936 bp, Homo Sapiens
  misc_feature (177)..(215): n is a, c, g, or t
  misc_feature (227)..(230): n is a, c, g, or t
  misc_feature (232)..(238): n is a, c, g, or t
  misc_feature (240)..(243): n is a, c, g, or t
ccccgtttcatatgggcgggtttaaattcccccgggttcctgcaaccggtttccttttatgccgggttacccctggccttttggaaatttaataccgactccctttaggggagaccggccagatttttcccattttgttcaggaaagcttggttcaggaaaccagctatggccatgnnnnnnnnnnnnnnnnnnnnnnnnnnnnnnnnnnnnnnngcctcgagtttnnnntnnnnnnntnnnntttcagcatgtgaggctttattcacaatccgtgctccaggccctctgcactgggacaggaccacagggctaagcccaggctgggggttcaggcaagagtcctgcccctagtcctgggctggagggcaggtcagctgcacggaggtgggcagggctcctggcccagctcacacgtgctgcttccggtggcgcagcacctctgtgggtgtaaagaggaagtccttcccgcaggcctcgcagtggtagggcctctgcaggacagatgtcttctggagggtttcgagggcagcttcctcagcccctgggggcccatcctgtggggcctgggggcaggtgttctcatgggcgatgcgctccaggggtgtgaggggcgcatgcaggccacagtgggggcaggtccagaaggttcggagacagtcgctgtacaggtctgtgtcattcgtgaggcagttgtaggtgaggaagtcagtgactgcgtagcccccctttgtggggtggggggacagggtggagctgccaaagaggccaggaagatggggggtggctgggatggtctggggtcccacatacatgttctggacttctagccctgtgagccgccggaggctgtaaggaatcttggatgccgtgaattgcaggagttccttgctcagggtggccacctcctcctcgtgccgaattcgccacccaggcc

SEQ ID NO: 323371 - DNA, 1356 bp, Homo Sapiens
aaaagccactctaataattacccctgcacaatgtaacagttacaaaacatctatccatgcctgtctggaagctcaggggacaattcttcatacacaggcttgcaggggagagtatgcaacacagagcaactggagtaaccctcagtcccaggacacaggatggcaggacaatcactgagcaggctcccagaggtgtcttctcctgggaaaagggctgccgagtgaccatggcggaggcaattgctggatgtggggacaggccatgtcccaaagcccctagaggtgttctctgaagaaccccagggccagatcctccaaaatgtcttgagctggttctcccttctgcctgcccccactctgaggtcccaaggtgtccaaaggggtgccgtcgtcaatggctcctgacaagtgtggcacagacgcacctaacctgccaaggaccaccctggaaaagtctgtggccacagctccttgaccacttgtcaccccttcctcagatggcagggtggaggcatgggactcaagctaccaacggaagcgaacctggatccttcccagttctctctgtcaggatctggaacttccatgcagtcagactccatgccgtgagtagggaggaaggttgtgctggccgaaggaccctcatcaacctgctcataaccatggcgtaagagcctggctagaggggcccctccattctgcccactgagtcagactgcttttgctgaaagcagaaatcccagaccctctgctcactcctcacggggacaagctatgagatgccaagactcctggaatccagcactgcttgcaccagtctatgtagcctgtacaaatgtgagcatctcccctcccagacagcctgaggcccaggacggcacgacaagaatgcaggcctgtgccaaatggggcatgtgcctggcaggactacttgggcaagactagaagagggggtaggaatccagaaatgagacgcagaactgtccccaggtcttcactgttgacacactagctggtttcactcacatctcagcaacaaaaacctgtatttaagcggctaattccagagatgagtagtggagagagcaaatgagcctggttagagctcactctgggaggagtatgtggacgacacttggctgtctcttcagggggccaggctgggcccccagcactcccggcagtggaaaggcagagctggctgccagctctggcctccgcctgggattcactcccatcctggctcagatctgtggctgtgcttcacccagtgggtcctccctcaaggagccaggcgggatctggaagggtctgcttatccccaccacagaacgcagcgccacccaggcctcgctc

SEQ ID NO: 323372 - DNA, 440 bp, Homo Sapiens
  misc_feature (375)..(391): n is a, c, g, or t
tttttgtaaaagccacgctaataattacccctgcacaatgtaacagtcacaaaacagccagccatggcctgctggaagcaggggacaattcttcatacacaggcttgcgggggagagtatgcaacacagagcaactggagtaaccctcagtcccaggacacaggatggcaggacaagcactgagcaggctcccagaggtgtcttctcctgggaaaagggctgccgagtgaccatggcggaggcaagtgctggatgtggggacaggccatgtccccaaagcccctagagggtgttctctgaagaaccccagggccagatcctccaaaatgtcttgagctggttctcccttctgcctgcccccactctgaggtcccnnnnnnnnnnnnnnnnncccgtcgtcaatggctcctgacaagggtggcacagacgcacctaacctg

SEQ ID NO: 323373 - DNA, 993 bp, Homo Sapiens
tttacagtggaacaaggggtttggcctccctaggttttccacgggccccccccttccttgtgcacccccggagccagccttcccacgggtttgggggcgcttcaagaagccctccccttttctgatgcatcagagccagaatgggggagcgaggccacagctgtccaggaaggggccacggttgctcggcaggctcaggtcttccaggcagggtgggctgctgccctcatcaccccccaagcaggcagtacaggccccagggcccaggtgccgtggttactgggaggaagaggccatctgggtggagatgaaggtctcgatgacgctgtggttggatggcagcaggtggctctggccattgctggagtctgaagctctggtaacagcacccaggctgctggaggacactgtggggctggcgcctgagccggtgggccggctgcaggtgctggatgccggcagggtcctggctggggacgtggagggtggtggcctgagatgccggcgtgtgaagcccggactcactggaggcctcagtgtctgaggtgaagacctgcttggtgggcgtgaggctggccagggcgctcaggttggtggtgtcggtgatgagcatagtctgcgggagcaggcccgtgtgggtgtactgggccacctcgggcttgtggctgtagagggcgtgggggctctgcagctgagccatggtggccatgaaggggctctgggtcacatggctctgcacaggtggcatgagcggctgctggtaggaggggtgcagcggctgggagaactggacgggctgcagggtggtcaggctgctgcccatgctgttgatgaccggcacactctgtgcctgcgtggaggccaggccgatgaccagggtggaggcacctgtgttggtgaacgtaggacccagggaggcaggctcaccaggcccgatggtcatgaccccaggaagtgagcctcgtgccgaattcgccacccaggcctcgctac

SEQ ID NO: 323374 - DNA, 1368 bp, Homo Sapiens
  misc_feature (59)..(59): n is a, c, g, or t
  misc_feature (972)..(972): n is a, c, g, or t
  misc_feature (1039)..(1039): n is a, c, g, or t
taaacaatcctgggttcaagttaaacagttccagttcccgaaaagttcacagccttgtnttgtgggcagttctgctgttcctggcttccccttccaggaggggacgtttgcaggtctgggggtcctggtgactaagctgttagctccactccctgcctgtttccgtcctcacagccctgggagggccccggtggacagagtccttacaatttaggagatgctgctggcaaaggaactgttgacccaaagcaggtggcctgaatgggaagtgccaggctggacacttgggggctgagggcactgccagctgccgccgcctctggacacctcagcccggcgctggcccgagaggagactgctttccaaatgcagcgaagagactgagacaagacccgtgcttccgtgtgagttgggatgcggggcataagttaacacatattccaatatgtccaaaacaaccttgcgttcagggcccgcgccccccaggaagccccatggtgaaggtgaggtcaccttgagccaggcctctggctgggtgtccccctcctgccgggaagccaaggtgccccacgtggcttgtgcaagccctcacaatccccttgaaacgtgttcctcctcctccaaggagtgcacccaccccccatgttgagtgtccgagccagatttccattgacccctgaccttccctttgaaagaacccacaccactaaattccccttggcactcacttccttagtgtgatgcatccacccagggaggtggccctgcgcggcgctggcacgctgtccaccctgccctgttgaccatcctgtccttggaccccaaagtaaaatggggccagtgtaggagacctgagggtggggcccttatgccagacctccaggggtagcgacctcacctgaccccagcttcggcttcctgtgctgcagaaggcgcttgctcccaagcccgtggtgacccacgtctccaccnccatggtgtggcaactgtggtggctgagtggaagctggggcaggagagaggacccccaccaaccccnagccaggtggcctgcagagcccactgccctacctctgagtcagcctgcggcctgagcacaccaatctactctctgggggatccagggtgcctgtgtgggccctcctagagacaccagcttggcctcctagggcataaggaatggggacagggcacagggcacgtgcttacaacggatatgcaacatggcttttggtagggccattgcagccagtggggaaacctgcgcggctgctgggaacagagcatggccagccttttgccagggggtggggagcatggggaaatgcaagcctcgtgccgaattcgccacccaggcctcgcttcctt

SEQ ID NO: 323375 - DNA, 1019 bp, Homo Sapiens
gagtggtgccatgtgggtgttaattaatgcaagaggtcccccagattggggagggggggcaacgggtatgttgggacccccccattcaaaccccaatatggaaggaaagcttaaattccccaaagccgcagtttttcagccctttagaagactcagccaagagctcccctccccggggagtggagtggtcctttacagccccccctttctgctgttttggagtttgttgggaggagcagggggctcccctccggcaggggccccagggcctcacgcctctgagagggtggtggtcctcccaagttcctgacttatgcccatctctccagccccacaaggacagtgaacccggtggggtgagcaggttgggccaagaggtctgaacacctggacagagttgggagaggttcctgcccaggctgacccctgctgcctcccacccctgccggggaaccccatgctgcagtcaggatggaggatgtgggttgtggggtgcagtttcccatgcaccccccgctggctcacatcaggccttggagcataaggggtgtctgaacagaaggcttccagcggcggaatcctagagccaaggatgggctcctgtgctcagacgttgcgcagaagagacagagggtccgcggtgaaggcagccacactccggcgcatttcattttcactacctcgaagggggatcagtgacacactacccagccggacctcaggcactgcccgggacacgcgtgagggctctgagggccacaccaggccgtcatgctgcacaaacagaaaggtagcgaaccactcccggagctccatctgtgtgtcacagcagaggtaccactgctgcttctcatgtttctctgtctcatgcaccactgtgaagccccagcaggtgggtggcctgagtttcttcttcactcccaggtagactttgagactcttaataggccactccttctcaggccggtgactccggcctcctgtagaccgcaaccctcgtccgaattgccacccaggcc

SEQ ID NO: 323376 - DNA, 872 bp, Homo Sapiens
  misc_feature (154)..(222): n is a, c, g, or t
ggggattcgactcgggcgcgtagggaggtcgtacgcagggagagtaggtaagcggcagaaatgagggggtgcggcaaagtgtgcgtgtgttgggagggaacgaggcgggcgggatgagagcgggtggcaatggagggaggtaggaaaacgtgannnnnnnnnnnnnnnnnnnnnnnnnnnnnnnnnnnnnnnnnnnnnnnnnnnnnnnnnnnnnnnnnnnnnaaggtgagtggcttgaatggggacagaaagtggggagcgccaagccgggggaggggcggccagaagccgagagaaggggcggagaggggtggccgagacacggggggccgttctcggctttgactaggtctgtatagttaggaaaatactcgacttacagttagccagcaaacttttaacacaatactttttttgctatgaataaacatctacctggtctttggcctgtaagaacttacattctacttaactttcaacaaaccaagtattgagcatccactgtgtcagtgtactagacatggtaaacaaaaatggtgtctttaaatcaagtaaacagacaaaaacaaaataatttttagaaaataatgcaattttttaaaaagtgcaaacacctattgaaaactatggctcgggtaatgctagaatacaaagaataattagatttttgtggaattttcaggaagaggtttcctgaatgaatgagcgagtacgggttttaagaaaacgaatcagctatggcaggcaggatattctaggcaaggaaactaaggcactagaaaagctaaagggtagaagcaaatcagtcgtggcatgagtccacacccaggtgtaatagaactggatcactggccaggcgcggtggctcaccc

SEQ ID NO: 323377 - DNA, 1678 bp, Homo Sapiens
  misc_feature (1204)..(1204): n is a, c, g, or t
  misc_feature (1626)..(1626): n is a, c, g, or t
gctgggtggcgaattcggcacgagggttccgggaagcggcctctccggcgcctgtgccggggccccccacgcgccccgcttccccgcctctgcggccgctgctgctgcggccgccgccgccctacaaagaggcctggtgttgggcccgtcggactttgcgcagtaccagagccagatcgccgcgctgctgcagaccaaggcccccctggcggccacggccaggaggtgccgccgctgccgctgtcccaactgccaggcggcgggcggcgcccccgaggcggagccggggaagaagaagcagcacgtgtgccacgtgccgggctgcggcaaggtgtacgggaagacgtcgcacctgaaggcgcacctgcgctggcacacgggcgagcgacccttcgtgtgcaactggctcttctgcgggaagagcttcacgcgctcggacgagctgcagcggcacctgcggactcacacgggcgagaagcgctttgcctgtcccgagtgcggcaagcgcttcatgcgcagcgaccacctcgcgaagcacgtcaagactcaccagaataagaagctcaaagtcgctgaggccggggttaagcgggaggacgcgcgggacctgtgagccctcccggaggtggacccccttcccagcacctctgcgagagatccggggacctgtgggcagctggcggaggggagactcagcagacggaccctctccgttgcctgcctcccaaaatggagccaggcttccaacttccgctgccttcggacatagggacccagttcccaggagcggggaggtagggttggggctggggcatttggattgtaattgggagctctgccgtacgccagggcgggttccaaactctaaaccgttcccaccggtcagggagacctacagtttcgggggaccaccctgggtctggccttttatataggaaatgctgctgaactgaatagaaaggaacttgggagatttgaaacagtgctcgggttttcgctaggaccggtttgggctttgtacaggttatttaatagctttgttaaagataattataataattataacattaataaaaatgttgcttttgtcttcagctccatgcagagctacagcatgatatgtctctgtaaaagtgatcagcagttgcagcgtgaaaataaatactttaactcaggggtcacctacaggaagaccccgttgaanaaaaaccatacagcagctggcgcccgatctaatgcctcgaacggccccactgcccggggggcgaataaaacgtatcggcaaatgcgaatgggctatggcccgttgcccgaacgaccccctcgctttgtccgccgcgggttatcttatgggcggggggggccaaaaaagagggacgcagaatgcgcgcacgccggtctccaccgttctattctcgctcaccacctaatccttccctacttccacgaggcgggtggacacgctcctaacacgccgcccctatttaaacggcggggctcctacttatcgtagtcagagacccaacagcggcatcaggcgtcgcccggcgacacaattacagaccacgaacggcgcgcacgctagactcacccgaacgacacaatatgatataccaccctctatgnatagagaacggcccaggccggcacgcgtcttagtgggtgtcgtgtgagcgcc

SEQ ID NO: 323378 - DNA, 969 bp, Homo Sapiens
agggtatcacaggaaaccgggcaatgggcacagggccatttccattaccttctttttcgcgccccccgtccataaaatccctcggattttggtggtagcgaggtcccttaggagttggaaaacaacttatttgataccctgagaaaaaggtgcagggaaaaattttccttcctgaccaggtgggcctgtccccctgagggccagatcattctctcgccttctcccttaaggccttgggtcatttgggacctcactggccagcacccagaggctgaagacatccacagccagagcctggaagccagacccagagaccaggagagggaatgtctacagcgtggctcctgaggtcagggccaaggtcagcgtgggaccctcatcggtcaagggccagcgcctcttggatcactgtccggagtccgatggaaaacagctcctcccatggttcccggatccaggcaagcagggctgtcagctgctcctgacacaccacacggagtgcccaaaagctctccagccgggacacctcatcgtagaagagcagccgcaagtcctcaggggctgagcggtagagcagcacggagctcaggctgctgagtggctgctgctccctgacacgcacagcagggcccggccccgagggaggcaccttctcagaggcttcgccagatgctgctggaggagagggctctgccggggaccctgcagcatcctcatctaacaggaacagggtggacggagtcagcaacagggatacgaggcaggtggaagggccttcaaccaggaacgcccgaaggtagaagaactggcgagcctccaaggatgagtctttttccagcaatggccagagccggtgctggggggtgacctcctcctctgtggcactgacacagttcctccaggcagggggcagagactgcaagacatcaaggagctcctctaggcctcgtgccgaattcgccacccagc

SEQ ID NO: 323379 - DNA, 866 bp, Homo Sapiens
ggcccttttaaagaggtgggaaaccaccttttattgatccctgagaaaaagtgcagggaaaaatattcctcctgaccaggtggcctgtcccctgaggccagatcattctctcgcctctcccttaagccctgggtcatttgggacctcactggccagcacccagaggctgaagacatccacagccagagcctggaagccagacccagagaccaggagagggaatgtctacagcgtggctcctgaggtcagggccaaggtcagcgtgggaccctcatcggtcaagggccagcgcctcttggatcactgtccggagtccgatggaaaacagctcctcccatggttcccggatccaggcaagcagggctgtcagctgctcctgacacaccacacggagtgcccaaaagctctccagccgggacacctcatcgtagaagagcagccgcaagtcctcaggggctgagcggtagagcagcacggagctcaggctgctgagtggctgctgctccctgacacgcacagcagggcccggccccgagggaggcaccttctcagaggcttcgccagatgctgctggaggagagggctctgccggggaccctgcagcatcctcatctaacaggaacagggtggacggagtcagcaacagggatacgaggcaggtggaagggccttcaaccaggaacgcccgaaggtagaagaactggcgagcctccaaggatgagtctttttccagcaatggccagagccggtgctggggggtgacctcctcctctgtggcactgacacagttcctccaggcagggggcagagactgcaagacatcaaggagctcctctaggcctcgtgccgaattcgccacccaggcc

SEQ ID NO: 323380 - DNA, 959 bp, Homo Sapiens
cttttggaagccctggcccctttatagggaaaagggccccggagggcccccggaactccccccttctcccttgtaagccaggccccgaggacccagggtgcgaccctgtcagctcctttttttcccccctcaatttcagagatggcggagttgagggtgccgggacccagttaacaagggcgggtactgcgatagatgatgccttcctcgtgaagccggacaaagccctctgtcccagctgctgagagtttagggtccatggtgaaacaggctcgatcccagtccaaggagctgccaagcttcttcaactggtggtaaatccggtcacctttctcctccttccacttccagacttcctgtagaaaggcctcgcggcccagctggtgccggctcagtccctgctcacgccatagcttcttctccaccaccacctgggtggcaatacctgcatggtcacagccagggttccacagggtggtctccccacgcatgcggtgccatcgagtcagggagtcctggatggcgttggtgagtgcatggcccaggtgcagggagcctgtcacattggggggtgggatgcacatcatgaagacacctcggggatttgctgctgacacattaggacgcccatactctggcttgaagaagccctgctgctcccaccaagggtaccaggcagcctccacataccgagggctgtaggagtcgggcatggggccactgacatctttcttttccccgggtggggttgggaggtcataggtaatgaccccaggatcccgtttctccctcttctctggttttggtttcttctcccctggaggtggctgctgctgttggatcttctgcttctgttggaatttctctagcttctcccgtttctttgcctctttcttgagctgagcagctgtctttgggagggcaggagcctccctcgtgccgaattcgccacccaggcc

SEQ ID NO: 323381 - DNA, 1067 bp, Homo Sapiens
  misc_feature (173)..(185): n is a, c, g, or t
  misc_feature (319)..(340): n is a, c, g, or t
  misc_feature (974)..(983): n is a, c, g, or t
gagaacagcggagaaggtccaccgagcctggcgaaaggtccgctgagcgggctgtcgtccggagccactccgggctgcggagcacccagtggagaccgcgcctggctcaggtgtgggaccccatccttcctgtcttcgcagaggagtcctcgcgtgaaataagcgggttttgnnnnnnnnnnnnngaaggagtggaagagggggccaggatccaggcctccatccccacagaagtgaagctacagctgggaggtctcctcccaccccaaccgtcaccctgggtcccgactgcccacctcctcctcctccccctcccccnnnnnnnnnnnnnnnnnnnnnntccaagcacaccggccataagagtgcgtgtgtccccaacatgaccgaacgaagaagggacgagctctctgaagagatcaacaacttaagagagaaggtcatgaagcagtcggaggagaacaacaacctgcagagccaggtgcagaagcttcacagaggagaacaccacccttcgagagcaagtgggaacccaccccttaggatgagggttatgacatcgagcttcgcgttgctgcagcagctgctgccccaccccctccaatataggaagagtgcccagaagacctcccatagaagttcgatggcaacccagacatgctggctcctttcatggcccagtgccagatcttcatggaaaagagcaccagggatttctcagttgatcctgccccgcgttctgcttttcggaccaagcatgaatgaccccgccgtgtctgccccgttggggccctaacctaaatctgggagcgcttcccactaatttcgatgcacaaccttcccccctttttcatgatgggaaatgaaccccattggtttttatacccaccccccccaatgtttaacaacggctgtccccacatttttaaccattcttttaccgcgttgccgcaaaagggggatggttgggtcttttnnnnnnnnnnaattaccccgttatatgtcccttcccccacctatctccctctgttattatatccaccccgccggtttatcggcccggatttttc

SEQ ID NO: 323382 - DNA, 1159 bp, Homo Sapiens
ttttaggatgattgagtgtttctttaaaaataaaaaccccacaaaaaagccagaacaccctacccaacccagcccagtgtaacaggttagccattaacacagaataaagaaggtcccagccacacacgtcattactcggcagagggtgtccagcctggtcggccgacgtcacagtggatggccctgcgtggctgggacacagacagggagcaggcatggcacctgcgccacgcagagcagcaaggctgagcatgaccactggaaataaataaacatggtgccgacagcatctttaaattagtaagacgttagcacaaaacaaaaaagcacaacgactgaaaatgcacttgcttgttgtggtgggttgtgcttgaaaacacctgaagcccacaagtggaaaccgctggggacgtttgtcagtggagtgtggagaaaaagggacggaaaaatcaagtcttctgagacagtcccctgcggtggccctggtccctgtggaattccagcacagcaggagggggagggggaagcaggcctcagtcagcaccgcgggacacggcccctaccttctgaagtggggtccccaggctggagtggggcacacagcaccaaggatcacagactggaccccccaccaaccttctgcggaggagctcccaccccagctcagacgcccagaagagacctgcgcagtgtgaagacggaccccagcggccccagccatttcactagcagctactttccacaacagacgctggcagcccccatgctcgcccacagccgcagcagccaacaggcaagtgcgtgccgtcgagaggccgccggctccctgtatccttgaggcatgtccacgtcccagagcaggaggttggaacagaacggcatcccgaggacccctagccgaggcgggaaggtaagaggctgacgtcgtgcgtgggccccgccggccccagtgggaagcagtggtgcgtgcctccagggagcacttctcctggacccggggccgtggctgcctacgatgtccactgcctcctggattcacacagcaatgcaccaggcaggtggggcaccagctgctgtccttatttgcagccaagagaaccctcgtgccgaattcgccacgcaggtcggcggggcgataagcagggggtggagagggagc

SEQ ID NO: 323383 - DNA, 772 bp, Homo Sapiens
ccttccttctgaagtggggtccccaggctggagtggggcacacagcaccaaggatcacagactggacccccccaccaacttctgcggaggagctcccaccccagctcagacgcccagaagagacctgcgcagtgtgaagacggaccccagcggccccagccatttcactagcagctactttccacaacagacgctggcagcccccatgctcgcccacagccgcagcagccaacaggcaagtgcgtgccgtcgagaggccgccggctccctgtatccttgaggcatgtccacgtcccagagcaggaggttggaacagaacggcatcccgaggacccctagccgaggcgggaaggtaagaggctgacgtcgtgcgtgggccccgccgggccccagtgggaagcagtggtgcgtgcctccagggagcacttctccctggacccggggccgtggctgccctacgatgtccactgcctccctggattcacacagcaatgcaccaggcaggtggggcaccagctgctgtccttatttgcagccaagagaacaggcccagagggaagaggtcttgcccaacacagtcagtccacctgcctgctggtggtcctcggcctccagaccgtgggctgtcccttggacgagtggaattcgtccccaggaaggatgcaggtcctatgagcagacgctgtgaagtctgtccatgtgcagcgggaagcaacggggcaggggtgaataaaggtcttcattcctcaagcaagagagacggacatctggt

SEQ ID NO: 323384 - DNA, 1553 bp, Homo Sapiens
  misc_feature (47)..(116): n is a, c, g, or t
  misc_feature (133)..(195): n is a, c, g, or t
  misc_feature (202)..(259): n is a, c, g, or t
  misc_feature (271)..(287): n is a, c, g, or t
  misc_feature (420)..(538): n is a, c, g, or t
cgggcggaatacgtggggcgacgcggaagagactgcggagaccgacnnnnnnnnnnnnnnnnnnnnnnnnnnnnnnnnnnnnnnnnnnnnnnnnnnnnnnnnnnnnnnnnnnnnnnagaaacgataggaaacnnnnnnnnnnnnnnnnnnnnnnnnnnnnnnnnnnnnnnnnnnnnnnnnnnnnnnnnnnnnnnnagcaacnnnnnnnnnnnnnnnnnnnnnnnnnnnnnnnnnnnnnnnnnnnnnnnnnnnnnnnnnnctcgggagagannnnnnnnnnnnnnnnncacagaactccgcggggtcggggagggagacgtgggtggagagggtggtaaaaaggtgggggcgggaagggaataggggccggcggagtcgagagtgagcaatggggaggttgagaggaataggacgggagtnnnnnnnnnnnnnnnnnnnnnnnnnnnnnnnnnnnnnnnnnnnnnnnnnnnnnnnnnnnnnnnnnnnnnnnnnnnnnnnnnnnnnnnnnnnnnnnnnnnnnnnnnnnnnnnnnnnnnnntgcggctcccccggcaatcgctccacctgggcccgcaagatgcccccagccccggctgctgcccggtgcactttggcctcatcacttttctgccagggaggaatgggtcagcggtggcagggtggcacagggggctcccggagtccggcccgcctcagcatccaactgcccagctttcttcccgcagctgctcagcttcttggcggtgtcgctgcagctcctgggaacaggcttccagctccagctcccgagctcgggcggcctcctgtagaccccgcgcacggccctcactgacccgcagcgtagcacgggcctcccgcagcgccacccgcagagccaccagctcgctgcccttctgcaccagctctgcctgagactctttcagctgctgcttcagcagggagatctcgcctgatttctggcacacctcccacttggtctcctcaagcctcggcccgagctcccgctgctcccgctccaaggtggcgcagcgccgctccagctgttcgcgctcctgcagcagctgtgcgaagtcgtcctgcaattgccgcttctcctgctgcaggtggaacacctgcagctgcagcagctgttgggcccgctgtgcccgctgtgcctgggccgcacagtcctctcgcagggcctcacgctctcgctgccagtgccgctgccgctcctcgtatgcctggcacatggtagcctcattctcgtccagactgtcccgcagctgctgaagctctgcctcccggtctcggagctttccttccaggacacagtgcagcagggcctcatccgaaggaggtggaggcgggggtggtggtgagcgctccccacaggagctgctgtcaggggaggcccgagtaccactgcccaaaagccccccagccacacggccccctagggagcctgtgctcttgctggaggaggaccggccaccctcgtgccgaattcgccacccagccctcgcagctgggtgtgtttgcgcccagccacgtgaggaccgtcccgctcgtgc

SEQ ID NO: 323385 - DNA, 1667 bp, Homo Sapiens
  misc_feature (1412)..(1472): n is a, c, g, or t
ccccagcagtctatgtacagggccactccctgcctctctgccatagagaggttggggggcagctgaggagtggtgggggctgggcaccttttcttcagccacaggcccctgaggaattaattgactgtggtgtcaggaagtccctggtgccaagtagccaggcatctcagctggcctccagggaggtggttattgctgggagggcaggacagggcctgctccactgctactgggctgaagagctgtctgtggctcaaccctacagggccagtccccatagcagccccaatctctacctgagaaggggaacagactgagggccagaagggtgttctttaggaggagagtgggcgcccagctgattttgagaggcgggtgccctggtgtagcctggctgttgtcagctcccgaggatgatgcactcccctgattccagctgcctggcccccttcttgagcagggcccccattcccttcagttaggcagttttcttgctgtcttctcaccccagagacctatgtggccaccttctatgtgtcagccacagcctgggcccttgggggcaagagtggccatgcagatggcacttcctccagcatggtgtgggacccagccctcttggactcagcagccactctccgacactgttgtctccagggtcacagccccttgctgcatggccgcagtggccacattgatggcctcctctaaggtctgctgttcctccagctgcactgcaatgtgcgttccgttggctgtggccaacagtgccacctgttgatgacgaagagatgctacacttgagtcctcagccaccacagccccagaggtaattattgtgccgggctgcgtcttgggtgccatcggccgctgacccatggggactgtatgtgtgccagatgtggccaggtcggcatcaggactggggatggtgagggtggtgctgccgtgctgggtgaccatactgatggcactccccagggcctgcaggtcttccggggacaggctgacctgctgggcaccatcctgagtgatcagagccacctggggggccccatcttcttcagtcaccatcgccacctgggctgggatgtcatctctctcttccttcacctccgaaaggtaagctatccggggtcgtttgggtggcggactctcctcggctgcagaggcggcctcaagttgctgctgctcatagagggcctgctcactctcctccgtggcctccagctcgccatgggcactgcgcttgtgcatggccaaggtggaggtctgccggtaggtcttgccgcaggtgctgcaggtgtagggcttgcagtgtgtgtgcaccacgtggtgcttatacaagctcgagtactcggtgaagcgtttcccgcagcctggcaccgtgcaaacgtatggcttctcccctnnnnnnnnnnnnnnnnnnnnnnnnnnnnnnnnnnnnnnnnnnnnnnnnnnnnnnnnnnnnnaggggtgagggacagggttggtgaagggagagccagagggagggagagggactgagacctgagactctgaatggacagggttggggaagatggccagtggaacacagagaggacacaggtgttgaaccactgaatccagagacaaggcggaaaggaaacgggggacagcctcgtgccgaattcgccacccaggcc

SEQ ID NO: 323386 - DNA, 981 bp, Homo Sapiens
ccatcggaagagtttttttccatgtggagtttttcatatgtgcctgaaaaggtatgcttcattaaggaaggattttcccccagtggattacatcaaaatgacttttcttgtgggctagttctctggtatacaatatttggtgtcaggctgaagatttttccactctgattaaacctcagaaagttttctcaccagtagaggttttctcacaccagggtaaggaaatcttttcccatactgattacagtcatgagtgttccctgtactttgagttctcacgtgcgtcttaaggcatgagtgttcactgaagacttctccacattgctcacagtcacagagttcccttccattgtgttttccttccttggagaactcctccctgaactgtccttgactcttcttgttccaaccaagagattagactgggtttgatgatctgacctcctactgtggccaggttcttgtagttctccagcatcacgtcactgtagaggcttctctgagttgagtccagtaaagtccactcctcctgggtgaagtccacagccacatcgtcaaaggtcactgaatcctgataacaatctgttaggcagtcagccactattcttcctgctggtgtcttttcttcatgaaggcaaactgggtccccagaaagataatgtccatgggacaaatcaacagctgccatcccgcgaggtgagaacgtgtcagaaccctcctttcattgatgtcaccatcacttcaggacacctcattaatctaaatggacagtggcaatctccattcctctttaaacagggttattgggattccggaacactcagaaatcgccaggtccctgaaccgggaagatcctggggacggagccaacgcggatgcaaaaggcagcaattattttcctgccggaaaaaaattcacaaacgctgctttggaggcctttggagcctcgtgccgaattcgccacccaggcctcgctacctt

SEQ ID NO: 323387 - DNA, 1036 bp, Homo Sapiens
acggcagccgcgctgtgtgtggttgcgccgtgtgttttcgtccccggcggggctttcatgtcccgtggtgtgtgcgtgctctctctggctccacgttgctcgcgtgcgccgtttatccgcgcatgcagcctccctcaattcctgagcgttccggtttcgcaagttgtccctaaagcgcgggctttctctccttgttagctaatgctgccccctctgggatttgtgtatctcatggccagttgacgtcttgcaggctcccggtccttgatcccaggctccctggactggacgtccacactgctggccaccagccgttttgggggaagacagcctgtcccgggccttggcaggccatgccatcgggcccttcgcttccgaggtctcaaagccaaagacagcagtgcgaatgatgcgggctgagttcttatggaagtcatcgaaagtgacagaggccacggccccccgcacccgggatgcgatggctttgcaggcatcacctacaaagtctggcactgaaaagagcttggccgtctcttgggggtccttccggtcattcacctcaaagtgccagttgtaggccagctgcagttgcagcctggcatgatccgccgtttcgatggtgatgacgtctgtgaagaagtcaggccccagcagcaggcagagcgcacggcgggcatggggacgcttgggccgcccagctgagagggacaacactgtgaactgctcctcaggacccagcgacaccagctcaggcccgaagaccacgcgggctcgcttctctcggtagtcgtacacctgcaccgcagcgttgtggggcacgcggtagctgaccacacgggtcttgttccggggcgccaagggctggaggctcttagctgtgtccttctcacccctgtctgccagagggtcctgccccttgttcagcagctcctccaccccgggaggcagctctttctcccacaggacttcgtcctgggtcagcatgtaggtgcttccgacgcgtggtcgacgatatcccgtaattccgggccgtacc

SEQ ID NO: 323388 - DNA, 957 bp, Homo Sapiens
gccgtgccccacggggcccctggatgtctgggcccgccaccgtttggcctagcccccggctctcttctccggtgtgaccggcccccaccttttgggcacgcgtagcgcccacccggtcctttccgcgcccagcctggagctcttaaccgtgcccttggcacccctgtctgccaggagggcctgcccctgggtccacagtccctccaccccgggaggcagctctttctcccacaggacttcgtcctgggtcagcatgtagtgctccaatcacagcgcgcacctttccggtctgacatcctgcacatagatgccctcgttctcgtctagagggatgcctggcgctcctccaccacctccactttgcagatggcacatactccaggggtccgcggatgagccagtggtccccagcctggtgtgagaccttctcctcatcctccccctcctccaggggctgcagggccctcagcagcagcccctgctgctccgacagcacatacacatcgtgggtgccttgttccaggtgctgtggtggctggaggaagaaagacttctctcccttgaccacgcgcttctgccccagctgattcttgccatccggtccgacagggtcgagaatcacgcagtagttgtgggggcccagggtggtgatgggcacaacccccagcacctcctcgtggacatctggcacgtgggcctctgtgtcctgcactgttaccagccactcctccccagtgcggcgggacactcccctgaagtcccggaagttccgccgagcccggaggtgcagggctgtcttttccgtaaggatgacggcgtccaccaaatccagaacctcctcaaacaccgctgggaggtacgcccctacctgtggtgaccagccattcttcccctgtcaccctctccttaccgacgcgtgggtcgacgatatcccgagaattccggaccgtacagcct

SEQ ID NO: 323389 - DNA, 1318 bp, Homo Sapiens
  misc_feature (41)..(41): n is a, c, g, or t
  misc_feature (1186)..(1186): n is a, c, g, or t
  misc_feature (1224)..(1224): n is a, c, g, or t
  misc_feature (1270)..(1270): n is a, c, g, or t
gtctccctccttttcctttactattccacccccagccactnccctacgtagcgaggcctgggtggcgaattcggcacgaggctggggcctgcggcagggaggggagccggcgcgtgggatgcagggccaggggagcacggagcctcagccccggccttcccgacccaaccctcctctgtgacgggccccaacctaaccaaacccctcctggcagtggggtgagggcacacgagcagttcagggtcccagcaggaagtggggctgcagggccggggtgggtcctgggcctggccatcaggcagcctagcaggttgttctgggcatggagggggcctggtgtggctgagggcatgcccagggctccctggaggatcccgctctgtgccctgcccaccctgtgcctggggagccctctgccctcacagcccacccaccccattttctatgaccacagagctccgacctggaagatggctcacccaggaggtcccaggagctctcacctcccccagggacttggaggacacccagctctcagacaaaggctcgccttgccgggccggggggagcccgaaacagccccctttcgccgctctggcccccccggaggcatggttttggcggaaaccccccatggacggcaccgccccgaaaccagccgggggatgcccgccccccgagaaaaggaggcgggccgggcgcccctcaaaaacaagaagggttttggaagaaaacttcccccgccacggaaaaagacgccgcgcccttctcaggggcaaagtaactggccctaaaaaacaagggaactgtggcgcggcggtccacggggaggcggcgaaagacggtaacggcggaaaaccctcgtgtaggaaagaaacacccacatcctcatcccgggggcggggccccgcgcgtgtagaacttatatggcccaccccgtggacacacagttgtggtgacaggggggactctatactctctcaacagccaccgacggcagaaccgaaaaggctgcgcataatcgagggcgccctcgccgtacaacaccgagggtgcgggtgaatcaaagccccccaaaccgagggggggccgccggagtggtcctgtttcaccgtgcgcgcacgagattcggtggggaggcggcgagtacctcccttattgctccccccttggtgggggggccgcncatacacacaccttaatgcctcgcctcgaaaacgattnctcgctcgcacctcgtgaaccacactttgggcgcatatccgcgcanaatatgacgcgcgccaatatccgccgagggggggtcacactgaaccag

SEQ ID NO: 323390 - DNA, 924 bp, Homo Sapiens
aacttggtctcccccaggaggaaatccattttgctgccaaatgtgaccagcagacttggcaggtacattttagcacaattcacagtccctgtcacactgcccaacgtggcccaaggcatggcgtgcagggcagtctctctggagggcctctgctatgcctgctcaccagcaccacctccaccagcagcggagcccttgctggatgcctgggcatctgaggagcgggaggcctgcttcggcaggcggatggggacatagatgttggaagcacagtgctccttgaggtactctcctcccttttcttcatactctttcctggtgatccaaacttcattatcatctaggtggttcaaggcccagtcacgagcaccgtaccaggcatccagcacagggttcgaggcaagttgaacctgaaaagaagaccggaagggtctcatctccaacagttccttctccattctggctttcatgccaggatacatcgtgttgccgccagtgaggaaaacgttctgaaccagcatttcctgaatgtcctttgggtacctgtccagaatgtactgaagagtctctgcaatcccagcctgttcttctcctatgagagatggctggaaaataatctctggagctcgaattctttctgtcccaacaaatagctgatgatatgctgccaagttaaacacgggctgaacagtggtgaccggcttctccactccaggtgtttcctctgaaaacaagggatcaaaatcattcatgctttccacatcttccaaagacggctccagctgctccaggtcaggggtctctggcttgctgtctaccacatccacctcgaggttgacttccgcttggaggattttctgcttagcctgctccactgctatactgagcttctggatgtaggactgcagctccgccacccaggcc

SEQ ID NO: 323391 - DNA, 961 bp, Homo Sapiens
  misc_feature (447)..(485): n is a, c, g, or t
  misc_feature (873)..(873): n is a, c, g, or t
gtgacggcggtggtttagcgccggtgggtaggctggcgtctagatcggaagaggagtcgtcgggcgggcgaggtgggcgggggccggacccgggcaggcgcggcccaagtgctgcccgggcccctccggcgcgctccgatataaaaggccggctggcgtgcgtgcaaggcgcgcacgtcgtggccgctctaagggccggtagggttcggcgagttgggcatgttggccgcgcggcccactggcggaccctgcttggtcgcccggcctgggcgggggccccgacgggtcgcaggttcggtccggggctcgcggggccggggctaagcggggatggtatccgtcgaactgggtccagaagacccgcccacggagacaggtactaatgttcctcccattccccagagacgggaggtgaaagtcacaaacatgaaacagcaaacgcccgcnnnnnnnnnnnnnnnnnnnnnnnnnnnnnnnnnnnnnnnactgcctcggagcatgcactcttcaccaccccgttccaccttgaggtcggattccgcacgccgttcgcggcattcccaccttcctacgtgggacagttcccggtactgaggcatggcgctgtccagccctcaggcccgcagccgtccgcaagcaggagaacgcggccccgctgggcgatcctgcccgaaggcgcccgaactgcggcgcgcggccgggtcctggcgggcgggtcgagtctccccaaggcggccatcccaagcagctccccggatgtccctcagacccgcgcgctaggctcaactcagaaaggcgggaggcgcgaagcgagatcggccttgcccctcgactgtcccctcatcgctccccgtcctctattccctcccaaantagcccccggcaaataggttacacatcttcacctgtcccagagcctcgtgccgaattcgccacccaggcctcgctaccttggaccgta

SEQ ID NO: 323392 - DNA, 1031 bp, Homo Sapiens
  misc_feature (173)..(173): n is a, c, g, or t
ggagaggggagaaggtggaagagagaggagggatgggggggcgggagaatggccgtcccgagactgatgcggtgggacgcgggccgcagggggcgggcccgctgggcgccagcagacgggaggtcggcgatgggcggcggaacgtgggtgcggggagcgttatgcggccgcanctttgggggcagagaagagatggcgcaggggcgcgtgatagggagccggcgaaatgggcggggaaggcgcgcgtggaccgatgctgcagggagggcgggcggtacagggatcgtggtaggaagaagggagccggggcgccccacaggggaaaggggggggcgaggattgcgggtccagaagcaacaggtccgggggccggtgccggagtgtcaccacacggttggtgtagcggttgggctggcctgttgttggccaggctgaaggcccgggccagcccaaagtctgccagcttcaggaccccatcacgagtgataagcacattagcagccttcatgtccctatgcaggatcttgtttctgtggatgtagtagaggccgttaagcagcatctgcatcaccctcttgatctcagacagcgtgaacttgaccaaaacattgctcaacagcccagcaaggtcatgctcgcagaagtcgaacaccaggtatatactacccttgcagcggttatagggggaagctttggttcgacaaatctcaatcaagttgaccacattctcgtgttttagaagctgaaggatcttgatctcccgcaaggctgtaatggggaacccctccttctcgttttccatcagcaccttcttcagagccaccttctggccggtcttgcggtgcctggccttgaacacctccccgaaggtgccttggccgatcttggcgagcttctcgtatttggaaacttcatcacaaaaagggcactccaccgagtcgtactgctttgccatggccgcctccaacgcgccgccgccgcccccagtcgctgctgccctcgtgccgaattcgccacccaggcctcgctac

SEQ ID NO: 323393 - DNA, 1047 bp, Homo Sapiens
agtgaaaatatatatttgccaccagaattcactgggaccccagagccagcagatgtggttggaaagatcctctgctctgtcctctggcctcctggtgcatttgggccatcagttggactggaggagctggacggggcccatagttttcctcaggaggcaccatcctcatcctccttgggaggggaagccaggacagggttctcgagagttcgagggacacctgcccctgacgggtcctcacacagcgtaggcagcgtctgctcccatgaagcccagttcacctcctccaccctgaagcaccagcgctcatcggggctgccatctggcttagtgccaacggtcagcatcacacctgcccgctgcttcttcctgcaccaccaatagccattctccatctccaggacagagatggctttctgcagcttccagatgctccagctgtcagtggcgacactgttgacggtctcgctcatgagggcgatgagcatgttgagcagcaggatgtaggtgagcagcacgtaggccagcagcagcagcagcaccatgccgcggaagtgcagctgctcctggaaggccagctcgcccatgccgatggtgaatttgaagagctccaaggaggcttccaggatacccctgtactgggccccgttgccctcgtcctcctgtccctccatgggctgcactgactctgtggcattggggcctgtaggagcttcggggcgccaagcctcctggctcaggctcaccagggctacagcgaagccgaaaaggaagactaagtagatcagaaggaagcgcagcaggtcccgcaggatgaccttctggatcatgacactgtagatgcctgtgtgctggaagccacgtgtatagtaaagcaggttcagccagcccagcaccagcgcagacacaagcaggggcaggtaccactcgatggccaggaaacacagcacctgggacaccactgtgagcagggcctggaacaggaagaggatttcaaagtagctgtctatgaacgagatccctcgtgccgaattcgccacccaggcc

SEQ ID NO: 323394 - DNA, 439 bp, Homo Sapiens
  misc_feature (14)..(14): n is a, c, g, or t
  misc_feature (22)..(22): n is a, c, g, or t
  misc_feature (33)..(33): n is a, c, g, or t
  misc_feature (72)..(72): n is a, c, g, or t
ccccttgagggtgnaaaggggncaaggggaaancccctggatatggcaaggggattgggaaatgccttgtgnagtgagggaagcagggagaaggattgctggccttccaggatcgctgaggctgtccccacggcatgacgtgttttcatgactgtggccccgtttccctggtgcctgcttcctggggacacactcaagggttaagctacagtgcttgccatctgtttacaggaactctcgagaaccctgtcctggcttcccctcccaaggaggatgaggatggtgcctctgaggaaaactatgtgcccgtccagctcctccagtccaactgatggcccagatgcagcaggaggccagaggacagagcagaggatctttccaaccacatctgctggctctggggtcccagtgaattctggtggcaaatatatattttcac

SEQ ID NO: 323395 - DNA, 555 bp, Homo Sapiens
  misc_feature (290)..(290): n is a, c, g, or t
  misc_feature (336)..(336): n is a, c, g, or t
  misc_feature (342)..(342): n is a, c, g, or t
  misc_feature (360)..(360): n is a, c, g, or t
  misc_feature (362)..(362): n is a, c, g, or t
caggctggtacggcccggaattacgggatattgtgaccacgcgtcgaaaggagttatctatgccagatcgaaggcctaagatgattaagacactatgagtgccttcaagtggttggggacgttcatgattgtggtacagaccaaatagggtttcacatcattcttttatgtaatcatacaacagatatttgcacctacatgtgcagagcactgtgataggcctcagtgacacagaataatacggcaaaggaccccacccgatgagccccctcccaccacccaccataagntaaggggggtggtttaatgggagtggttctgggaatatgaagtggngggcanggcattagggggtggcanangggacaagtgtttatctgatcagttatgtactgtttataataagtaaatcagcagagggggaataatacttagaacctatagagagtaaatctgacaagatgaaatgctgatgaaaatatggaggaaatgaaactctcatgggttttgcagggaatctaaatccagggctggggttgtgaatgtaaggtggaa

SEQ ID NO: 323396 - DNA, 1007 bp, Homo Sapiens
  misc_feature (325)..(325): n is a, c, g, or t
cttaggggccccccgaggagcaccttgaatagcttgccatgagggtggtccagccaacccaggattcctttccattcacctccaattttgactcccgtttttcctgcttggggatttgctgagcttctcttctattctgtgccgtggcagtttcaatagcagctgaagtggccgcccatcttccttgtccaccaggtccccccagctccttcctgctgtgatgtccagtcccctgggcaggagctcctcgccgatggccttgatcttgctcaggcagttcctcatggctgtgctgtcggcattctcaaggctttcctcttccttnccagggaggccaggtaggcgagggtttccctgcccatacttgcttacaggcctcggtcagtgagtcggcaggctcaggtggggctctgaggcaggtggtggcaccatgagccaatggcgtcgctggtcaagtgggccagcagggttatggaatggagaagtccactgatgtcttctgggcaggccagatactggctccagcttttctccagttgctcgatgcagctggaaatggatgtgaccgtggagaggaggtgatctgcagacccagcgcagctgatgagaggaggttcttcaagctggttcagggcgtcttgtatcacctgctccgcagccttcctggaccccaccagaagcatttttcgttggtctttggcaagctggcacatagattcctctgtgctggccagtttgagctgagtgtcctgcagttctttccgaagagcagataattcctcctccctatgagctgcgccactcaccaggctgtcccgctccttctctagctcggcgaactcggctgcccagtttgcttctgactgggcagaagtttccaggctgccttgcagaacctgaagctcccgttggcttgtggcaagttcctgcttcaagctctctagaacttccagctgttcttgagtcttccgctgcctcgtgccgaattcgccacccaggcctcgctc

SEQ ID NO: 323397 - DNA, 917 bp, Homo Sapiens
  misc_feature (824)..(824): n is a, c, g, or t
ggcctgggtggcgaattcggcacgaggctagttcctcactcttccttttcagaacctgatgcccagtaggggttgtcctggtgacacccctcctttttccagtgcccagaggcctggtggagccataacctctcccacagccagtgccaagtcctccccctgcccattctcatggggcaggaaatggggggatcactttccaagtgccaaagagcccagagggactctaagaacctaaggtggaaacactgtcctctcatcttgggaccgagggggtggggaagttccccaacacataatcccaagactgtgcccctcatctgcatcttcagatccagtactctgtgtacctgctccagccccacccccacagagagaacttgtggctctggggctggggtgagggctggtggttggtgaaagccattcttagttgtgtctctgcaatgctgtgggcacaaaagaaggggcaccagagtccctgtgcaaacacctagactcacttcatggattccaaagctctcagcttcattttattagttacgttaggtaagggggttcaagggtcatggtcctcatcacacacatgtcatcagggccctctgcactccacatgatgaggtcagacccacacggtgcaaatctttgggtcagtgagctccttggagaagagaggagacatgtcaggactagattaggcacccctcttccttaatgaaatgtgggcagtcctctccgggggtaccccacctacttaggggatcttgaggttctttcagttccctcaccccatagctcagccccggggctcccctgatttgggnctttcaatctacttatttcattcccgtcccccacccctttttctttctttgatctttcctcaggaccccttttcccaaaccccttttcctggg

SEQ ID NO: 323398 - DNA, 1057 bp, Homo Sapiens
  misc_feature (208)..(256): n is a, c, g, or t
gggtcgtacgtctgcgcgtggcgggggcagagtccgcgggcacggcgggtgtccggagctccgtagcgctaggacatgtgcgctgtcagatagggccgggtcgcccgtcgtgccgtcgggctctacgaacttacatggcgggggctgcccaccacgccgttcccgtgtccgcgggtatggccacggtgcgcgcccgggtccagtcgcnnnnnnnnnnnnnnnnnnnnnnnnnnnnnnnnnnnnnnnnnnnnnnnnntcgcggtcgcacgcgagccgtctatgtccgttccgcggcgccgtcccggggggggaggtagagtggagatgacagcggggcagggcacaaccctcgtaaaggatggcggggtgggggatgggagctgctctgccagagctcttccgccggggaggtcatcggtggggccaggctgcggccgggcgaggtggtcgcaggcgtccgggaggtgagggggccggtgagggtcggggtgagtgccacagcacgggcttcacagcctccaggtagacgtcacagaggttgtgaagccagaagtggtggcagggcatgagtgacgagcgagagctctcgggtgaggaagccccgctcacactcctgggcagccagggcaaggcggctcaggatccaggcatccatcggggaggagggagacagctcctcagcaggctgtggcacaaatttctcccctaaagcattgaggataaagcgaagagcattccagatcttgttgcagaaatgtcggcagctctggacctcagagactgacaggtgcaagtcgcccgcctgaactccatgggagcagagtgtgaatctcagggcatctgtcccacactcagggatcccgtgaggaaagtcctttttctgtgctgcagccacaatggccagctctgcagggtccaaatttccgcttctcagcttttcctgcagcacctgcatctccaccccactgatgatgtctcttgggtccagcacattccccagggacttgctcatcttccggccctgcctgtccctcgtgccgaattcgccacccaggcc

SEQ ID NO: 323399 - DNA, 1049 bp, Homo Sapiens
aatcatccctccatagttcttcactgaggccttcagctgctggacctcgaggtgtgctgggtgagtttgtctcccatgggagcaaagctggccttcagcctctcattctccagcttgaatgcggaatactcagcagtctgacggtgtagtctctcccccagggtatccccggtcttccccgcatcttctcttccagggtttgttgttggtttacaagatctgttacccggtcattcaggacaataatttccagctcaaggtctcccttttcttttacaacttggttgtagcggctcctccaggattccagagtggataaagcttcagcgacataaagatccttgtcagcgagttgcacgtgtagctgctcagcatactcctcgctcttctcggctcgctccttctgggctcggatggccttcttcaagctctctttgtctcggtctcccttctgcttcaactccttcagctgctccatgatggcctccacttctgccttatgctgattcccgctgcgctccagattcttaatctgcatgcacaggcgactgttctcagcctctttggaccgaagctgtgcctgcaaatgcccacgcatggactccatggatttagaaagctcagaggctgtctttgcttgagccttctcacattgtatttcctgaaggagctcttccacctccttgtccttgtcttgcagcagtaacagcaggcgcgctttctctgagtcggcctccgccagccgtttcagcagtgctccttgttgctccattagtctttcagaatcctctttgcagtgctgttccctcaggaggtctcggagggtgcggttggtctcctcaaatgtgctcagcttctgcaggagaagttccttctgccttgtcagggtgttgatgtccgtgcaggtcatttgtttctccgttttcagcttcccgatggtatccttcaaggccatgacctgcttggcagccgcagccccatccatttccgcctccaccagcttggacatgagcctcgtgccgaattcgccacccaggcctcgctaccta

SEQ ID NO: 323400 - DNA, 933 bp, Homo Sapiens
  misc_feature (102)..(158): n is a, c, g, or t
cacccctggcccggggctaattttggtatttttggtaggaggccaggaatgtgttcccccaggttggttttcaccctcctgggaatccagcggatcccaccnnnnnnnnnnnnnnnnnnnnnnnnnnnnnnnnnnnnnnnnnnnnnnnnnnnnnnnnnccctatttcccacattcttaatgacaccccatccacagtggtccaatcaactttcaaattagctctggggaaaaaaatacatttaatgaaagctagaaaacctagagaaggtcttgctcttcatctttcactgcagctatggacagctcggcaccacatttgcaccaatcagcatgtttgcccatgtcctgccaaggagagaagtttacatcatcactgacaaggtgtgttcacctattctcatcacgtaacactgatggattccatacctaatttatcaatctaagacattactggaccacgtaaccttacatataactacctgaccatattttcacatgaagttgctgctgcttattatacatcaaagttcacgtcaatgtggcatgaagtcaagaggattccaagcaaactccatcaaaaccttggggctcacagcatctcccagtgtgtagattttcacatctaagttctgaagacatgatctaagcgtggaagagcttctgaagttgaccactgatcttctgagtgcaagtcacatctggaaatcctgtaggcaatgtcatgggcaaaattgtgttcataaaactgtgcttaggtctgcttatgatagattatcacgtcacgaaaaaaatgccacagaagtccagacttttaaccaatctactagcttctgcatcagtatcacaatgccgagctctgaattttaaatgtgcacatattgtcatattcatatagtgacttagagcctcgtgccgaattcgccacccaggcc

SEQ ID NO: 323401 - DNA, 1144 bp, Homo Sapiens
cctgtagtggatgtaggcgtacttcgcgcgagtgcgcggggggtctgtgctccaagacgactgtgatcttgtggtatcggttccgcgggtgggtctatgtggagtgcggaggtacctgtgctctgccgtgatcgtcttcgtctctactcgtcacgcataggccggggttgcgtgtgtgtcgcctgtcccgcgcggtagagcctgttggctaggccatacacggtgtgtggattcgtgtgcgaggcaagcgcccgcgtattcgccctctaccgggcgcttggtagatcggcgcggtgggtctgagtgcgggcggaggtaatgttgggcatgtcagcgcggggggcgtcgtttacgggccgcgcgggcgacgcccgatatcctggcggtgttgtcggcggtttcgggtttcggggccccgctacctggcggcgtataagacaccgatccgcgtaagtaaggcccggggggcgggctggcgccagggtcttgtctctgatgtgtggtttcttgcgctcgggggttcatcgggggaaaatggtccttcggctagcatccgcaaggatctgtttagtttcttcgtcgtgtgtctgtcttctcttttttgatgttgatgatatgagaaggtcccatgtctgacacatccactgtcttatcccagttcccttttttcttcatcatttcggctgggccctgctcaaagatggagtgagactggatcacttctggacggcctcgccctcgtccatgcccctctcgttgtcggtctctgtccctttcacgcttctccttcttgacagttacttcttccttgggctcttccttgatcttccgactgatgatatttggggtgaaggttttcttcttgactcccccgagggtgaggtccctggaacggatggagggaaggcggccgggggtgaggggaggcgccggccgccgcccgatgagcccccgggccccagtcaggagaggtcggggccctcccggcgtgctgggctcgccggcggcgtttccttccgacatgttgcctgcaacgcgaccagccgccagccttcggtctccgcgccgggcggaagtctgcgtggcagggcctgggcgccgccatctcctcgtgccgaattcgccacccaggcctcgctacctt

SEQ ID NO: 323402 - DNA, 1013 bp, Homo Sapiens
  misc_feature (91)..(91): n is a, c, g, or t
  misc_feature (107)..(115): n is a, c, g, or t
  misc_feature (411)..(438): n is a, c, g, or t
cccgcggctccctaacaaagacacgttatttcgtatcttcggctccgcccgacgccacttccctctctcaaaaaagaacctggtcctcctntattccgcaaacaaannnnnnnnnggtagccggggtctttctgtttcccaccagcaggttccttccagacaaaaaggatttccaaaaagatccttgggatcccaaaaaaaagcccccctcatagggggggttaaattccccggtactgcacccggattcttaaatccaggttacccgggttatcgaaattaatacgcctccctttagggagcccggccagatttacccctttgtccaagaaagctgggtcaggaaacagctatgcccaggtgccatttcattccctctttctcccgcaccccgacatagatgcctcgagnnnnnnnnnnnnnnnnnnnnnnnnnnnnggagaacatcagactcatgtttattagggagtgagggagcacaaagggaggtctccttgcccttgttctccttaacacagctcagagtccccaagcctgggcccgtccaggtaggggtgggaggtgggcgagcagaaggccctagttctagcagcaagccaagaccgacaggtgtgcctgcctcatcacagaggcccaggacccaatccgcttctccgaccctcgccctccggcaggctcagacatcaatgggctcccgacctcggttctgcctcttcaccacaaacaccctctgtcctgacaccgtcaccagcagtgtgtgttctccaaagaccacagacaggcgcttgaagggcacattcatgccgcggtgcagccggaaaccgcaggctgtgctgaccagctcagagatggcactggctgcctgctcatcattctccaggtccccagatgacgccagcactgcaccttcactcagtaccaggtagccgagctggtctgggattcgctccagcccctgggtcagtgcagaagtcatcgcagtcttcggcctcgtgccgaattcgccacccagc

SEQ ID NO: 323403 - DNA, 1036 bp, Homo Sapiens
catccgggccccaatagtccttcatgtggaagttcccccgtcttggggtcaggatcataaatcctgctggcgcagggtcttaaacccctgccaatgagttccgccattgtacccatccaacacctgggaaacgatcgccgttccttacgcactttcctttctgagagttcactcctttttggactgaggaccctgacttctgctggagtcttccttctgtcctgggcgttacactctctgagctagaatggatgtaagaaatgttctgccccgaagggggggcttttgctgtcttggcctctaacttagcatccctgggaggctgtccagaggaatgagctggtgtctcttgggaactctttggtttggccagaggcttatgagttgggttagcaaagggtgtgaacctgatctcaggtgaagcctgagcatgaccttgacctaactcataactcaagagctgttgtttagggacctctggaggactttgtgccaagggaggagagattccagtgagagccatttgactatgtggactgtggcctgggcaggctgtgggcatttcttctggctttttccatattccctttgcctgaaaactgtgggaatcatgaggtctttggtcagcattagatgagctactgagattctgttgcttgaaaatgacaccatggctcactggcttacaagactcccttgggaaattttgggatgggccttgcttggcctggaatgggttgccagcaatggaggtgcccgagctagtcctctgatgctgttctgccaataacttctcagctctgcgggccagagccttttgtcgattctcttcaatctttttcctctgctcctctgtaagaggcaaggacattttcacagagaaatgcttatgcaggaatgtcaacctttaattggaaagttggcaaaagcatggcgtgacacttgctaacatagtctttttccaacgccagcccttcgtgcgcgaattcgcccaccgcagggcgtgggtataagggcgagggcggggcgggatgga

SEQ ID NO: 323404 - DNA, 633 bp, Homo Sapiens
  misc_feature (87)..(95): n is a, c, g, or t
  misc_feature (348)..(348): n is a, c, g, or t
gatgtttacagtgattacatttatttaagcaacatacatacatgttcagttgtaagatgttaactaaatttctgtgacaaatatgcnnnnnnnnnaataccaagaacattatagagttaatgcagagtcctaaggataatctagtagtcactaagtttttcttaagtcttcactttagatgctgttatttctagcacaattaagcaggcagagtctttcatatgctcaaacactggaatctttggttgctaccatatcagctggcttgcagacaagaagccaaccattttaagaatgttttaagtgaacaacttgcaaaccccaggggatgggaaaaaccctaaggantgcacaattgtgagcatttaacaaccatcacaactgtgggctgaagactgttcatgccgttcttctgaaatgagatctcaaagcagtatagttcaaaacaaaaggttttaacaaaaaattggcatatgcacaatttctccaccaatttttgtgtgtcaaccatttagttaacttttccacttgaaaaaatgcaatagaaaaccggacaccattttcactatctcagttaatattcacaattacagaggctacaactcaggatacagccctcgtgccgaattcgcc

SEQ ID NO: 323405 - DNA, 881 bp, Homo Sapiens
  misc_feature (224)..(224): n is a, c, g, or t
cacttttaaatggggtgtgatgtgtatttttttaaagtagcaggtttcattttaaaacaaaaaaaggttagtgaagactctgtctttcaaaacataaaaatctgcgataaaaccaattattccatacagtgactacggtcagttctgagaaatgacacccaggttggcgatgtgtctcatggttggccttccatggggacagttccaggggtggtccatctccncccatgtgggtgatcagtttcttcatctcgcttgtgttgagagcagtcccaatcatcaccgacttccggcaggctctggaggcaaacatctgcttgactcgggaaggccggcacatgaccccagggctgtcgctcagcatgaagatcagttcatcgacgtcctggggtccgaaggtccagtttttactagttggcaaggaaatcagtttacgccctttcagtgacgtggagcattttcatcgataacaaaatcaaagccattctttttaaattatttccaggattttctatcagaccaggttcattaccagcagttaagttgagagtctgaggtgctatgagcctctggcccctggagccacggtggtgctgctgcagcatctcgaagttatactttctcgtccgtggcatgctggtccactatgaagatatcctcattcagtttggttattataaatcccaggttaaactgaccaatgatttccatttctgcaaacatcggttttacttatctcttttcttagttcatcttcggctgcttgattttctcccaggacaaatctttgccctaaacttcctgtaattctgttccccttcactttgctgtgcttcctcgtgccgaattcgccacccagcctcggttgtggggcgtcaggg

SEQ ID NO: 323406 - DNA, 958 bp, Homo Sapiens
gtgcggagcaaagcccacccctttttttgtccatttataaagggccttttcccctaaacccccttcccctatttaaattcccctggacggaaagacccccttggtgtttccaaaggcaggatttgccataccgtattaaaacgggtcttcggcttgtaaattcaatgccattctccactggttttctaatgcagggaatatggagttacaagcccggagtttcagttgtgatcgcccttctccaaacctccagctggagcagttcattgtagcaggcccatgatgttggggttttttacataccctccttgtaaatccagcagaaatgaaaggcattacggacaactcttctctatccaccctgcgtactacaccaacaataactgtgttttctgagagttttgatgatctgatagacctgcacagtgcctctgcatccagctgtcgaggatttctgtggtctatgatgataatgtcatgatgtttgtccaggaaacaggcaaggacagcctgagcctccttggtaactgtacacttaaaccctgctttttcacatgccctgcagaatccattacattggttatcttctttggtaaacactaaaagtacctgaagttgatcttgatgaaatctcatggggccaaactgcacatcagctactgctaccttcttgccgctgccgtcgcgaagctccgactccaagaggccggcgccgcgggtccggggcaaggcggccgtcttctggccctgcgggaggcgcggcccgccggacgacagcggcggtgccgcggggctaggcgcgtcctcggccaccaggcgctcggaaatgtggatgctcggggcacagcccatgctggcggcggcgccgcggacacgctggcgggtagccgcgatccggtcagcaaacggcccacccggcgcctccgggccgccctcgtgccgaattcgccacccaggc

SEQ ID NO: 323407 - DNA, 1014 bp, Homo Sapiens
  misc_feature (72)..(93): n is a, c, g, or t
  misc_feature (909)..(928): n is a, c, g, or t
gggtaccggtccggaatttcgggatatcgtcgacccacgcgtccgctccgttcctaaaaaggttgtcttccnnnnnnnnnnnnnnnnnnnnnncaaatctatacattttcaggaatttatgtattctggctaaaagttggacttctcagtattgtgtttagttctttgaaaacataaaagcctgcaatttctcgacaaaacaacacaagattttttaaagatggaatcagaaactacgtggtgtggaggctgttgatgtttctggtgtcaagttctcagaagttgctgccaccaactctttaagaaggcgacaggatcagtccttctctcgggttctggcccccaaggtcagagcaagcatcttcctgacagcattttgtcatctaaagtccagtgacatggttccccgtggtggcccgtggcagcccgtggcatggcgtggctcagctgtctgttgaagttgttgcaaggaaaagaggaaacatctcgggcctagttcaaacctttgcctcaaagccatcccccaccagactgcttagcgtctgagatccgcgtgaaaagtcctctgcccacgagagcagggagttggggccacgcagaaatggcctcaaggggactctgctccacgtggggccaggcgtgtgactgacgctgtccgacgaaggcggccacggacggacgccagcacacgaagtcacgtgcaagtgcctttgattcgttccttctttctaaagacgacagtctttcgttgttagcactgaattattgaaaatgtcaaccagattctagaaactgcggtcatccagttcttcctgacaccggatgggtgcttggggaaccgttttgagccttatagatcattttacattcaatttttttaactcagcaagtgagaacttacaagagggnnnnnnnnnnnnnnnnnnnnctcttaatgaacacattttctaaatgaattttttttggagttactgtatatgtaccaagaaagatataacggtagggggttgggtg

SEQ ID NO: 323408 - DNA, 1148 bp, Homo Sapiens
  misc_feature (212)..(212): n is a, c, g, or t
ggggttaagtttgtccagtatggagagttcccgtaggcagttttggaggctggagacttgggtggcagggagctgggctggctgcgctgacccgagccactctgtgcatcctgcggaaggtggtggtgcagcagctgtgagtggggctgctggtgggctggcaagatgtgtaggaatggtgggggtgcatagccaggggccgcttcccgagngccaggggcccagtgggagcccaagaccgagggcagggttgaaaggtggaggcgtccctgcatgaaatccctgcttgtcaaaagtctgtgtcttattgtagacagacccagtcatatcaggtagaccagtggtgcttgaagacactgatactcctttgccaggcccagaacctgcagacttgtttggtgcctgcgatgatccagcatagccacctttggagtagtctcctgctgctgtcccctgggtcaggtcgtcataacctgtactgtagccgtgctggccataaccactggcctgctggaagggaggtgtgggagtgctgaggttcaccccatgttgcttggctgaggctggagggacaaacatggtggggccatactggaaggcactgggcatgcctgtgtagtagggaagaccagtgtagctatagccaggtggcagtgcaggattcacgaagggctgctgggctgtgtggtgggtctgtgattggctctgctgtggctgagctggtgtggtagcgggtgcaggggatgcagagtccccacggccaaactttgtgacatcacctggatatggattattagctaggctcccatctcggctggcaagcgctgtgggtgcagcaaagggaattccatagtagtccactggcagccgtgactgcagcatctggagctcgtcatagccatagatcgggtaggcaggaagcagtcctccgggacctacgaggtactggttgtgcagcaggggaggcaccccctgaggtaagtttgggggtgctttgcctgaggtcaccaagggcgcggccctgctactgctgctggatgcactcgcgggggtcccacccagacagaggctgttcgcggtgttcatgctactggacaggctgacgcctgaggatgcggaaccctcgtgccgaattcgccacccaggcc

SEQ ID NO: 323409 - DNA, 1174 bp, Homo Sapiens
  misc_feature (55)..(55): n is a, c, g, or t
  misc_feature (58)..(58): n is a, c, g, or t
  misc_feature (64)..(64): n is a, c, g, or t
  misc_feature (102)..(102): n is a, c, g, or t
  misc_feature (113)..(113): n is a, c, g, or t
  misc_feature (133)..(133): n is a, c, g, or t
  misc_feature (153)..(153): n is a, c, g, or t
  misc_feature (228)..(228): n is a, c, g, or t
  misc_feature (275)..(275): n is a, c, g, or t
  misc_feature (791)..(803): n is a, c, g, or t
  misc_feature (870)..(885): n is a, c, g, or t
  misc_feature (943)..(955): n is a, c, g, or t
gaaataggagaagtatcggtggggggtcagcatagggagcgaggtgttagacctnaanagtggnggcggtgcggagataaatatactgtgggagcgcgactntatagtcgttngtcgaatgaatatagtcatnttagtatgtactgcgaatangtcgcattgattgggcgggtgagcggtgagaaagtgtgttcgtgcgtagcaagacagcgggagcgaggttcctangggcggatacatggcatattagtaactaggtatgttgttcatctatnatgcggtgtgtgaggagttacagagatagtggttcgctacaatgatggactgggcggagagcgttaagtacatgcgcggatatatagtcgagaggtgacaacacaactggtcgtgatgtttagcgagccggcatagtggtgcgacagtgccaacgttcgccgtcctgaggcgtgcgatgtatagggtgtaatgcgtagcgacgaagtaatcggagggcgcgccgcaaacataataatcacgggcgccgaattaaaaaggctgggatgggggtggcgaaaaaactagtgcgtggttttgaatgtcgcgccttcgcggatcggggaatgtgtaggctgcagtgggtttgtggttctggctgctctattaaacggggtgtacgggggagggcataaatgggctccaggcgtaaggttcggtctaaaaaaggtggggaaaggaggggggtatgcgcggtgcgcctcgtcttagggtaaaaaaggagaaaaaagggcgtatatatcgtcttgtggtgggtnnnnnnnnnnnnnattgataccatcccctttccctttacaggggagggaggggtcttgtgccgtatttcaattgtagcannnnnnnnnnnnnnnntcgccaggcgatctccctttagggaggggggaaggaatgtcgcctgcctatgtccctnnnnnnnnnnnnnagggacggtggcctgcggacgtccttgggaggaggggggagggtcgcctgcggagcttcctaggttgaggggggagggagagtggcctgcggagctccctgggctgaggggggagggtggcctgcggaggtccctgggttgaggggggagggagggtggcctgcggaggtccctgggttgaggggggagggagggtggcctgcagaggtccctgggctg

SEQ ID NO: 323410 - DNA, 1164 bp, Homo Sapiens
  misc_feature (362)..(362): n is a, c, g, or t
  misc_feature (684)..(699): n is a, c, g, or t
  misc_feature (856)..(868): n is a, c, g, or t
  misc_feature (895)..(915): n is a, c, g, or t
  misc_feature (934)..(1028): n is a, c, g, or t
tctttggcgttgttctgcaccgccgcggtggactcaaacgctctcctccgtgcgtcttccgggcgggttccacgttgccacttcccatcgcgccctctctgtgctgtcgcctgcacaccgttgctcgccgctagctcttgccggggcggccatccggcgcgctgtcccacccatcctcttccctggtcgccctccacgcgtgtcgagcgcgtcgcgccggctcacccgtcgctctgatcgcaccgctggccgcgcctccggtctttgggccgtcggcgtgtggcaaagatccaggccatgcgttgtcggtcgcgtacacggtactcccgcgcggggggatgatcggagtcgagagggtgganagccgtcgtccgctcttgccgctcgtgtgccatggcggcgtgcccctctccgcccgcccgcgtcctcgcgcgaccagctctctgcagcttgtccgtgcgacctgtgtccctcaactcctcgctctctacgggccgcgcgcgggggtggaggtgcagacactcccgtcgtccgtgccctcttcgctgtccgctcctcgctcccgccctcgcggggcggggggcacgcccaggacccgcttctctcccgcgcgtctcgtctccatacggtggagcgggcgattgggctgcccatctcaccctcctttcctctccttggccgctnnnnnnnnnnnnnnnncccatcctttcccctccccatcctccccacccgagaagggggaccggaatttctccccctgtccctcgcgccttcgcgagggtggggagggtaccgcctccccccgcccctccctccgtccgaggggggaagggactttcctcccccgccttccctnnnnnnnnnnnnnagggcgcgccccctgcccctgtccctnnnnnnnnnnnnnnnnnnnnntcgcctgcccatgtccctnnnnnnnnnnnnnnnnnnnnnnnnnnnnnnnnnnnnnnnnnnnnnnnnnnnnnnnnnnnnnnnnnnnnnnnnnnnnnnnnnnnnnnnnnnnnnnntttcctgcggacctccctgggctgaggggggagggtggcctgcggaggtccctgggttgaggggggagggagggtggcctgcggaggtccctgggttgaggggggagggagggtggcctgcagaggtccctgggct

SEQ ID NO: 323411 - DNA, 999 bp, Homo Sapiens
accaggcccccttgtaatggggcggggctacattattcttttcccctttttagaaaaagcaggccccttggttttccccccgggggggagaaggggatttcggacattgtttttcggggccagccctgggcccagggttcccaatcgggtttggcagggtggaggcaaaatttccattcggccgggttttgcccttcccctggctggggggttttgcagcccccccgttctggaggctgaccccacacctggccaggtggacgccggggcacccaagtccggacaggggatcaaacagcacctctctttcaaattgtagctttttatatctttgcataatttcagctgcaaccatgcactcaatctcgttctcctgtaggtggccctgtttagggcaggcagcatctgggcagctaattgcggtttctaatccttctttgatcaagagctcaacatactgtttcaggcacagagtacagaagatgcattggcactgggctatggttgtcatctgctccactgggtactccccaagacagagcttgcaagacaccagcgggtcgagggccaggtcccaggtgggccggtaccttgctgtggtcatcgcagaacagtctctgagaaatccagaggggaggagaggaaatgtcttcaggccaggtcctggtgtcctgctgtgcttatacacactcagatgtctctgccctcaggtcaggcacccatagggagaaatgggagaaggtctctggcaccagggctccctgcagagctgggggaggctgggggcatgtcagagtcagcagggtactggatgcctgggcctgctcgtccgcggtgcgcggctctgacgcctccgcccggtactggctgcggggtgccgggtgcccgcagtttgccgcccgcgcctccccgcgcccgcgcagcccgcacggcccgcactgcaatgccagccctgccgcctcccgcctgccgcctcgtgccgaattcgccacccaggcc

SEQ ID NO: 323412 - DNA, 962 bp, Homo Sapiens
caatgtcacggggcgcgaacagcgacgccgcgatgcccgcggagcggcgctccctggtttgcaggtttcacccgatccgcgtctgctcgtgacccaccgcgcggccgggcccggcgcgccagccgcactcgtgtgtccgcctgtccgcgttaccgtagccaacctctgtgtggctcgctgggcccgcgtattttgactcccggcctgagcgtgttctcgcgggcggccaggcggttatgtgtgcatcgcggagctccgcgctgcgggcgggttccgcctgcgacgcgaccacgccgatcctcgtgtcatcctattcccaggtcccggaagtccgcccccccttcctccagggcgggaagcggatcgcaggcttggggtccttggccagccttgtgggccacctgctcctggctcatgttcctgcaccgattgtcatacccggggcgtctggtggttccgcaaggcctccttcttcaggagctccagccgctggggtgagcagaaacaggggtaagcagctccggtcttcagcagcgcttctgtggcctgggcatacagctccaaccgctgagattgctggtagggcccagcaggaccgccccggcgggggctctcatcaggcgggatgcctgcccactccagcatgtcctcaatattctctgctgccccaggcacaacgcgagtctgatctgtgtcctctagcctcaggatgaagctcccctggtacttcttagcaaagatgtagttgtacaaggcagtgcggaggccacccaggtgcaagaagcctgtggggctgggagcgaaccgcactcgcaccgcaaccccggcatcagtgcccaggttggcctcgcgccgtcctacggggcggccagaggccgccgaaggcctctcgcgctgcagcagtctcctcaggagcgccgccattgggatggaatcctcgtgccgaattcgccacccaggcc

SEQ ID NO: 323413 - DNA, 1101 bp, Homo Sapiens
  misc_feature (226)..(226): n is a, c, g, or t
  misc_feature (654)..(714): n is a, c, g, or t
  misc_feature (849)..(909): n is a, c, g, or t
  misc_feature (942)..(1037): n is a, c, g, or t
cgcgcatcgtccctgtgccctctccagcctcgctggcctccccacctcgacgatattccacatcccagcgtcttcacgcccgtcgccttgtactcgctgtgcgcgggttgcgctatctaacggagcgcgggcgctgcgcgccgcgcccgcggctctctgacgccgctcacgccaagccgcgtcacccaacccctggtcgctatcttcgtgcgcagccctccgcgtngctttgtgcgccgacctccaccctcctccgccctccctcctcgccactctgccgcgcctcccggcgcctttccgaccgccaccctccggcgcctcgctctggcccggcgccctctcgttctgccgacgcgccgtccgcgccgcctgcctcgctcccgaccgcggtctcgtcgcgcggtctccaccgtctcccgctgcccccgccacccaccgtcgaggtggggcgtaccatggcgtcgccgtgcgcgcgcccttgcgatcgcgcggcatctctcttctctcaaggcgcgccccgccacggcgtctgattccacggggccccggctcgcctcccgctagggccttcccgccccttcctcacccgcgctccgtccccgccgccagctaccggcgccggcctcctatgcggcgggcaccccgtctcttctnnnnnnnnnnnnnnnnnnnnnnnnnnnnnnnnnnnnnnnnnnnnnnnnnnnnnnnnnnnnntccgcaccctccggcactcccgccgccaggcccagaggcgctgcgcccccggggaggaaacccggagggagggtgggggagagaaaccgagagggagacggggctgaaaaacagggactgaaagacagggaggcnnnnnnnnnnnnnnnnnnnnnnnnnnnnnnnnnnnnnnnnnnnnnnnnnnnnnnnnnnnnnaaaaggtggggtgggggacgagctagaacggannnnnnnnnnnnnnnnnnnnnnnnnnnnnnnnnnnnnnnnnnnnnnnnnnnnnnnnnnnnnnnnnnnnnnnnnnnnnnnnnnnnnnnnnnnnnnnnggaggcagcgatagaggaggcagcgagccctcgtgccgaattcgccacccaggcctcgctactt

SEQ ID NO: 323414 - DNA, 1139 bp, Homo Sapiens
  misc_feature (177)..(177): n is a, c, g, or t
  misc_feature (617)..(658): n is a, c, g, or t
aggttccgggggaagggggctgcattcctggaagggctgaacccccgcaggaaaacaaaagtcaccacccaacggggctggggagactctgcactctttgatagtcaacgaaacatgcaaatatatgtaagtcggcatgcaaataagcagcatttgttgttgtttgcgtcagcagcnttgggcactttttctgggcaaccgtggcggcgtgtgcactccagtgttgccaagggctggggatacggggggccagggtgggggtcagggagggtttccagcgcaggaggggagggctgtgcggctcccagcctttccaccagggcctggctggctggggctggggcggagggccccaacggagctgcgaggctgcggacaggagtctgcggcctctagtacttagcgatgtcccccttcttcaggatgacctgtcgctgccagggcgccagcttgctctcatcgtagccccgcgtccgcagcttctctgactgttccttctcccgccgcagctcctcctgcttctgtcgctcctcctctttccgcttctgctccctctcttcttccagcttcttccgcaggaggtcccgcctccaggcgggcatgctggccagccgggnnnnnnnnnnnnnnnnnnnnnnnnnnnnnnnnnnnnnnnnnngcatcttcagctgcatcttgcgcaccatcacctggcgcttccactcggggatgggccggccctgctcatcgtgcgtggggatgagagcctccacgtccagctgcactcccggcgcaggagtagtgggcggcacgggaaccaagcttccattgagcagcggctgaaaccccgcagctggcggtgtggggctccggactggtgacagtgcaggtgacacagaaggcagcggcgaatcgggctggaaggccggctgcccgatgcctgagaacactgtggtcagccccttgctctggggcgtcggcttcaggctcttgcctgccttaatctcagccagtagctccgagttgtcgcccgtcggggacatcatgttgaaagacttggtgctcttcctgtgcctcaggactctcacttctagggaccaagaggagagaagtgacagcggagttaggagggagggggggcaggatgagactgggacagc

SEQ ID NO: 323415 - DNA, 976 bp, Homo Sapiens
  misc_feature (52)..(60): n is a, c, g, or t
gccccagggggtttcttaagctagggttgggaccagaagggtggagcttggnnnnnnnnntgggggtggttagcccttgatgtagaaactgtagggctgtggagggctccaaggtcgctgaccaggtgctgaaaggtgctcttgctgactgcctcctgatactccagcttccggtgggtcagcagccttcctgatgttgcaggacgtagccgatgatctccttggtgttggccagcggctcactccaggacacacgcacctcagtggaagacacagagactgcccgcacattgcggggaggcccggggagcccctcagcccacagtacggtcagcctggcactggcctgtgatgagcccgcactgttctcggccacacactgataaatggcttcatcctcaggaccgattccagaaatggtcagtgtgctgttgttattcttgagcctgacgtggcctcctggccccagcacctgtccatttttcagccacgtgacatgaggcggtggctcaccctgggcttggcaggtgaacatggctgtggtcccagctggcctggagatggactggggatgctgcacaaactcagctggggcttgcaccaccagccggccctgtgccgttctcctcacccgggtgccaggtctgttggctgcacagacgtagacgccagagtgctggaccgtcacgtctgagatgatgaggtttcctgtgcccagcacctggatgccctccaccccgatagggcgaccatccaggcggctccaggacacaatggggcgcgggttgcccgtggcgacacactcaagcaccgcggtctggtgcactgtcagggtgaggttctcaggccccacgaggatggctggctccttgtaggccccagagcccgagcctgacacagtgagcctggccccgtggctgatccggatactggcgatgtttgcctcgtgccgaattcgccacccaggcctcgctac

SEQ ID NO: 323416 - DNA, 1300 bp, Homo Sapiens
  misc_feature (66)..(111): n is a, c, g, or t
  misc_feature (182)..(182): n is a, c, g, or t
  misc_feature (197)..(209): n is a, c, g, or t
  misc_feature (269)..(311): n is a, c, g, or t
  misc_feature (582)..(592): n is a, c, g, or t
gttacccccctctgtgtttgcccccctgtttctttgccccagttgaggggtagtggggttgcgagnnnnnnnnnnnnnnnnnnnnnnnnnnnnnnnnnnnnnnnnnnnnnnaactggaggggggtgtgggagcgaccttagagacagtcacgccgcaccgcgacggggcggacccccccacncgtatatagtgagannnnnnnnnnnnncacccgcgcgagtggtgaatgataggtggttttcccgtgccccctttttgtgtgccgcgnnnnnnnnnnnnnnnnnnnnnnnnnnnnnnnnnnnnnnnnnnnctctatgtagtgtagtgagaaatattcttgcgccacgcggcccgacacacaccacacaattacaggataaataattatgtatttttacttggcggtcgcccgctctatatcattgtcgcgggggacacccccgcccgtttttgttccccccacccgaacagaagccccgcgctttggcccgagcccccaagagcacccaaaggtgtttaagacgctttttttggggggacagtacaaccaagttgggttaaaaatttgtttaggttatatnnnnnnnnnnnggtgttgacatggggggctcgtggcgcatgtccactgttggtgtggaattggagggggggctgttttcccaacaaaaggggtcctgaccacttcgttgactctaggctccaggggggggcgctcccacggtttcagccaccatcccctgaaatgttcacccccacccaaatgcccttttatgtccacactatttcatcctcccattttgccaagcaagattggctcaggcactcttgcttgaatacacgtgggagtgaccgtttcacgcctttcaaggtggcaaggtttgggcagcaaggagatccatgcctaaggcagccattctcttcagaaaaggcaaggctgccgtggggcaccaggcctgtccaggcttgctcgcaccgttcttttttcatttgagcaatctgtatgtatcaaacacttcctacaggacaggcactgttctgtttacttgaagataagcagttaagagaaaaatgctctcacagagcttatattctagttgtcacaggccagaaagtaaacaaaaaacaaatatgtcaagcgttggcagatgctacgtggaattaaactgggtaaggataacagcgatgggggagaggtgctatcttgcacaggatgtcagaaagcctctctgataaaaggatgttgagcaaagactgacaggagcctcgtgccgaattcgccacccaggcctcgctgcgggt

SEQ ID NO: 323417 - DNA, 1074 bp, Homo Sapiens
gcgggccgcagtacatgtttgttggccccctttcacaggcaaggccaccataggggggcgccctctggggggagaacctccaagagggggtgtggggagggcgttccccggaggcccccgtttaaggagaagaattcattgttcaccgcccccaggttttttgcttgtccacagagagcgagggggctttacttgctgctagggaaggggttggccttgcccgtgccggacccccttcggccttcccggtggccctccggcggtcttgttgccgggccccccgcccttcgcaggtgggtaagggggttttccagtaagtttcaagccccccgcccgcaccttctgaggaagtcccccgccgctcggcagccctcgatggcattttgccgcgatgtagttcctccagcacgtacttcgggttgttggcgtgcatcacgcgcacgtgctcagcctgccaggcggcagcgtccccagcgccttccaggtccttgtccagccgggctctgtacgcctgtagccagtcagcccagtggccctggttcctgctctgcagctctgccgcactcagctgctccagccgagactgctgctccacacgctccagctccctggcgatgcctgcccgggtgcccataagcgcgaacagctgcgggtttgactgcgccagcatcagcatcatggatagctgccggggatccatctggggccggaaggccagcctcagctcctccagggaggcacactgctccatcagcctggccaggaattccgccaggcctggcgactctagctccactgggaaggagctcagcaagtagaaggtgtttgtgaagtcggcaccggtcagatgcatggtctccaggagcttggacaccagcgccccgtcttcctccagctccacctgcacgaggcccagcttcctgcgcatcttctgcaggtagtgcctttggaactcggcgtcaaactcctcggccaggatggcctcccccagctccaggggcagttccggctgcagggcctcggcccctcgtgccgaattcgccacccaggccttggtgcgggaaagttaattct

SEQ ID NO: 323418 - DNA, 977 bp, Homo Sapiens
  misc_feature (57)..(68): n is a, c, g, or t
caggctaacggcgggaaaaggtatgtgcaaaaaaggggcgtttagtggagaaaggannnnnnnnnnnnaaatattagggagttgcaaaaaaaacggtgggggtcaagcgtttgtggtgagcccaccaaaaaggggggcgggcaccggtaagaataccggtgggatcaggctaggggggaaggggaacggggaacgtgaagtttggcctgaaccacccgggccctcgcaggggcaggcgggcatgagggggcccttcgttgcagcacaagcctcgcccggaacagaacgcctgagagcagcctcgacggcgtgaggctccagggcctcttctggatggcagcagccgacgtgaagacgaagcttttcctgctgggcacgtgtgcatgccagttcctttttctagtaggtccccactgggtgctggctgcactaacaacatagagaactaggaaagttcacaaacactgagcagtaatatctaaagcagtttaaaaataaagccaaaaggaagacaaaaaaatcccacgtcactgagtggagacaaatctatacagcagcagctgccgtgaaagggcccgcagggccgctcctacgcctcctgcaggtcggaagcagtcagtgctgcccggaccccctcgtgaaccggacgggcctcaaagcacgaccccagagggcccctggcagcccccagcagcggcgtccaaagggacattctgtgcccatggccacacttgctcacagcattgtctgcggcccgagagtgaggagtcggggtcccgtcactgccaccagcaaaagcaggcaggggtgctgggggcgtcctgatctgttagcacgtggacagggaggcgcggaagctaccccaggactcaccacctcttttaattatagggaaacagtccactcaagaaagagagaaataaaacccgggaggatctttttccttaaatcctcgtgccgaattcgccacccaggcc

SEQ ID NO: 323419 - DNA, 225 bp, Homo Sapiens
  misc_feature (211)..(211): n is a, c, g, or t
gagaatggccacaaccatgatttatttaggttttacagattctgtaggggactgggttccacaaacctccagacctgctcctctttcccaccctaccccaccttttgcggggagctgcatggttctacaaaatggtccattggactctgtaactgaaaagccacctggcaaggggcccactttgatggggtaccgaagggccttgggagtnttctagccacagag

SEQ ID NO: 323420 - DNA, 748 bp, Homo Sapiens
tttagagccacattttattgtacttgttgcttcaccgctggacagcagcatgacatgctttgtgcatgatgtatacatatacatacatgtacacacaaggacacaccacagcctgcactcacagcatgtgacaacacgaaccgttgctggtaaggacagtaaaaatgtagcttttgccaattccacaggacaatgactcacaaccaaaataacaggcacagatcagtcctgcgccacactatttgggttcccagctccaaatactgggagtgagatcagtgacttcgtgtcccctcatgagatgtccccacagtaggatgcactgagccagagctaagggagggcggacaagccccacgttgaactctgcctgcagcacctggaccctcccggggcagcctgcatgctgatgcccctgcagcacaaggctcgcccggaacagaacgccctgggctcggcaggacaacgggtgccaccactggcaacacgtagcacctgagagcagcctcgactgcgtgaggctccagggccttccctggatggcagcagctgacgtggagatgaagcttcctgctgggcacatgcacatgccagtttcttttcctaataggtccccactgggtgctggctgcatcaactgaacatcagagaactaggaaagttcacaaacactgagcagtagtatctaaagcagtttaaaaataaagccaaaaggaagaccaaaaaatccctcatcactgagcggaga

SEQ ID NO: 323421 - DNA, 1070 bp, Homo Sapiens
  misc_feature (100)..(100): n is a, c, g, or t
  misc_feature (246)..(246): n is a, c, g, or t
  misc_feature (377)..(377): n is a, c, g, or t
cttgctcggcttcgcgtgcgcgagcgctcgtactcgtggtgtgctgcttctcgtctctgccctgctcgcctccgggcgagcgggcacgccccgggcgctnccgagctggaggacgagtgggggggcgcgccgtcgcggccgtgcgaccgggcgctcccgccggtgcgctctccgtggcctggcgtcctcggggggagctcgcaggcttctggggcgccgcgtccagacaccattttttatctcccnccagggccatctttgaggttttcgcgtgcggcggacccatccgcacccagtcgttttccggacgtttctctcccccgaccggacgagttaggagatccccctggccggcctccccgggcgaagtgggtggnggatttgaggcacccgggatagcaggtacaccaggctggagatggacctcgatcacgaaggcaacgacttccgcccggggcgaaggtctggctgcccgaatcccacggacaggaacgttcatcttcgcaagggtctccggacgtcgcagtacgcgttgatggtctgctgtttccagtctgtcaggtgatgtggagtccccccagcgaggcccacaggcacggaggttgaggattggcaggcactcagagtagcatgcgcatcgagtctctgggacgatcaggagaaggtcggcatcagcaggtttgccaccagatgatgcacagctcgtgtaggtctgcaggggcagctggtcagcaaggaaggagcacgatgaggttgcaggagtgtccgccaatccagcccaggaggaaccacagggacagcgtctggtccatgttgcccgtgttgtaggctttgatgatctgggggaaggtagatgcagcaaagtcagagaatggagatcaagcccaggcccacgctggcctcgtcccagccgtcctgggcacattcacccaacacatcccatatccactggatggagccactggggcagctggagaagttgcgggagcccagtttcttccagaccatggctgtgtaggccctcggtccctgcagacctggggagcctcgtgccgaattcgccacccagc

SEQ ID NO: 323422 - DNA, 1903 bp, Homo Sapiens
  misc_feature (145)..(145): n is a, c, g, or t
  misc_feature (825)..(825): n is a, c, g, or t
accggaactcttatacgccatgggaattacattatcataggcactattacttgacacaagcataaactggatggtttggggaaactgaagaagagaagacgatcagtcatgatgttctatattctgtaaaaatagattacagaanaaaatagacttcacaacttcatgactttacacggtcctttgaaaaccagtgtaaatccacctccaccaaatccttcttgaggctgatatgttctgtgacatggaatgtgagtaacacaatggttcaatgattaggctcctacaccaggtacagcagcacctgatgccacaggaatcctcgtgcactggggtgaggagtcagtcctgtgaatttcagggacacactgtcttcatcccccagacctcactgacatcatagtgacactggccatcagaaggaaagtgactttacagaggggaaaagagtatcctggaagcgtaccggtggggcaggacacactaaggcaggactcacccagtttgtacattagacacagcctattaaatccattccagaaatgagttccacttcaactgaaaaaataaactgaagattgcccaatcactgccatttcacaaatttccagtttatggtcagccccaaaatcacattcttccaccctatgtattggaaatcaaatggcccaaagactgaggtgtcttcaggaagcacatgcttgaaaaatgttttctctgcaaaacagtattgagtaatacataaggagacatagcctactttagcccaaaacttctttcacttgttatgtccttttacctcttaaaacatagaatgaaataaancttggatcttctttggagaaagctagaaggggcattttggcccaaaggctgtacaggaaaagagaggctctctccaggagactgcaaggcaaaggaacagaagcaggaggggcaggccctctggcaccaggtgggcctgctactctgatgaaatgtgctcccagctcttgacaaagggcagggtctcctatgcaggtagtttttttgccgcctcccattgtatcacccacaaggtaactgctatcaacagttcagattccttaataacatggcagcctgaatggttctgttactttcagagaaagtatgccttgcaattctctccccaactcaggtacaaacgcttgaatttcaaactcatactggtttacaccccagagtggaatgcttctcaagatttcctgagcagctagacacaggaacccacagccccagatacagaacaccagactttcagaagcagcaaagccctgtcctgctgggcatggaccaagcactatccgcaaatggtctccagtgagactaaggcaagctaacaaggaagaggatacagcacaactcaagccagattgcccacctcctccttcctccacatcctctttctagcaaaagcgaacactgcagataagagatagcccactaatgtagcagatacagtgtgcccaggggcatgtttccaagacacactctactaagcacagctctgggcagctccagaaccacatcccagataatactcaaatatcaaatagtagaaactgtcccacctgggcctctgtcaaagagagaagggattgttgttacgcttgacaggaacatgcaaatcccatttgaggagccacaatgagaaacagaaggtgaggagacagtgctaacagccctggcatctttctgccagtgaggaggtgggaacaatggcaatgcagctttcccctgcagcataagggacagagccacacgtaaggcacctggatttacagtggacgccagttctgagagtggccggtctggtgataaggaacccactccacaggaggaatggtctctcccctctctcggggctgaatccaaggccccc

SEQ ID NO: 323423 - DNA, 1347 bp, Homo Sapiens
  misc_feature (42)..(60): n is a, c, g, or t
  misc_feature (389)..(435): n is a, c, g, or t
ggcctgggtggcgaattcggcacgagggaactagtctcgagnnnnnnnnnnnnnnnnnnnaagaggtagcagctgtttatcttctcggagatttcgagggtctctggaagccgggccaagtaagggtgctctcctggaagaggctggggtggggcagagttgaggctaagggctccctggctctgggaagggtgtgggctgatccacatagatgctgcagatcccgagccccgagggagcctctgcccattacaggccactcaaaaccagagtcatttcctgggctagttatgcagtccccacaacatataaataaaagtttagttctgtgtttccatagatcttctacatgtaggctagctaaatattagtggagtaacaataattannnnnnnnnnnnnnnnnnnnnnnnnnnnnnnnnnnnnnnnnnnnnnngccttgtggtgtcgggggtggggtccttcatatggcagggtggggccctggggaggggctctatgttctggtagaagtggtggtaatggtggtgatgttcatggttggtggtggtgctcatgtctctggaccggctgcccggcctggctctcatacaccaccaaggcgggcagctcccgcaggtgctcccgccccaggacagggccacctgaggccagtggtgcctgcaggccccggcagccctgctggctctccttggctcggtgcttgtgcttcttgtgcccgaggggggctagggaggggaggagggccgggctggcagccaggtgggcggagggggacaccgcagggatggcgggtcccagagggggcttgtttcttgcccctctggccacgtggcccacacccacactcttgccctgggccttgggggacctcacaaagtgcttgctcccgtcctgggtgccccggagccgttgctggagctctgagaccttggcgattggggtgtcaaggaagtggaaggaggccgggtccacgccttggggctttcggtgtgggatgtggatggcttccggctcatgggagcgagatcgagtgggattggaggtgcgggggggcagttctgacttctgggccacggaaggggagccaggcccaaattgggacgtgtagttttctatcccggcgagatctaagtagtggtttctcctctcgatgttctcatctacgcaatggtggtagcagccagactgctccaggcggctgtcaccctggaacctgagcggggctcgctgcttcttctcccagctccgcaggtcctcagtgggcttggtctctgctcggggccttgcgctctgcaggtcagcctgatgaccctcgtgccgaattcgccacccaggcctcgctcct

SEQ ID NO: 323424 - DNA, 1103 bp, Homo Sapiens
  misc_feature (87)..(87): n is a, c, g, or t
  misc_feature (159)..(159): n is a, c, g, or t
  misc_feature (188)..(188): n is a, c, g, or t
  misc_feature (191)..(191): n is a, c, g, or t
  misc_feature (211)..(211): n is a, c, g, or t
  misc_feature (220)..(220): n is a, c, g, or t
caacgtggcttagcacatgaccgttttatcccagacgcattggccccgtgcaggcaaagtcagggaagactgggttttaggggcaancgtcagtcctaaggtgactttggcctcagactgacacattactgtgcatggctaaggatcctaaaggctgantgggtctccccaggcctggctgccacctnctntggcagcatagatgtccagnccccggganggaaaaggcatgtctctgacaaagggctcatcccagaggcctcctctgtcctttgaagttttttgcacaggctcagggtacggcgggcccccaggcctgtctgacatccctgtccccagagccagcaggacctccgcagactcccctgagtggagccaggaaatacaaaaggaggagacacaggagatcccaggggtgggagacaggaaagtgtggtgtccctcagccagcttccctcacagctgcccgcccaggctgctccccatcctgtttgcccccaggccactctctccccgattctgcggctctgcacaggtgaggaatgagggaggcagggtgggagaagcctctgccttcaccgctctgcgagggagggagagatgtttatgcaaggccaggcgagaggaaaatcccatgtgggcgactctgcctcggggggccctgggaaccatggctgtggtgcattaggccaacacggcagctacccaggcatgtgatggactcgcttctccactgctgcgtgtgatccgcaccatgtggttccctacagatgccaccgacttcacctttgctaggctccctgcctccgaggctttccagacagtccctttgtgccttcggggcaatctcccctacagggacacagcactgctgcctccaagttctccaagttctcagggctgcgccctggagagccagaggcaggcagaatccaaacaggaagagggtatggcttcacagccttgtccatgtgcatggccagatggaaacagacagaaagagccccttgcatgcctgagaagcagtctgggaaggagcagcttgcggagggatgaatgtgcacttcctgcatgcccctcgtgccgaattcgccacccaggcc

SEQ ID NO: 323425 - DNA, 1199 bp, Homo Sapiens
acatcaagcccgcacgcacaccctgacccctcagcatctgctccacattcaccttctctatagttggttgattcggcacgatgagcggcacgcggagcagcaggcgctgcgcctcgaggtgcgcgccggcccggactcggcgggcatcgccctctacagccatgaagatgtgtgtgtctttaagtgctcagtgtcccgagagacagagtgcagccgtgtgggcaagcagtccttcatcatcaccctgggctgcaacagcgtcctcatccagttcgccacacccaacgatttctgttccttctacaacatcctgaaaacctgccggggccacaccctggagcggtctgtgttcagcgagcggacggaggagtcttctgccgtgcagtacttccagttttatggctacctgtcccagcagcagaacatgatgcaggactacgtgcggacaggcacctaccagcgcgccatcctgcaaaaccacaccgacttcaaggacaagatcgttcttgatgttggctgtggctctgggatcctgtcgttttttgccgcccaagctggagcacggaaaatctacgcggtggaggccagcaccatggcccagcacgctgaggtcttggtgaagagtaacaacctgacggaccgcatcgtggtcatcccgggcaaggtggaggaggtgtcactccccgagcaggtggacatcatcatctcggagcccatgggctacatgctcttcaacgagcgcatgctggagagctacctccacgccaagaagtacctgaagcccagcggaaacatgtttcctaccattggtgacgtccaccttgcacccttcacggatgaacagctctacatggagcagttcaccaaggccaacttctggtaccagccatctttccatggagtggacctgtcggccctccgaggtgccgcggtggatgagtatttccggcagcctgtggtggacacatttgacatccggatcctgatggccaagtctgtcaagtacacggtgaacttcttagaagccaaagaaggagatttgcacaggatagaaatcccattcaaattccacatgctgcattcagggctggtccacggcctggctttctggtttgacgttgctttcatcggctccataatgaccgtgtggctgtccacagccccgacagagcccctgacccactggtaccaggtgcggt

SEQ ID NO: 323426 - DNA, 954 bp, Homo Sapiens
  misc_feature (24)..(24): n is a, c, g, or t
  misc_feature (611)..(719): n is a, c, g, or t
  misc_feature (759)..(911): n is a, c, g, or t
gaagggcgacaacaaagcccgcgnccccgcggataagtgcggggctgggtggcgaattcggcacgaggggtgagggtgctgagcctcagtatgtggacaagttcggcttccacacggtgacgtgttgcggcttcatcccgcaggtgaatgagtggcaggatgactggccgacctttttcgcccggcaccggctccaggcgcagctggaccctcattgagaaggactatgctgaccgagaggcacgagaactctggtcccggctacaggtgaagatcccggatctgttttgtggcctagagattgtccccgcgttgctccacggggatctctggtcgggaaacgtggctgaggacgacgtggggcccattatttacgacccggcttccttctatggccattccgagtttgaactggcaatcgccttgatgtttggggggttccccagatccttcttcaccgcctaccaccggaagatccccaaggctccgggcttcgaccagcggctgctgctctaccagctgtttaactacctgaaccactggaaccacttcgggcgggagtacaggagccccttcgttgggcaccatgcgaaggctgctcaagtagcggnnnnnnnnnnnnnnnnnnnnnnnnnnnnnnnnnnnnnnnnnnnnnnnnnnnnnnnnnnnnnnnnnnnnnnnnnnnnnnnnnnnnnnnnnnnnnnnnnnnnnnnnnnnnngtccctccgtctccctcctcccttgttgggttctcgcttnnnnnnnnnnnnnnnnnnnnnnnnnnnnnnnnnnnnnnnnnnnnnnnnnnnnnnnnnnnnnnnnnnnnnnnnnnnnnnnnnnnnnnnnnnnnnnnnnnnnnnnnnnnnnnnnnnnnnnnnnnnnnnnnnnnnnnnnnnnnnnnnnnnnnnnnngtccttgctcgcccgcgtgcttggcctctgtcgcgcccctccg

SEQ ID NO: 323427 - DNA, 943 bp, Homo Sapiens
  misc_feature (27)..(27): n is a, c, g, or t
  misc_feature (71)..(71): n is a, c, g, or t
  misc_feature (82)..(82): n is a, c, g, or t
  misc_feature (89)..(89): n is a, c, g, or t
  misc_feature (108)..(108): n is a, c, g, or t
  misc_feature (208)..(208): n is a, c, g, or t
tttagccacaatacctgactgcagctnacacgttaggaaacactggtacaaaaccaaccaggcagccattntcgcccttgcnggagggngagactagcatcatcatcnacgagataaaccgaagtgtgctggaaaacacacgagctctttagtaagagcaggcgacatgcaaggaaccatagtaacaggaacagaggtcctgaggctngatatggaacccaagtttgaggatgaccaactgaggaccagtgttggtggagcacaaagtgccaaggagagaaatggcagggtaaggctgggaatatgcaggtatgaagcgcagcctgggttcttctgtgccatgtgaaaggttctgctcttgatcctacggaaagtgggcaaccaaaccaattgttttccaaagatcgtaaacaatgtaaagctagggctttgatcaaagggctaattaacccatacttactatttgttaacaggagtttcttacatcagatttaaagcagaaggctcacagcttcatttcaaccatgccactgtatccatgaaaactctgaaacaagtatttgtggacagcaaaatccacatgtactcaatacctagcttaaattatcaaaacacaaccaatcttgtctctacactaaaccacttcatttgctgactagtctttgaagacatgaaggtctctgacaacctcatgagaagtactgaaaacatcagtcttgtcgtataccttatctcccttgcctggcatatacttccatcaactaaatgatccaatgcctgtattctcctaaacacattaatgtagacacattacaacacagatcctgacacctttaaataataaacagagtggggagcaattttgagtttactatttatcatcttgggcccctgtaagatggatacaagaatggcatttccatgggtacctaagataatctcc

SEQ ID NO: 323428 - DNA, 837 bp, Homo Sapiens
aaacctatcccttcgggggcccgcggcggcccaaagccaaaggtttaggaaaaatccttttaaaggggccaagggggacccccaaaaaacccaatttgcaaatattcattcggggtgttgctgagggcctaggaagtgcctgtggtttggggcacatggggtggggacaggaacgagggcaggcccgtgggttaagattctgaccaaaacatttaattaacaaaaaaatattacaatagcagagaaaataataataataacaataaagagaaattagaagtgggagtcagggtagaaaaaaatgcaaaggccttggtccctaggagaccaacactccagctgagctggccttagccccagccccttctgagttttccttggctgctggcttctcatcttctcccatgagacgaatgttgtgcttttcccggaattcatttagttcttttccctttgcctgaagctgctgtgtcagtgtctcaatgatcttctgtatctgctccttgttgttctccaaagcgggcagcacctctttgacagttcgctccaccagcactcctccaaccatgcggtagcacttacgagtttcatctacctccttcagtgtatcgatcactaggctgtgctcattcaactccatctccaactcagctgctttggatgccaggcctcgctgttcctgccgaaggcggttgaagccagcaatcacctgctctgcggacaccgcccccttccccgcgccgctcccgctgctcttgccggcgcgaccgctgttctccgccatcttcgccgcctgctgggtttccctcgtgccgaatcgccacccaggcctcgctc

SEQ ID NO: 323429 - DNA, 914 bp, Homo Sapiens
  misc_feature (15)..(15): n is a, c, g, or t
  misc_feature (60)..(60): n is a, c, g, or t
ttctcactaccattnaggaaaagcgtcggttgtgcaaaagtcccccatgtctcttcactncgtgggaggctccttcggaaggggcccgcccgctgggctgctgaagcatgcttcctccccgcctgtgggtccagaagcggtggcggccatggggacggaggcctctatctagacgtgtccatgttctcctctttaaagttactgcagtgctcaatcacttgcgggccatttccttggtctcctgccgtgcggtcgccatcttaattatgtccctcagaaggggcatccccccttctttgatcagcagagggcagtacttgtccgggtagacagacacgaggttatacagggcccaggttgcccagtgctggctgacaggagagattccctggggaaggaggcggagaattggttcaaatgacctgtaattgatgtttctccgagagtttatgtcccagctctggatggcagcccacatgcgttcctccacctcctcacgctggggctcacagacgccccaggcctcgggtccatcaaacatgatgtgggagaggacgccgcaggcattgtaggaaacctcgatcccatcggccttgctctccaacaggttgctgaagacgctgatgaactgggaagtcattagttgaggcctcagctccttcacttctgccacattccccaaaagtcctagcatattcctatgcagttcctgcttctctgggaattccttcaggcagtccaggaagagcttcatgccgttgaaattgaggaacatctcgcagttgtcaggagtttcatctgtgatgttccacagggcactccaggagaactccatgacctggtcacatgtcttgtccagcagcttcttctgaatcagcttcagcatggtcacctcgtgccgaattcgccaccca

SEQ ID NO: 323430 - DNA, 895 bp, Homo Sapiens
  misc_feature (293)..(293): n is a, c, g, or t
cgttggttgcgctttgtgtgcgcctcctacggccgagtctgtccccaatagcgggaaggggcaaaacggtccaaaaacggaagagcagggcggaagggggaccgtttcgttcattggctccggcaaggaagggtgggaaggtggggagaaggaaccccctcgtgccccgtgttgaaaggttcgccaaaagccccattaagatctttcccctttgcaaaaaccaaatattcttttttgttccaaggccagaagggccatccctggggaattagggtctaagggttagttatttntgaagttggggtccacccaggcctttgacaaattaatggatgtagtaaaatgggaaggaggtgactcttcaaccttggctccagcttcccacttgtcctaactgggaggaaagcagctatcaagacagctggatgggaagatcttccccgaatttccggagcagcttctgatggttgtggtccactgaccactgctggggcaggtgcttgggctgcatggagtccaggaagtgctgacgccagcggctctccagctgcatgagggagcgcaggccaccctggctgtgacactgcaccaccttcagcccgtgaggaacatagttttcattggagattctggtctccaggctggcagcctcttgaagcatctcctctgtgaccacgtctgtgttataaaactctctgagtgcttgcagcagctcctcctttcgatgagtaggcaggctctccgcgttgagcagggccctggccccagaacgcacctgccggcgctcaggatcttccagcaggcgcaagccctcctcagagccgatgggggcctggaactccttggccagctgctgcttcagcctcgtgccgaattcgccacccaggcctcgctc

SEQ ID NO: 323431 - DNA, 1500 bp, Homo Sapiens
tcacggtgtaagaagtcaaccacatttgccagtcagcctttcgctccctgcccccggagtcctttagacagcgtccagatgcagctcgacattgggacctgcctctccctccccagactggagaacagctttggttgtctacactccccctccagccaggccagtcacacgacgacatctcagcagccaggagaaggcccactaggtccgggccagcgcagtcccagcagctcctgctcctggacaatctggtgtctgcctgtccacatggtgtggggcccagggttgccctctgccaacaaccccacgatccgacccccacagtcccacccatggcattctctgctcttcaggctgagcggtcagcacagtggtatggatggtaggggtgacagctgccgcaggaccagggcttggtgacgagaagcagccccaggcagggcaggaaacaacccaatcacaacacagaggggaaggacagcacgcgggcaactccctgggttcttggctccgccagggagccgggccggaaggcaggtgggtggggacggccatcagggcccaggcggagatcagcagagcgccctcaggtggaggtgagtttaatggcggagcagctcacagccctttcccctgggggccaactccccacaacagagcagggctgggccagcagaagacgttaaaacccaaatcccgacaggaggcacagacctgcacatgcgccacacccacacacatactcaggggactgacaggacacatgggacacagacccgccctgcctgtggccagagtcctgtccaaggcaatggcgtaggctgcgcctcagttcatccgagtccctccccagctcactggtccaggccaagggatgggagaggctttgagtctagaccttgtacagcgtctgcagcagactgtggcgggcgaaggagcaggattccagggcgctgttgggcttggtcacgaacgccagcagcaggggtgcaagggccttggggaaatagtcctgctgcaccatgtggttcagcgccatcagggggccgtacaggttggcaatggccttgaccttgtcttcactcttgagcagacccatgtgcacgagcagcctggtgaggaaggtgttggagttgaaggacgaggagttgaaagccttctgcatcagggcatctactgcatcctgcactgccatcctcacagtagcttcgtccttgaacacagatgacacctttaggaaggcagagaccaccttctcggggtcagacgtgtcagtctgctgggctatcagcacggagctcttgggccctaggcgcagcagcttctctggagagggaaaagccaggaaggtggagacgtctgcaggaggtggggaggacagcacgggagctggctccccagtgttagggtccagaatcttccgtgagggcgtggctgacttctctccctgccctcgctgctgaggcgccacccaggcctcgttctttctccctcttttgc

SEQ ID NO: 323432 - DNA, 1292 bp, Homo Sapiens
cagggcatggcaagttgggggagccctcagggttcatttccacctccctctgcagcccctgcccagctgtcctcacccagtgccacctcctaagcctgctggggttcatctgcccttcctccctaagggaagacccagggctgcagttctcagccccagcccctgcccccaggggtatgcccttgtggaagtgctcagctagcaggttcccagcaccaggcccaagccacactgcactccaactccctctcccaccatactcctctttggtacagataggaaataaccaggctgctccagccccctcacagagtctcagggccagggccaaggcctagtctccacaaggacaacaggggactgagcctgttagtctactctggggagcagcatgaggtgagaacagggcctctgggcaacaggaacaaactgaaaatgcaagtccttagctcctagagcaagtggctgcagctcagcaggtctgtggactgatacagtgttgattcttgctaggatgtaaattagtgcaatctacaaaagactagggaaagggtggcagggcaaggggagccacagcactcctttggtttgatttcaggtgggtgtggcttgaagaatcacgtgtgaagttctgcaagaggtttcctggaacctccatgtgtaaggcaagaggaaaaatcttcaacaaatcaggtagcaattttccttgccccctgcccccaaccctctcccagcacccatcttccctcccagatatgacaaaccccacaatcatcagttaactttctgggaagccagacccgctgggtggccgtctctgggaggtggacaggagactcccacaagtgggccacacccatgactgtgagaggtgggtcaacttgtcccagcaccagttgctactgcagggcaaaggaggaaagccagagaaaaggcctcaagtctaggaagaggaagtcaatgctctggaagccagactctggctctctatgcctcaaaggaacaagctcagagctgtgctgggatctaggaaagcctggtcccaggctgaaggggaagcggcgggtcacagtgggtgaggtaaagctggcccccactccccctttgagggcaagggggaggctacagaagggcctgttgggtctggttcctgaaagaccttgcccctccttcccgcccccaccctcctagggccccatttccctcaggcttggcccagcctcagagaagactacttttcggaaatctccacccaggggaaccacagaaggtaccctcgtgccgaattcgcc

SEQ ID NO: 323433 - DNA, 925 bp, Homo Sapiens
  misc_feature (244)..(244): n is a, c, g, or t
cgcgcgggggtttttctttaagccggtttccccctgttgggtggaatgtggctggggaccacctgctttgtccctttgggccttcctggtgtacctactttttggctaggttcctgtgaaagaaagcagacccatctagaaaagcatttgagactggatgccattgccatctactgaggaatagttttctcggccagggtaggctatagactcgtacaggtccccctgagttgctgattactcnccctgtggacagcagccccacatatgctcgatacagaagcatatactatgttcccatacacagagaattcctcaagagggcagccccctgggcagaggacatctgctttctctttcctgatgtccaagcctctggtaaaacatgtgatagcaatgggagcggctccctcgctgcccgcgggccccggcagcagcagcagacacacaccgaggccgagagccgggatccaggctgcggacatggtgactgataggctgctcacacctgggagagagggagaatgcgggcaaggccagggtgcgggaggccccgcgcgtcacctcctcagagccccgcacccttcggacccccgggcgcggcgcagaggagagaggacacagacgacccgctgctccaggccagcgcccctctaggtctgggaggcgcctcggcggcaaatcgagcgaagcccaggatcggtgtgcaaccccgcaccgcggggaggcgggggcgccaaaaccgacgacagacaggctgggagcgacaaagaaacagggacagaggcgtcagggatcacctcgcacccgcgcccgccgcccggggctccgcacctgctcgagatccacccggctgcgcccgagtgcggaaggcaaggccccctcggccgctataaagcctcgtgccgaattcgccacccaggcc

SEQ ID NO: 323434 - DNA, 904 bp, Homo Sapiens
atccacatcgatcggttgaggtatgattggccaccacagatgccccccatttttttgtctgttttcccctgtcatggtaggtgatgatggctgtcagcgctcgcacgcagatcccggtaacccattaagtgaacatgtttactcatgaactccttaaaacttcccatttggcaagtatcccaccacagttgtgcccaccaccagaaggctaatccctgtgaaagccagtgctatcctgggacctggaccagagttcacctgagcggcagcagaaagcagtaccgaatcagcactcctaacccccacaggaccgtgagccgaaggctgatgtactggaagttataattggttctgctcagcaggttccaggactccagttcttctgctgagaatctctttgtcacctcatcatccataatggtctccattcctttccggcaaaagtagaaaatgtcagagagctcgaactctggagtgttgtccagagccttactactaccacttcgacgaatctctttgatctcttcttctagtgaagtgggatcctttgcaatgattccgttggtgtagggcttgtaaagctggtggttcttctccttggctcctcgctccattctcaaggtagcccacgcaaagatttttaacagacttttcatgtagagtttgcggataccaaaggagactccaaaaatggctggcactatgatgaaaacgagaaggagggtgaagaggacagtcagggagatgcccagaaggttgacaatcaggctatcaaaaggcagcaacaggaacatggtggaagatccaggccaggccagcacctgcctccctaagaacaaattgcagccttcagatggtccttcctgacagcaccagccagggaaaggaagccctcgtgccgaat

SEQ ID NO: 323435 - DNA, 888 bp, Homo Sapiens
  misc_feature (167)..(167): n is a, c, g, or t
  misc_feature (300)..(300): n is a, c, g, or t
gtttttcatgttcgtttttttggggcccggccccaccagttttaatgagaagaacccccggtcccctgatttaaaagttggaccacctggccccccggggggtctccttctttcccggtgaagggggctcaggtgggggtgcccctgggggcaccccctccccaggnccaggagccagggaagttctggggaaagcacttttccccagaaaacccaccccccagacccccaaggtagctcagggcttctcagaggcaggcccagatccggtccccccgcagggaccaaaccatgggcccncgcctgcctgaggcctgcagcgggccaagccggctggcatgggctggcctattctgttgggtgggttcttggcccaccagagctggacaggcaggtgatcaagccacgttgggtgtgctgggggcctccgtgggcactcactggggctctggccagaagacctgcatgacgctctgcttcctggaggcggtgtggcaggctgggcacatcctagaggccccactcagatgctgcaggcccgtggggaggtcctgaggactggctgggacctgcatcctcaccgcccgcccccacagtccctgctggcctctgtctaaggaaggacgagatcttgctctgggtcttcccggtcttctcggaccgtgaggggcctggttggggagccctgtgggtaagcacaggaggcacggcaagcctctcctcctggggtcccggtggctccatgcccgggtagggccggccggtcaggtctgtgcacgtctgtgagaagcgctgcttgtggtgtggacgcacaaaccatgctgaaccctgcggggagcttcaatcagacccgcctcgtgccgaattcgccacccaggcctcgctcct

SEQ ID NO: 323436 - DNA, 990 bp, Homo Sapiens
gaattttaaaaaatccccccgccgaggttttccaaccattaaaccacagcgcggcccaaaaaaacactgtcccgcgggtgttcccggacagtttcggggccccggccccggcgggcccccaaggccggggaagggaccgttcacttcccctcgggtttaccccgagttacttgggcgggaaacgcgtagctccgcgggagagaccgggcttctggggcgagggctgcgttcttagttcgcccctgcttcttagctctcgaggtcccgcgtgttacgtgttagcaccgccccggggggcgtcagcatgacccgaggctgcaggaaccgtgaactctctgccccgcgggcccaggtgaccgcgggcggcgctctcccgcgcgcggggggcggggctccccccggctgttcactcagctaccacagcgacgtaaaatggtgtccgctaggcgtcccaggacggcttcctgagggactggagggccccgacagccggaaagcctgccccgccccttggccggcacaggtacgacggcggggagctcagaagtttcgaactccaagggccgaagcacagccaaacaccccacggaacttaacaaatgtttgtggggagaacgccgaaaacgcggggaggcggggctggcgcacagtcaccctctcgcgacatctaagtgacgtcccacagcaagcacgtgttctagtctttcaccttcagtcagcctcctccgttatacaggcctacccctttaagcgagtgatggacagttatttcagcctatcaacttccttgccgacatccaatcagatttaaacttcttttagccgccggaggagttggaaaaagggggtcgaaagagggagcttaccgtctctcgcgatatcgctgtgagcctgcctctctggaaaaaacgccgaaactgatggcccgacctcccaaatagtggttaaaggaccctcgtgccgaattcgccacccaggcctcgcttcctt

SEQ ID NO: 323437 - DNA, 1003 bp, Homo Sapiens
ctcctggggtcctttgcccttttggaggctttggggccgaaaaagccagtttcttcatccgtggaagccaccctgtcttcttgggggtgggcatccagaattcggggcccttttcctatttcttttgggggagccggggataatgttttgattcttccctttttatccttcttcctcatcaaacaagttaaggaacagttttggttttaggggtgggttctttgtcccatggggatgatgaagaaaataaatcagaatgcttgcctttttcctgagcagatctagtcaaaagtctttctttttctgactcagccacatcagttctcccaaattttaatgactccttggcactctcaaccttcttatccacagacttcactccaagttgtgcctccttctcttcttcatcgctgaacagcaaaggtggtgcctcagagacagtctcttttttctttgttgcaggaggaacagatgtgggaggagagccaaacagagagcctccgctatcaacatcgtcttcaaagaggagtgacactctctgggtcttcttttggctgtccttggcaatggcaaaaagatcatcttcttcgtcttcctcaaagagactggtctttttcacagccttggcctcctggctctggagggtcccagaatccctgggttctcctttagacctgctgtcagatgctaagtgggtctgtgaagcaggaatattccactggtcctcctcatcactgctgaacaacagggcagatgctttctttttggagagctcggaggcttttgctttctcttctctctgagcttgtagacacaatgtctgcttcttagcagctgtacccccaaaaagattatcctcttcatcttcatcatcaaacagggaaaccaacgtggggagcttgccaggcagcagagacgcaccttttaacttactcgcactttgagaagaaaacaaatcctcagagtcctcctcatctgaaaataagcctcgtccgaattcgcc

SEQ ID NO: 323438 - DNA, 1021 bp, Homo Sapiens
taggtagcgaggcctgggtggcgaattcggcacgaggcttattttcagatgaggaggactctgaggatttgttttcttctcaaagtgcgagtaagttaaaaggtgcgtctctgctgcctggcaagctccccacgttggtttccctgtttgatgatgaagatgaagaggataatctttttgggggtacagctgctaagaagcagacattgtgtctacaagctcagagagaagagaaagcaaaagcctccgagctctccaaaaagaaagcatctgccctgttgttcagcagtgatgaggaggaccagtggaatattcctgcttcacagacccacttagcatctgacagcaggtctaaaggagaacccagggattctgggaccctccagagccaggaggccaaggctgtgaaaaagaccagtctctttgaggaagacgaagaagatgatctttttgccattgccaaggacagccaaaagaagacccagagagtgtcactcctctttgaagacgatgttgatagcggaggctctctgtttggctctcctcccacatctgttcctcctgcaacaaagaaaaaagagactgtctctgaggcaccacctttgctgttcagcgatgaagaagagaaggaggcacaacttggagtgaagtctgtggataagaaggttgagagtgccaaggagtcattataatttgggagaactgatgtggctgagtcagaaaaggaaggacttttgactagatctgctcaggaaacagtcaagcattctgatttattttcttcatcatccccatggggacaaaggaaccaagcctagaaccaaaactgttcttagcttgtttgatgagggaggagataaaatggaagatccaaacattatccaggctccacagaaagaatagggaaggggcgcgatcctgatgcccacccaagagcacagtggtcttcaggatggagagctgcttttcaccaccagctcccaagggcaatggaccagatggtgacccttttgctggacca

SEQ ID NO: 323439 - DNA, 1068 bp, Homo Sapiens
tccacaccctcccaccggggaccagcccagcgtgggtgcggcttgacttcccgctggcctctgctcgatatgctgcttattcctaggatgattgaaggctcttagaagagaagtccagtccttcctcataccagtgtatctcatgtcacacatagggtcaaacttctaaacctttattactgattagtacaaacacaaacggaggcaatgacaacagcagtgaggagaggccctgacaacgagggccgcccctgcccggggtgaggctgcacagcgccagctccaggctgggccagcttggcccgcactggcaacacaggcttgaccttggccacagctcagcagtagaaaggttcttggacagggtgccaggacacacgctggggctgctgtcacaggacaatcttaaaggagctggcaaagtctggagaacgggagatgacgtgctggaactcagagaggttgatggttccatccctgtcaatgtcagactcctccaggatgttgtcgatgagctgcttcatctcagacgcactaagccgtgtgtcctcgccctctcccgtgaggcagttcaccagccggctcaggtcttctctgttcaaggttccgtcatcatcaaagtcaaagatgcggaaggcataatgggacttgatgtctggcgtggctgtgtcactgaacacactgaggagatccaggaagtcctcaaagctaaggctgtctttggctggggatgtggagaagaccctgcagattcgctccttgaaggggttggccttgagctctggaaggctgagaatctgctcgaagggcacttgtgcccgaagtgacgactccacgctccgctgctcctggggaagcagctcacaaaaccgcctgtgggctaggaggatctcctgcttcgtcaggaacgtcaagtcctggtactcggccagcagctccttggacaggcgactgcccgagccccccatcgccccgccgcgcgcacagctccgccaactcgcctcgagacgcagacaactttctcacttccgcccttgggccgccctcgtgccgaattcgccacccagc

SEQ ID NO: 323440 - DNA, 1117 bp, Homo Sapiens
cagtaaaaactctttattcattccttcatgtgacagttggccttgagtagttacaaagacagagcagttcctgcctctcagaattctaagcagacattccagagctcacagatcagtgtcccaccagctgctaccctggaagcttcagggagatggggagcctggagtaggggggtgctgcaggaacccccggcaggcagtggggccaggcttcacaggcacccagggctgagtgcgagatggcagggggccagccaggcaagccagtggggatggtctttaaggtgtggggtgagggcaggaagccccccgggtattccctgacttggagtcgagggagacagaacggagggggcccgagctgaagacagagtctgagggaactggagaggctagaagccagcactcagcttcccaggagaccccaactattgccgggccaagtgtccagggagaacgtcgggtatccaaatgtttcagtggaagattccttttccaaaccatgagctgggttctttgggtttttaattataaacataatacatggtcaaggttaaaaacattttccaagcaccacataaggatatgaaataaaaattctatccccctctagaccttccagactgggtccagaaggagctgctgtcagtgattttccttacagagagaccattgcagccacctacagtgcaccatggccccgacacagtgtggcatctccccccacacgcacctgcacgcagcctcttaggagctgccctgctgaaggaggtcatccctctcagtcacatctgagcagcactcactcaggcctgggccctgaggggcatgtggggggacctggccgggttcctggctgtgtcttgtctggcatctgcctttggactaccctcttgctacagctccctgggcctgtggctgctccaagctggactccagctcccctgggctgcagtgctgctcccagtggtccagaaacaaggccaggcatggcggctcccagctcagcagcatccctggcgcaggctggcccaggagctctgtgcagggtgccgcccgatgacctagccccagttcactcacgtccgagaacccctcgtgccgaattcgccaccca

SEQ ID NO: 323441 - DNA, 507 bp, Homo Sapiens
acaagtcagtaaaaactctttattcattccttcatgtgacagttggccttgagtagttacaaagacagagcagttcctgcctctcagaattctaagcagacattccagagctcacagatcagtgtcccaccagctgctaccctgggagcttcagggagatggggagcctggagtaggggagtgctgcaggaacccccggcaggcagtggggccaggcttcacaggcacccagggctgagtgcgagatggcagggggcaagcaggcaggcagtgggatggtcttgaggtgtggggtgagggcaggaagccgacggtattcctgacttggagtcgagggagacagatgctcagggacttctcagactctggggtcactctgagtacactgggcacgctgtgaaagccatgctgctccacttccatccgtccttgggtttacagctacccaggtgaacctggcccacccagcctctctgaagctcagttccctcatctataaaatgggtg

SEQ ID NO: 323442 - DNA, 1009 bp, Homo Sapiens
gaaggggggccaaatattgtgttttcaatggggaacccttccccctttgggcgggtttccaggcaaaatttttcctttcccttaagccttccccttagttagctggggattttcccgggggcggggcccaccccgggccaagtaaatttttggtagttttaggggggggatagagttttccccggggttcccctgggctggccctggaacttccgggccctccaaatgatcaggccaggccttggccttcccaaaggtgcgggaatcccaggccgtgagttggttgcgccccggccagtcccctgcgtcacttgaggcgatgctgtcctcagatccctggctcagagttggcactcagccccatgtgaatggaggtcacggctgttttggtctttgcattgtggatgatgtcaggccagaggcctctcccctgccctgggaaaggtggggaaactgaaggcagggctgcctggcctaagacagagttacccccacagccagctgcgcagactgagatgttgcaggacccctcttggctcaccctcggctgcatagaaggcctcgaaccccgtgaacggcttctcgttggagtagtcggagcggaaggtaatgtccaggctggagcccagcgagtagaaagtgtccttgccaggggcccgctccgtgtctgtgctctcctgcccgcacagcgtggccagcaccttggcccccgagctcagcttgacgaagtcgtactcgcagaggtgggagagctccaggtcgaagtgggtgaagtagaggcgcaggcggtagccggggggtgcagtcagggtccagcgccgctcctggtcattggcatactcccctggaaagccgggggatgccaggcgcccgaacacaggttcaggccacttcgggcccaagggggtggccaccgagccacacagaaggcccaggagggtcagcagcctcatggtgtgcccgtccagctggccctcgtgccgaattcgccacccaggcctcgctcttt

SEQ ID NO: 323443 - DNA, 558 bp, Homo Sapiens
  misc_feature (103)..(103): n is a, c, g, or t
  misc_feature (529)..(529): n is a, c, g, or t
tggggtggggccaggtttattattgggtccatggtgggtgaatgggagttggggcacagccttcttcagcccaacccggagctgaggccagcaggctggctcntggcttctgacctgctgggcaggccggagctccaggggaggctagaggctctgctctgagcaggtgcgcttgttacggtgcaggacgtagcctgcgcggcaggagcagtagaaaccgcccaggtggttgtggcagtggtggtcgcaggtgggcgcctctcccggggccacctggcactcgtcaatgtcctcggctgcatagaaggcctcgaaccccgtgaacggcttctcgttggagtagtcggagcggaaggtaatgtcccggctggagcccagcgagtagaaagtgtccttgccaggggcccgctccgtgtctgtgctctccttgccgcacagcgtggccagcaccttggcccccgagctcagcttgacgaagtcgtactcgcagaggtgggagagctccaggtcgaagtgggtgaagtagagncgcaggcggtagccggggggtgcaagtca

SEQ ID NO: 323444 - DNA, 946 bp, Homo Sapiens
  misc_feature (57)..(57): n is a, c, g, or t
gggggaaaggtaaatgccaacttccggagtaaagggaggctggaggaaaaagccggnctggggcttgggggttttcaagtgactaaaaggccaccccatcacaagggaggagccctttttttggacacagccaacctttttttcagggggatgggctccctctactaactagctgcttggtcatctctccactcttctgctggcctttctacagtcttaagcatgccccaaatgacatgggctgttatcttcattaggaactctccactaaaccagcatctccccaaggcaaccactagatctctctccttccttcatgcatagacatccttggcagagtaccttatacttgctatctctgcttcctcagaggcttctaggagtccttgtgctttccacagaatgattttccagtcacactcaagttaacagaagtctggcatcttcatctaatactgcacagaactgctctaacaaagatggttaaagacctccatgtttctggttcacaggacacgccagtcattatcatgtcagctgaccacttccttccattgatttctctgacccacatgctcctgggttttgtgatctctctggctgctcttttccagtctcccttacagatatctcttgttcacaaacatcgatgtcctctagagttcaaaaactaggctctttttacctcacacacatcccctgggtgatctcattattgtctttttgttgaagatttccaaacctgtgtctacaggccagctctcctcagtctcagacccatacacccacctgcctgttcagtgcttacactggggtaagaagcagactgtttggtgagtctgagggtatgtggcagctccttctgatggtgcccagtttctccattgagtaggaggcaaggccatgttagcctcgtgccgaattcgccacccaggcctcgctcttt

SEQ ID NO: 323445 - DNA, 1000 bp, Homo Sapiens
  misc_feature (46)..(47): n is a, c, g, or t
  misc_feature (512)..(538): n is a, c, g, or t
ggggccaaacccgttcacctgtttgctcgctgctcagcccgtcttnntggtctggaacttttccagcaggtccttagtggtcatgggcttccgtgtcaggtagcggcgcacgggcatcctcagtcacctgcacgtcgccgctgtttggtgttgtcttgcttgatggtggctggggtgtcgactttcccaggccaggctctggggtcccgtgtccagccgcaaccgcttggctgcaggcatctcgctcacccgcttccccttgctcgagtttgctggcagccgcccgcagggtggaggaggtgctgccaccctctgcgctgggcgtgcctgggcggctgttgccccttgagctccctcccgacggcttccgctctctcttgggtggcgtcttcttcttcgccatgaagagggctgaggaggcctcgctgtcaatgtcgctctcctctgagctgtccgactcctcgctgctgtctttcctgcgcttcttctcctgcggggtgggtgccttcttnnnnnnnnnnnnnnnnnnnnnnnnnnnaggcggcttctcctcctcactctcctcactactgtcgctctgctcatcgacacccttgggcccctcctcctgctgcggcgccttggccttgctctcaggctcttcttgggagctactggagccgtctgacatgtagtccacctcttggccctcgaagtccccatcatcgctgtcctcgaaggcctcgtcgtctgaacccttcttcttcttctttttcctgccgcccttggccagcggcgccttcttcttggccttggggactctgcccccctcctcaccactggcatcactggcatcggacgacatctccaggtcgtcctccaggtcgtggatgcgcagctcgctcgccttcctgcggccacgtttctccttctcctcctcatcctcgtcctggtcctgatccttgagccgccgctgctgcatgatgctgaagtggtcctcgtgccgaattcgccacccagc

SEQ ID NO: 323446 - DNA, 1006 bp, Homo Sapiens
ccccccaaacaccacacccttttcgggggttttttacccccaggcctttaaaatttttcgggttcaccttaaaggcccccccgaaattggtcttgggggcgctttagggattttggaagggcggagggcctttccagggatggataaaatggatttcaaaaaatccaagccccccaggtaattccataaaatgtcatgtatcttctgataagatgcaaatgttgacatagttttaaaagatagtatcttgcattgggccaggtctcttgagcatcctgcttaaatgcagacctacctaccttcagcagccaataggtggcaatccttgccctccaccccagcccaggcaaaccagttcattagtccctttatgctagtcccctagtcccatctgcaacacacccttccactctacaaccctccccctatttccaggtcatctggtgtattgttgctgctaggaagtcggccctgattatagttaggcatcaatccctccacccactccataccagcaagaatctcagtgaggtttcattgtctacgcagaacagagcttgggaaataaaggagtgagtcatcctatggcctgggcttttttcacactgaggccttaacattcattgcctttgagcctctgagatattccctagctccaaacacagcttcctcccctcctagcctgttccccacatggctccttaactggccctcccggaatcccagctccctaaagatggtgcactcctgtttctctgaagaagtgcttttctttgcttctggacttcagctcacttgtgatgtccgcctccctagctaggccagaacaatcttcacagatactaaacttgggagagaatatctgcagctccaaaaaggtccttggccaaggcaatttcccaaaccataccttatgcctaggcccttctagaaacaagctgttcagctctggtttctcagcttctccccctcgtgccgaattcgccacccaggcctcgctccctag

SEQ ID NO: 323447 - DNA, 679 bp, Homo Sapiens
  misc_feature (139)..(171): n is a, c, g, or t
  misc_feature (195)..(217): n is a, c, g, or t
ctttcgtaaaggatttccaagccagggccaagtggggtccatttaaaagtcccagctactagggaggctgaggcaggaggattgttgagcccaggagttcaaggccagcctgagcaacatagtggagactccatctttnnnnnnnnnnnnnnnnnnnnnnnnnnnnnnnnngcaactaatggaaaggggcaaggnnnnnnnnnnnnnnnnnnnnnnngtgattcggagcagtattcctgcaagaagctcccggcgcatgtatatttacagaaaatatgtacatgcagcaggcccagaggccaccagagggcagagggcttctgtaacagttcaagcctctggctgacccagggactggctgcttcacacttgcccccatggctccgaagtggtaggagacaggttccctcacaccggaggcagattccagctccagctatgcccgcacacctgggtctgagccacagtctccacctctctcctccaacctctgcatcattaatactgctctggggtctgagaaaatacctgctttttcaggcagaggtcacacacagccacatgacacacaagccaaaccctgacagtgttgcccacgcaaccactcaaatcccgtggcacatacaccacagttcacttgactctgatatgacagcataatacacaccacggacacagt

SEQ ID NO: 323448 - DNA, 1043 bp, Homo Sapiens
ttggtcaaactccctttttattaagggttatcaagctgtacacggtccctaccctgctccgctccgagttcgggcagcgcaattcaccactctcccaaagccggaccacagctgggtgaggggtgggacagagagtaggagcagtcccagcatgcagtgcagcagcccaaagcctcgggcgaggcatcgcctttcatcccccttcagggcacagcgagatgcgggccagagctcttttgctgggacgtacacagccaaggtcaccctccagcccggtctgtcccatgtgcaggtgatggggggtacgataagcagcaatgagggcccaggaagacctcagtctcctgggggcccatcctaaaagatggcaagggcagcaaagtatttccatcctgctcctacaatttagaaaccttcttttttagtgtcaaaatatagcgttgaggggagctggacgctagggtcttcaccctaacgcaaagcaaaagccgaacggaacgggagcaagcgaacagaacaggagcaagcagcacacacaggccagtgatgtgcaagaagcggagagaggtgagccggctgcagcactgggcgagaactgcgggtgaggtaagggccacagcctgacctgctcatctattgagggggctagggaaggttgcaggggttgagggtccaggcccaacctccccactccacagttggcacaggttctccctgcttggcagcttctatcgtgggcagccctctggggacttgcaggggtaggtgtaaaggtggcagtactggggctgggctggggaccagtttctagcaccacactctgagccaagggggtcctggggatgaggctagagtcccgtgtgccctcggttcctaggccccaaattcctctcctggggctgtggcaagcccagtgttggcacctcccttggccaggcacagacacacaaacaccacacacgtgggccagggaacactcagacctcgtgccgaattcgccacgcaggcgggtcaccgatgtaatatgggaggggcgcgacgaa

SEQ ID NO: 323449 - DNA, 1079 bp, Homo Sapiens
  misc_feature (966)..(1008): n is a, c, g, or t
tttttctttttcctcccccacgggaccatacaaaaaaaagtcgcgaggcctgggtggcgaattcggcacgaggcaaaaaacaattatattaatgagaacatggaacagaatgaacagaaagagcagaagtcaagtgagctcatgaaagaagttccaggatatggctataagaacaaactcatcttggcgatatctgtgactgtcatactaatgattttgattctaattttttgttttattgaggtaaggacaataattaattcaggttttcagaatgcaatcctgtgtttgtgtggattcagaatccacaaactgaaaaccaacgtcactttcccacttgacattcttcttctgtcgtttaaggctgaggtgtgctttgttcttttactgcagtgtatattccaggattgttaaaggatcctcgcttccaggaggtctctgtggaaataaaaccaagttaatcccacctacactattttaagaagttaagttgatataatagcaaaatttctccccacccccaaactatgtcaacaattggatgtactcacctgaatccccccctttactctggccccctaaatttattttccctgccgcctcacaaggagagaacaccattttaatcttccacccccccacccagttggcctccaccctggagaagccacgcaaacacagtcccaagcagcaaagtttcggcctgggtacactctccttaccatttcccacaagtctcattcccttctcccatggggaaggggcgaccgccctcaaatcaggctcccgttacgaagaactccccgggcgtaggcgtttcgtcaaacaacaaaatatccctcggccccccgtctccccaattcgccagggcggggagcggaccacctccgttacaccaacatatcactggcggttgtgttcgccgctccaccaccgccgacccccaccgacgcggtgcacacatannnnnnnnnnnnnnnnnnnnnnnnnnnnnnnnnnnnnnnnnnnaccaacgtacccacacccccgccgccccattctagtctttccaccccctacaccacctcctcgtaatctga

SEQ ID NO: 323450 - DNA, 478 bp, Homo Sapiens
  misc_feature (387)..(387): n is a, c, g, or t
  misc_feature (429)..(429): n is a, c, g, or t
  misc_feature (435)..(435): n is a, c, g, or t
ttttaagtaaaaaaccaatatttaataacaattttaaaaacatagctccaggccatccacatgctttaactcatgctcaggctcctgatattgatgggttgtctttgtatttttctgatgcccttttatgtgaattcacctctataagacaaaaaattataatcaaaattattagtattacagtcacagatattgcgaagatgagtttgttcttatagtcatctcctgggggacttctttcatgagctcacttgacttctgctctttctgttcattctgttcccatggttctcattaatataatttgttttttgttggggccccgtatccccattcctaccattccaatggcctttggcttccctgcctgctcggctgagggagggnttcacagggaggggcctgttcgggcaacagagggctgggggnacaggntccccttgcaaaagggggtttcctggaccatcccatttcaggg

SEQ ID NO: 323451 - DNA, 1140 bp, Homo Sapiens
tgttgatttccgtgggtttgtctagtgtttcttgtgttattcttcctggttctggcgtccatctcgtacgctgttgccccagtcccctttttggagtcttgctttgtgttgcgatgttggctgtttcgcgctctcggatagttgtagccagtgtttagccccagatcccgtgggaacacggactggatctgtcgagtgctgtggtgtgtcctcgtgcgtgttagtctagttgagcaggttcccaggtatgcgtgggcctctttgcgtgtatctgcgttgtgggagctggtggttctggatatgcaatgggtaggagccatcgattcgtctgttggtgttgttgcataccgctgagtgcccttgtaggtacgttctatagagggcatagcaggggcgtgtttgtgtccacatccacaggcactagaagcctgggctccgcggccagcacatagaggtggccggagagcctggagatgataccggttgtcagtgctgtgagctgggaagtgcggataaagggcacagagaagagcggcaatggaagaatttgatgtgctcaaagagtaccttcctcctcccaaaaatagaagtccaagggccatgtggtgggctaagtgaaaaccatagttcatttcaccacccgttttcatgtgtaagaagcgacaaagctgcaaaacctttaggtttcctgagccagccatgaccatggcgagagacagcagcaccacgctcagacaagtttctaggttatgaggacctgtaacagaagcattaggtgcggacaaataagtcataaaatctttggcaaatttatgcaaacagttaaatgctgataagttttctgagccagcaaatcgaaaacccagagacaagcaggctcctgcaattatgtagacatgtgcttgggacaaagtttccaaattcaaatcctctgagcacggcaattcgatttcactgagagagatactattttctcttataatttgaggaacattgctgtcaacccacttggaatttggtaaaatatcatcccacaaaatcaggcatcgagcaagtgtcctaagcaagagaaattctggcttcacaaagtccaacaaatacatgggtcagggcctcgtgccgaattcgccactccaggcc

SEQ ID NO: 323452 - DNA, 347 bp, Homo Sapiens
cagtgcccacttaactccattggttcagaggcactcagtgtatcagctgaaagggaattgatatgtgtcctgtgcaaagtactagtgctattgaggataggcttatccaaaaattggacttggggctggagaggtacatcttctagttccagcaatgtaattttgttgagggctcccctaggaaacagcaggaatcttggcacgtagagggtctgttgtggcccctgctttgtccagtaccggcccaagttaaacccattgatccagacttggcccttggtccatccaggtagatatagaaatgtgtccccaaccctcgtgccgaattcgccacccaggcctcgcta

SEQ ID NO: 323453 - DNA, 1643 bp, Homo Sapiens
  misc_feature (1025)..(1034): n is a, c, g, or t
  misc_feature (1467)..(1467): n is a, c, g, or t
  misc_feature (1546)..(1546): n is a, c, g, or t
  misc_feature (1609)..(1609): n is a, c, g, or t
caatgatgctcactgaaagttgtaagctgcgaggtcttcatcacagaaatcttcttcctattactcatgtgtgtatagaagaaggagaaaagcccatggtgatattgccttacatgaatgggggaatcttaaatgtttttacgacaggtgcaagttagtagaggccaataatccacaggcaatttctcagcaagacctggtacacatggctattcagattgcctgtggaatgagctacctggccagaagggaagtcatccacaaagacctggctgccaggaactgtgtcattgatgacacacttcaagttaagatcacagacaatgccctctccagagacttgttccccatggactatcactgtctgggggacaatgaaaacaggccagttcgttggatggctcttgaaagtctggttaataacgagttctctagcgctagtgatgtgtgggcctttggagtgacgctgtgggaactcatgactctgggccagactccctacgtggacattgaccccttcgagatggccgcatacctgaaagatggttaccgaatagcccagccaatcaactgtcctgatgaattatttgctgtgatggcctgttgctgggccttagatccagaggagaggcccaagtttcagcagctggtacagtgcctaacagagtttcatgcagccctgggggcctacgtctgactcctctccaatcccacaccatcaggaagaaggtgcctgtcggggctcacttcgagcctgccagggatgctctgtatccaacccccgcccaaccgaagcccatttgcgttccccaaacaccccgcccctacgaaccgctttaccaatctcgacctttttccagaccgagcttaaatactggtgggccccacttctcctagacgatccccttcttattaccggctgcaactcggaccagccgcccctcgtcgtcaacctcttctcgtcgcggccccatttttttctcgaccaccctcccctcccgtctcgggcccttgccggccgttannnnnnnnnntgaaagcagataaggcgtcaccccgcctttttttgccacactggaccgttaaaacaaacagcggctactgttgcgacacttttagtctcactttatccactatgccctcaagcgcgcggtctccataacaacttccctcgtacacatcacacctccacggggtggcgcgcgcggataatttgaacctcccccgctcttgtattatagcgcatttctctctttcacacggttaccacccccgcctctctctgtacccctatcacggatgggcggataacagcgacaccaccgccatccccctcacctgcccaaggcgagcgatcagcgactatatcctgcgacgctctagccggagtacccatatgtctctacgcatctcacgcggaccgccgcaccccccgtcttcaccccaccctcctcctgtgcgccctcncgcgcaaacgccgtgtctccttctcatttacatgcgttgccggccagcgcaacaccaccccctctctgctacccatccnaccctcccgcaaccctctgcgacgcacgaagctcgtattcgctctgccgcgcccctacatggnggggtcgggtctcttacacacctaccacaacaca

SEQ ID NO: 323454 - DNA, 448 bp, Homo Sapiens
  misc_feature (419)..(419): n is a, c, g, or t
aaattgtttttacgacagtgcaagttagtagaggccaataatccacaggcaatttctcagcaagacctggtacacatggctattcagattgcctgtggaatgagctacctggccagaagggaagtcatccacaaagacctggctgccaggaactgtgttgggcctttggagtgacgctgtgggaactcatgactctgggccagactccctacgtggacattgaccccttcgagatggccgcatacctgaaagatggttaccgaatagcccagccaatcaactgtcctgatgaattatttgctgtgatggcctgttgctgggccttagatccagaggagaggcccaagtttcagcagctggtacagtgccttaacagagttttcatggcagcctggggggcttaacgttttgaattcctnttccattcccacaccatcagggaagaagg

SEQ ID NO: 323455 - DNA, 424 bp, Homo Sapiens
  misc_feature (305)..(305): n is a, c, g, or t
  misc_feature (347)..(347): n is a, c, g, or t
  misc_feature (401)..(401): n is a, c, g, or t
gtcattgatgacacaccttcaagttaagatcacagacaatgccctctccagagacttgttccccatggactatcactgtctgggggacaatgaaaacaggccagttcgttggatggctcttgaaagtctggttaataacgagttctctagcgctagtgatgtgtgggcctttggagtgacgctgtgggaactcatgactctgggccagactccctacgtggacattgaccccttcgagatggccgcatacctgaaagatggttaccgaatagcccagccaatcaactttcctgatgaattatttnctgtgatgggcctgttgctggggccttaggatccagaggagnagggccccaggtttcagcagcttggtaccagtggcctaaaccagagttttcatngcagccctggggggccttaacgt

SEQ ID NO: 323456 - DNA, 952 bp, Homo Sapiens
  misc_feature (215)..(215): n is a, c, g, or t
cccaagggaaaaaagggaaaagggtgaacctcctggaggaacctttcctctgggggcgggaagacgaccccggggacttcccaggcccaaggaacttaagatagactttttccccaggcgggggcagccctcatccctgccctttgccactagtggagggctgggagcccactggggaggaggccaaggagggcctgagaccttgttcccccacnccaggccacttccactggccaagacagaggagcggcacagctctcaggccgacctggctcccgtcaggacaccagggctctccatccccctccattgtttgaaaagcttaatacacacaaaggaaaggcagcccctcggcccctggaaaaagcagggtccttcagacagcccccacgctgcatcccatggggccacaagaaagccacccagagaattcagtgtaccatttccagataagaaatcagcttggggctgaggctcggggaggcacacactgaaaaacacaagcctaccttggcgatgagatgaagaaacatactacaggaaacgttaacgtagagagaagagcacagggcagaacacaacacagaaaggcgggtcccatccagtgaggaagctctttatccccggcaacccttcccacaatcaggggtctccagtccgatggcccattggtcataagctttgccttggggaaacagagccaccctcctctgcccccacttctggctgcctcactcccctgctcaaagcttgattttgaattctgtgggctgcgtggtcacagaggcccctgaggacttgaagagtgccttcaggatggtgtcagggtccacttcggcaggggggttggaggaggaggcagagttcaccctgcgaggcagctcgctctcctttttcattgatgggctgtcactcagccctcgtgccgaattcgccacccaggcctcgctcc

SEQ ID NO: 323457 - DNA, 1172 bp, Homo Sapiens
  misc_feature (1135)..(1135): n is a, c, g, or t
gggttgagcttttctgtgtgtgtggggccctcaagcgagctcgactggtccatcctggggtagcggaggtggtgtttgtgaaaaaggacgatgccatcaccgcatataagaagtacaacaaccggtgtctggacgggcagccgatgaagtgcaaccttctttgaatgggaatgttatcacctcagaccagcccatcctgctgcggctgagtgacagcccatcaatgaaaaaggagagcgagctgcctcgcagggtgaactctgcctcctcctccaacccccctgccgaagtggaccctgacaccatcctgaaggcactcttcaagtcctcaggggcctctgtgaccacgcagcccacagaattcaaaatcaagctttgagcaggggagtgaggcagccagaagtgggggcagaggagggtggctctgtttccccaaggcaaagcttatgaccaatgggccatcggactggagacccctgattgtgggaagggttgccagggataaagagcttcctcactggatgggacccgcctttctgtgttgtgttctgccctgtgctcttctctctacgttaacgtttcctgtagtatgtttcttcatctcatcgccaaggtaggcttgtgtttttcagtgtgtgcctccccgagcctcagccccaagctgatttcttatctggaaatggtacactgaattctctgggtggctttcttgtggccccatgggatgcagcgtgggggctgtctgaaggaccctgctttttccaggggccgaggggctgcctttcctttgtgtgtattaagcttttcaaacaatggaggggatggagagccctggtgtcctgacgggagccaggtcggcctgagagctgtgccgctcctctgtcttgtcagtggaggtgccctgggtgggggagcaggtctcagggctcttgtcctctccccagtggctccaggcctcactagtgggcaagggcaggatgaggctgcaccgcctgggaagagtctatctaagttcttggcttggagtcccgtgtcgtctccgcccagaggaagttctccagagttcacctttcccttttccttgagttgtgctgaatgccccaccccagctctctttcccttctgggtgtctttnctggggagggggctgtgttgtgagccctcccggtttt

SEQ ID NO: 323458 - DNA, 1103 bp, Homo Sapiens
  misc_feature (27)..(27): n is a, c, g, or t
  misc_feature (51)..(51): n is a, c, g, or t
  misc_feature (60)..(61): n is a, c, g, or t
  misc_feature (136)..(144): n is a, c, g, or t
  misc_feature (175)..(175): n is a, c, g, or t
  misc_feature (198)..(198): n is a, c, g, or t
  misc_feature (251)..(251): n is a, c, g, or t
  misc_feature (718)..(742): n is a, c, g, or t
attctgggggaggtaagtattgccagnttaattttcaggtgcaaggactgnaatcaagcnnttcttatatttgggaaaaaaaacttaatgttttttcatggaaaactagatactctttactagttttattgaaatnnnnnnnnnttgaagatcccgccatttttaaaagcccttnacataaagtagagtttctagtgnacagattgaaaatcagtctgaatggaccatactatgatttcaccacacagatngagttttcctcaaacccactacccttgacatagatttgataccctccctcaaaaggaatcctataaaaaaattgcttcaaagccccttttgaaattgcaatagtgcagcaaacccacaagtaaacaactgcctgttaacctgttatttcaaatatagactgaaaagccaacaggcatttttcgtgtgcaatttttcttttaaaacaagttgtaagttgaaatatcaaatctgcacagcgctgtcccttcacagaaggcaagaaactgccggcacatcatgtcagaggccgccctcggtgctgtaggctgtggaagtgggcctccctcagggtctggttgatgtggaagtagaggccttggcacagcgcggactgctcgggcacgggctgaggcgtgttagggctggatccggccatggtctggctcaagctgccttccggcccgctggccctgtccgggctattgannnnnnnnnnnnnnnnnnnnnnnnncccaccactgtcactgcctgaagactctgtgtcccaggaatcctgaaagacagggtttctgctacttcttttggtctgggggggaagatggttgtcttcttcgttgccattccttctccttttcctgggacggaggcgctcgctcatggcagctggcggatggaagctacgcggcgccgctccgcgaagagagggaacagagggggttgtgtttcggcggccgccacgcccaccccctcgggcctttgctctcgcagccgctcgggtggacgcagccggtggcgagtacccctcagtcggacccgtaccaccactacttccggcgtctgctccgcgcccccccattcgccctcgtccgaat

SEQ ID NO: 323459 - DNA, 1748 bp, Homo Sapiens
  misc_feature (130)..(130): n is a, c, g, or t
  misc_feature (143)..(143): n is a, c, g, or t
  misc_feature (152)..(152): n is a, c, g, or t
  misc_feature (280)..(280): n is a, c, g, or t
  misc_feature (305)..(305): n is a, c, g, or t
  misc_feature (784)..(792): n is a, c, g, or t
  misc_feature (839)..(879): n is a, c, g, or t
  misc_feature (1491)..(1515): n is a, c, g, or t
ccacagctgggtgcgggtaaataactttctctccggtttgtacccccggcgccgtgcgtgtgtttcccccccctccgggggttgcaggagatattggtttttatattcctcgcacataaggttgaagatncgtatattcgtgnttttcatcngtagatatgagcgcgcagttggggcgcgcagagttcctcccgcgtggtggtgcccggcgagacaccaagtgcccgcctttttacgcgggaaagcagtgggcacagcaggacgcgacattgtaagagangaaaatgacaacaatgggggcctanactaaagaatatccggttgctgtccccacccccaacgatgtatatgagcgcgcgtagggtgagagggggttccgaaaaagctagaggtgtggatgaggggatcaataaggatatgttgcgagactacatcacgcaccatacctttctctatctcagttgtggaatgatgttcctctcgtttttgtcttcaccggattaccccacgggttgagaaggggcgcctctccggaggaggtggccgacgagggggaggagggtgttttccgagaaaacccgctgacgaggatgagccgccgcggggggggtttttttcattcgcggcggagcgagaaacccaagccccctttgttccgatggtccccgggggttttttcctttggggaaaacaaggtttgtgccgccgtgtcaccctataccgcccggggggcccgcgggccccaaccgcaaatgttttgggaaaggctttttgtggggcggcnnnnnnnnnccggccctggggtgcatgttcggcgtcttgcgtgcagagaatcgccnnnnnnnnnnnnnnnnnnnnnnnnnnnnnnnnnnnnnnnnngtgtgggttttactctttactagtttattgaataaaaaaaattgaagatcccgcatttttaaaaggccctttacataaagtagagtttctagttgacagatttggaaatcagtctgaatgggacatactatggattcaacacacagaatgagttttcctcaaaccactaccttgacatagatttgataccctccctcaaaagaatcctataaaaaattgcttcaaagcccctttgaaattgcaatagtgcagcaaaaccacacggtaaacaactgcctgttaacctgttatttcaaatatagactgaaaagccaacaggcatttttcgtgtgcaatttttcttttaaaacaagttgtaagttgaaatatcaaatctgcacagcgctgtcccttcacagaaggcaagaaactgccggcacatcatgtcagaggccgccctcggtgctgtaggctgtggaagtgggcctccctcagggtctggttgatgtggaagtagaggccttggcacagcgcggactgctcgggcacgggctgaggcgtgttagggctggatccggccatggtctggctcaagctgccttccggcccgctggccctgtccgggctattgannnnnnnnnnnnnnnnnnnnnnnnncccaccactgtcactgcctgaagactgggacggaggcgctcgctcatggcagctggcggatggaagctacgcggcgccgctccgcgaagagagggaacagagggggttgtgtttcggcggccgccacgcccaccccctcgggccttggctctcgcagccgctcgggtggacgcagccggtggcgagtacccctcagtcggacccgtaccaccactacttccggcgtctgcccc

SEQ ID NO: 323460 - DNA, 1216 bp, Homo Sapiens
tttgaagtaaactcaatttttattcttctatataatacatggatatatggataaattttcctttaaagagtttgcaaccctgaggcaatgtccttgggtacgtaacgtataaagcaacagcaaatgaaatctgaatgcgggaatgacaactggacttcgaaacataatttaatattcatgaaattgcacacataccaatagtattctatgtctcgtctagcctcttaatccaactatctcaactgccttgcagtttgcctaccagacaccccaactctctacatacattctgtcatgtaaatgctgaccttctgactgaaatttaataaattaacatggggatttacatcaaggggatttttgtctggtgagtgcattgccagaaagcatgcctagttcctgaccacagcatctgcccacataaaaactttggcccccacaggggttgagatggcatctgactgcagtaacctcgaggtccttgagggtcccttgggatccaccaggagcaagtttttcatctaatctgagggccgcattaagggtatggcagaggaggggaaggccatggctggttagaagagatggaacgtcacagctactgggttacagaaccagtgaatctgatgtcctgttttcaggacgcatggcccatccacggagaagatggggcgacagtagggtctaaaggtggactgtggtacccgggggcaggaagagggacagttaggcctagatgtaaggagaccactatgctgcttcttcatctacctcacagatggccacagacctttcagtacatggcggaaacctatttctgaatattccgttttccccaaagttttataaaccatggtgagggcaaatgcttatgagaaactaagggtgtgttcattatattatttatatattatcatcttccctctgaggataacatacaagggtaaataaaaagcagacaaatagctaaaaggtgactcgagctgtaagctctttcaactagagggtgatttttgctttaaaatcatcaggcccgaaaagcaaatcttgaaagcaaaatctaactttggcccactgataacaatgatcctgagtccctccttcattcccaaagtctgtttttccgaggaatatcctccattaatattcattttgtgtcatcattatcacaaagggttaagtgcagctttcacttcattttaggcagagcttacta

SEQ ID NO: 323461 - DNA, 679 bp, Homo Sapiens
  misc_feature (44)..(44): n is a, c, g, or t
taggtagcgaggcctgggtggcgaattcggcacgaggtgttttncacacctttctccaaggatcgaaccaaagatgtgtctccagtattgtgtctgtgcccccgtgtgtgttttgtggacagccgtgttgtctgactgtatccagctggcacttgacagggtgcagtcattggtgagaagaatcagaaaaagaagacccatcagcacaggttggataggggttagtgtaggagaccagttacagaatggcctggagtcttcaacttttgaccggtgcaggtgtgaccagagaccacctctgtggccacctcagatagtcatctcagtccatggatcccaaaacacaaatctagaattgcaaagccagcctttatttccctggcaggcagccttgccagaaggcagagaggcagttctgaatcattctctcattcaccagtggtgacatccttcagtccctcacatctctgacagagtgggagagaatggatatttggctgaccttggtgagacctggagctgcctctttcttccctaggggatcaccacggctctagggcattctaggatgaggtcagaccccttggccattggtgttattttttgtatagcttcagactgggttccagaacttaccattgaaaacagagcttttaggccaggtgtgagtggctcacac

SEQ ID NO: 323462 - DNA, 1297 bp, Homo Sapiens
  misc_feature (117)..(117): n is a, c, g, or t
  misc_feature (152)..(152): n is a, c, g, or t
  misc_feature (214)..(222): n is a, c, g, or t
  misc_feature (245)..(245): n is a, c, g, or t
  misc_feature (830)..(872): n is a, c, g, or t
  misc_feature (934)..(975): n is a, c, g, or t
cggtgccgcgggggtttccgtggggcggccgtgtgttcccccacgctcgtagtccgcggagggggggccggtgtcacgcgggttgctcgccgaagcgcgagatagggcgttgcgaancgcaatgcgtgagcgaggatggataagcggcgagncgcgtgccgaagcgcgataagcgcggtagcgcggaacgcggcttaggcgctaaccggagcannnnnnnnnccggcgacacacggggtatctantgcgcaacacgagtcgctcgtgagaggtggaagagggcgggccagaacaggggaacgtgcgcgtcggcaggccgacaaaccgagagggggcgcgaggaaccaaggggtgctcagtggcggatcccgcgactaccattgctaatgccttgcgggccacatctagttctgcgtgccgcacgcattggcccccatagtcgcgcacgccggtattgatcgagctggtatctgtagctcgcttcctgtagtgtcgccggtccgcgaatgcggggcgggcgaggaggggcgttcctatgtccggcgaaagcggtaccgcggaagagccgcggaagcggtacggagcggcgaagggccgccaggcggaacgacggttagtggacggggggaaaaaatatcgcggccgggggcggtgtcgttgggcgagcatgctgcgagggtgcattggcgcgacgcgctcgcgtgaggatcggatggggtggagggaggtaccggctgtcagagtccgtgggggtcaaagggcgcctatatggggcggggcaggtgttggtcggaggggccgtcgttggtcggtgggcggttcgtggtctnnnnnnnnnnnnnnnnnnnnnnnnnnnnnnnnnnnnnnnnnnncactgccggctcgcgagaagggggattgtggccgcgacggcacggcccgtcattcgtgcgannnnnnnnnnnnnnnnnnnnnnnnnnnnnnnnnnnnnnnnnnggcgaccggcgccacaggggtggcgacagttcgcgtatcagagggtcggcggcgtcgtccaggcgcggggccgggggcgcggcgcgctgcaggctagggatggccggggagctgtagccgagcgcgaagccgaagctgagtgggcccagggcagcggcgaaggcggcgaggaagacgcggcggccgcggggcgcgctgccgccaggaggccccagaagcggctgggtttcctctgggtcctcgggcgtcatgtcggcggccaacgccgatcggccagctctggcgcctgaaccgccctcgtgccgaattcgccacccaggcc

SEQ ID NO: 323463 - DNA, 1694 bp, Homo Sapiens
  misc_feature (548)..(598): n is a, c, g, or t
  misc_feature (619)..(669): n is a, c, g, or t
  misc_feature (1283)..(1532): n is a, c, g, or t
  misc_feature (1591)..(1646): n is a, c, g, or t
aggggaatattttttcctattctcgcctaaaaggggtggtttttggaaaacagcggtgtttgtgtttttaccccaaaaccctgtgggggaaggttctctccccctccgggaggttaaaccggggcacaaattatgggacaacttttctttaaacccccgttttggcggccgggggggaaatatttttttaatgcaaaaggccggcgaagggctcttgtattgcccccgcgggaattccaaggttcaatccacccccctttttggtatttgttttccaattttgggcaggaaccccgggaggtatttttctttcggtggatggggaagaacgggcccgggcggggggcgttaattttattatttgaagcctagaatttgcctttcctttcttatattattgcagtgaccgccccccacaaaaacacattttggaataatttctttacacgcccgcgttggcgcccgggccctttgttattggtgaggaatccaatgccttagttcatgccccaggattttctttggaaacagcttatggccattttccnnnnnnnnnnnnnnnnnnnnnnnnnnnnnnnnnnnnnnnnnnnnnnnnnnngtgggttgtttgcggtcttcnnnnnnnnnnnnnnnnnnnnnnnnnnnnnnnnnnnnnnnnnnnnnnnnnnnccatgaattcaaagccttttaatgatgtgaacacttactccccatttcttttttacattgttacaaaaaatttacatacagttttctgaaagtggcattttgttggttgttattttgctgatgacacatattacccctttgtattgaagaggtatcataaaattcacagggcattacagatttttgataagaagtagtaatagcattgtcttttaacagctggaggctcccaggcatactctttggtgagaaatgattaattttatattttcattttgatgagaatcttttcttgtttttaccagttataaaaacaaagctttttctttgttgtgatactgtgcactaagacttagtttcttgaggtgatgctaaataaaatgagatcaataggaatattccaggaggtcgtgagaagtttttagaaaggatggcatctacatatatatggagctctgaaaactgttggagagtatgacctgggactgaaactgtggagcacatagccagtgtcacaggctccgagagcagagagagtttgctctgggacctggaatgagtgatggagaaatgttttaaacaaacaaacaaacaggccaggcacagtggttcannnnnnnnnnnnnnnnnnnnnnnnnnnnnnnnnnnnnnnnnnnnnnnnnnnnnnnnnnnnnnnnnnnnnnnnnnnnnnnnnnnnnnnnnnnnnnnnnnnnnnnnnnnnnnnnnnnnnnnnnnnnnnnnnnnnnnnnnnnnnnnnnnnnnnnnnnnnnnnnnnnnnnnnnnnnnnnnnnnnnnnnnnnnnnnnnnnnnnnnnnnnnnnnnnnnnnnnnnnnnnnnnnnnnnnnnnnnnnnnnnnnnnnnnncttagctgggcgtggggccacatgcttttgtaatcccagctactaacacttgaatccannnnnnnnnnnnnnnnnnnnnnnnnnnnnnnnnnnnnnnnnnnnnnnnnnnnnnnntcaaacaaacaaaaaaacaattgtgggaaggttcccgccacccaggcc

SEQ ID NO: 323464 - DNA, 997 bp, Homo Sapiens
  misc_feature (681)..(697): n is a, c, g, or t
gctgggtggcgaattcggcacgaggcggaccattcaggaagtcctggaagagcagagtgaggacgaggacagagaagccaagaggaagaaggaggaggaagaggagaccccgaaagaaagcctcacagaggctgaagtggcaacagagaaggaaggagaagacggggaccagcccaccacgcctcccaagcccctaaagacctccaaagcagagaccccgacggaaagcgtttcagagcctgaggtggccacgaagcaggaactgcaggaggaggaagagcagaccaagcctccccgcagagctcccaagacgctcagcagcttcttcaccccccggaagccagcagtcaaaaaagaagtgaaggaagaggagccaggggctccaggaaaggagggagctgctgagggacccctggatccatctggttacaatcctgccaagaacaactatcatcccgtggaagatgcctgctggaaaccgggccagaaggttccttacctggctgtggcccggacgtttgagaagatcgaggaggtgtctggctcggctccggatggtggagacgctgagcaacttgctgcgctccgtggtggccctgtcgcctccagacctccttccctgtgctctacctcaggctcaaccaccttggggccacccccagcaggggcccttggactttnnnnnnnnnnnnnnnnncccttctcaaggcagtggcccagggcacagggtcggcagctgggagccccccccgggctgggggcacccgcagaaaggcgaacctgggggctggggggccccaaaaaaaggcccggagcaccccagaagggtttatggttgggcgacaaacctctccgctctactgggcttcgggggggctttaaaacaaacgctcccggcggaaattttgccaagggctccctgggcggggggggtttccccccggccgcggaaagaaataggactcccctctcaaagggggcgtttttctgtgggccc

SEQ ID NO: 323465 - DNA, 893 bp, Homo Sapiens
  misc_feature (77)..(87): n is a, c, g, or t
  misc_feature (89)..(105): n is a, c, g, or t
  misc_feature (113)..(113): n is a, c, g, or t
tgggggcccggcgccgccaaaacggaaatgtttttagaaaggcttctcgaggggccggaggccgcccgaacattttnnnnnnnnnnntnnnnnnnnnnnnnnnnnggttccanccaaggggagctgtttatttgacagggaaggaatttgaggagccgtgttagtcctggcccaggacaggcaggtggaggtggtggcggggggtctctgatgggggcctcaaagactgcctctcccctcataggcggactccccgcggggccacgcttgtgctgcaccttcaggtctcatcgaagtccacgccaccagctggtttcttactcttgaacccggggttgatgagcgactctcctggacaccgcctcctgactccaggtccagggccacctctctggggatctgggtctggtaagaagagctgaggccctgcaggccgggggctcttcctcgggctgacagctgtctcttctgcagctgccagtcgccgctccaggctccacacgcgttttgccaggcccagtgtcagcgcccgcagcctgggggctgcctctgggcctggtaccttggagaggtcaaaggccagtgccgagggcccccctgaaagcgtcagggatgctctgtcctcctgcagagtcagagccacagcttgctgctcacaggctgccctgggagaggagaggtgcggagagctgtggcagaccctcctcctccccacccgtccttcctccctgcttgggtctcacctgaaccggggggtgatgtcctcagccgcactcaggccaaaacgggctttgagggccgccaggctgtccggcgtgaagcaggtgctccaaagctccgcggcgtcggtcacgtagagcctcgtgccgaattcgccacccaggcctcgctcc

SEQ ID NO: 323466 - DNA, 1047 bp, Homo Sapiens
  misc_feature (206)..(206): n is a, c, g, or t
  misc_feature (346)..(405): n is a, c, g, or t
  misc_feature (517)..(525): n is a, c, g, or t
acgtagccttggacggatatctcgactcggcggcgtcgtgtcgggcgatgggagcggcgccgggggacgctcgcacggccgcgtccgcgagccgggttcgagggtttcctgggcagccggcgggcggctggatgtgcgtggtacggagcgaggcggtgggagtatgaggcgtgcgtatgtcggctgcagtcacagttcgtcacgangagccagtttggcatcgaggaggctagcatcctcgcctccggagctgggtctggggtcctcaccgcggtgctgccggtggaaggggatgaggcccccccgggccggggcaagttccccaccgggagccttttgcgggccnnnnnnnnnnnnnnnnnnnnnnnnnnnnnnnnnnnnnnnnnnnnnnnnnnnnnnnnnnnntcggggtgttttggtttttgtagcagcccgcccccgtgggggaagggtggtgttcttttctggcccctgtgctgggccccccacctgggtttacagatgtctgtcattgctnnnnnnnnncggtccttgcgctgggcctggagagaggtttgggggcaacgggcagcgggcaccccggtgaaagtccctcgaggctgcggtggcgacaccacgtccagccacttctcaggtcgtcctagccaggtgccattcatcccaggcggacagggggccgaccaccggccccatctctctccactgccacctctccctgtgtgtcccgggaggggccgcccgctgggcctcggctccttacctggtagacgagggcagcagcactgcagggcaggctctgaggggcttcagggagacgcaggtgctggcctcagactccaggatgctgcggccaggccaggcgccatctgggtgcaggggcggccacagggcagctgtcgccatatcgacagcagccgtccgtctgggctcccggggccacctgcccgccgctccttcctctcctggcttattttccaaacaatttgcttaacgtgattcccggccaagctaaacatgactaatcgtgtttaccccctcgtgccgaat

SEQ ID NO: 323467 - DNA, 943 bp, Homo Sapiens
ccacttttttggctggagggggggttttgcctggctgttttacccggtcctccttgtccccctttgcccccatggtttggcttcgctgcgggctcgggaaaggttggggcggaccatggcccaggccgggaaccccctgggcttggttcctggctggggtcaagctcccccgagggagggtgagtcgttcaggggggatcacatttcccactttcttggggggtcccccagaccctttcagctgcaagggggagacatagtcttcatcctcactggtgaggcccagctctgagccgtagcactgatgcaccaggtgccagagctcgcggggactcagcgtcttttcaagcagtgcattctgccagaggcggaagatgaggaggaagcagcggtcacgggccccaaaggaagtgaagaaatgcttctcgctctccgtgcagatctggatggcgttggggatcagcttggccgtcttttccttcttcagacatgtcacttccttcagctggatggagatcgtggtctcccagcggaagatgttgctgtagaagcagatccagttctcagagaggtagaggcggccctggagcaggatctcacgctgcagggcgcaggagtaatccacaatgaggcgttctgcttcggggagtttgctgaacagtttccggaagtcctcattacgctgcttataagtggggctcagcatactgtaccagctctgcatcttcttgctgttgcggatgaagttccggctgcctaggctctgggtgctgggggtcccaggcaccccacccttctctgaggagctatctgatcccttctccaccatggtgcctggttctggctcaggtgggggccggcttgggggcaggagctgcagccgtttccggagcgatggggagctgcttggcgtgctcctcgtgccgaattcgccacccaggcc

SEQ ID NO: 323468 - DNA, 1044 bp, Homo Sapiens
ttttgcacaggttatgatataaaaagtccaggggtacaggggttgttgcaaagccaaccgggtttcaaaagtttggcaaaacttgggtggacccatggggcccgtgcccgttcaaggggtggaaaggttgggcggcccagggcgttttcatggggggcccccaaaaagcaaaaccaaagggcctggccccttcagggtcccatgccaagcgaggatggggtgagggcaaggtcactccatggccctgccagtagggacacctggtgggtgggtaacggcataggtggtgagcagggtcgtgcagcggcccgtagatgtggggccatcctcaggcccccgcatagtagggggtgggcccggtcagtgcgcagtacatccttgaggaccgtgctgcggatgaattccaggtcctcagggttcgctcgctgggcccactcgctcttgagctgctcatactcgcggctcttgcgtttcatgtagtccatccgctctcggcctgtcagtccatctggatacacgttcagcaggtaccgccacaccacctttcgcagcgagggctccacaccgccatgatagatccgcaggcgcaactcctcgggtcgggagagctggccctcgtggttcaggtacgtgtgaaactcagcatcgctcaggggtggcttgaagggcttgacatcttccccatacgaccagctcagcacttgttggaccttagacaaggtacggcccacctgagtgaggatggactgtgtaaagggcagggcggcagtcgtcagtgatgaccgtttctcagccagcaacacgtcggagccaatgacatctttggggctgattatgtcccagtcttctagcaatgggccttgactcggacccgcaccacctctcgctcctcctcctcagcggccgccgccgcctgagctcccacaccgggcgggggcgctccggagccagacaagtccgaggccccggaggctgttgccatcccgccgccgcccgtctcagggtgacggccctcgtgccgaattcgccacccaggcctcgctc

SEQ ID NO: 323469 - DNA, 960 bp, Homo Sapiens
  misc_feature (120)..(128): n is a, c, g, or t
tggaaagtccgggggcgcacgaaggcccaggggtttcccccatcttcctccacatgggggccggggtcacccccaagtttgccacccagtacccttaaaagcggggagggacaagccggnnnnnnnnngggggccaggaggacagccgggccttctccctgggggcttcaccctgcagaaggtccttcatggcctaggacagggggtcagggagctgaggcccagcttcatgggtttgcagcaaggggcccaacgggttggacccacagagaggggatcaacagcgctatccctgatctacaggcccgtgccccctcccaagttcacttgcattcccacccacagagacctgaagcccccaacagggcatcctgctgttcacctagtgggtggagggcgggcaacagcgcttctctggattggggctggggctcagaagtaatgacccagcaccacccccaagggtacttagtaggcgagtgtccggggagaaaccatcagctgtacttagtggcaatccccaagccccagcttcagtcctcaaatctgtccccttccctccatcacacacacatttcaaggagtgtctagaagcttaaaaacaaaaagcggggagaaaaacctcttgactacaaccttgcagataaataccagcctgggagggccacctctgggtggggctaggatgtcgattgtaccaaacgttctccttgggtgggagagggaatcagtgatgcctggagcaaagttttttcccgatgatgtatcaatgccccctcttgcagaggtcaggtggggtagaagggctagggagaaggtctttttgtcctaaccagtctcctagtgtcctctagggcccaatagcccctctcaatttagcaaactcggttatccttagtttacaaaacagaggctctccctcctggtctctatcctcgtgccgaattcgccacccaggcc

SEQ ID NO: 323470 - DNA, 1021 bp, Homo Sapiens
tcttccgcgctcacggcccgggtggcgaattcggcacgaggctctcctggagtctgaagcctgcaggtccggggaggaggttcgggattccctggtgggcctcgacgtcccttggatcagaggtcatcccttcctcctctcctggaaacagacagggagaagttgagcaggtatcaactaggggaggagagagggtctccagtgttccccccatagagaccaggagggagagcctctgttttgtaaactaaggataaccgagtttgctaaattgagaggggctattgggccctagaggacactaggagactggttaggacaaaaagaccttctccctagcccttctaccccacctgacctctgcaagagggggcattgatacatcatcgggaaaaaactttgctccaggcatcactgattccctctcccacccaaggagaacgtttggtacaatccgacatcctagccccacccagaggtggccctcccaggctggtatttatcctgcaaggttgtagtcaagaggtttttctccccgctttttgtttttaagcttctagaccctccttgaaatgtgtgtgtgatggagggaaagggacatatttgaggacttgaactgggggcttggggattgccactaagtaccgctgagggtttcctccccggacattccccttactaaataccccttggggtgggggctgggcccgctaatttgtggcgcggcgggccgcagcgcaacacgagtcctggtttgcgcggcccgcccgctgttgccgcggcggccggcgcggggcctgctgcgtggcccctctgagccgcggggtgcgcgggaccgagctcgagcgggcggcggagggggagggtccgccccctctaccgcgcggcctgggcgcccgctccaggccccggcgcctatatgcggcagcgccaccgcccgcgtacctccttcgccgctggtagcacgtaccctagaaccatgctggccgcgaccacgctaccgccctccgcgggtgcaacc

SEQ ID NO: 323471 - DNA, 1201 bp, Homo Sapiens
  misc_feature (1083)..(1083): n is a, c, g, or t
  misc_feature (1123)..(1123): n is a, c, g, or t
  misc_feature (1146)..(1146): n is a, c, g, or t
  misc_feature (1176)..(1176): n is a, c, g, or t
  misc_feature (1191)..(1191): n is a, c, g, or t
aagtagcgaggcctgggtggcgaattcggacgaggcacggggctctctctgtcccctccctggccccttcttctaagcttgcagctgccacagaaaatcttctaagcttgcagctgccacagaaaacacccgattaaaaactttttatttcagcaaaataaacgtgcctgtgaaagaaccacacggtggcttccgagagaccccactgtgtacctgagccccaggtggccacacctggtgttctggaaaagggagtccagggccagtattcaggccctgctgtactgcaccctggaaactgcaccaaaccccagctccgcccccatccacggctcccagaatggtttctggagtccctgcaacagacctgtgaggagagggcagggcagggcctgcctcctgcgtccccgtgatgacctgggggatgcactgggcagggacagcttcctccatccacacagccctgtgggcaccaacaaggccactgtgacttcacacgacagcagtgttccccagctcagctgagccggggtgcaggggacagcacagggcacagtcctgtgccgcaaggccctcgtgctcctggaagcctctgggaggaggcgcccgctggtgggacgtcgaagtccaggcgctctcggcagcgaccccaggacggcgcacctaagctatgccgtggtgcaggggacgtgctggagggacaggagcaggcgagagagaagccacctgtggtcccagccccaccccagctcacacgaattcccggctgcctttccctgcaggagcccagtgtcatccgcccgccacggagcctcatggggggcagtgggggcctgcagcacgttgttggactggttggtgttgaatcctgagagctgctgggccgggccgtcctcgtccccgtccccgtcctcccgggctgtggcctccagctgctcctcactgccgctgtggctgccagaagccacctctaggctggcctcgctctgctgctgctccaggaagctgaggtggcccagggcactggcctccgatgaggacagcagctcggaggcctcctctaggtccgagtccgaatcgttngacacaactcgggattctaagaaaggggagacagatggcnggtggagacagacaggagagatnggaggagagacaagggggagggacagacanggaagagattggggnagaagacagg

SEQ ID NO: 323472 - DNA, 1200 bp, Homo Sapiens
  misc_feature (53)..(53): n is a, c, g, or t
  misc_feature (80)..(80): n is a, c, g, or t
  misc_feature (91)..(91): n is a, c, g, or t
  misc_feature (96)..(96): n is a, c, g, or t
  misc_feature (108)..(108): n is a, c, g, or t
  misc_feature (110)..(110): n is a, c, g, or t
  misc_feature (133)..(133): n is a, c, g, or t
  misc_feature (152)..(152): n is a, c, g, or t
  misc_feature (154)..(154): n is a, c, g, or t
  misc_feature (160)..(160): n is a, c, g, or t
  misc_feature (172)..(173): n is a, c, g, or t
  misc_feature (176)..(176): n is a, c, g, or t
  misc_feature (180)..(374): n is a, c, g, or t
  misc_feature (376)..(382): n is a, c, g, or t
  misc_feature (386)..(388): n is a, c, g, or t
  misc_feature (393)..(419): n is a, c, g, or t
  misc_feature (421)..(470): n is a, c, g, or t
  misc_feature (472)..(562): n is a, c, g, or t
  misc_feature (573)..(574): n is a, c, g, or t
tcgggcgtccgcgcgctccgctcgcgtccgtcgtggctgcctcttgtttgcgncgtccgctgccgccggccgcggccggnctgttctgcgncgcgncgcggggcgcgncnggcgggcgggcccgcctcggccngccgccggggggcggggcncngcgcgncggccgccccgnnggngccnnnnnnnnnnnnnnnnnnnnnnnnnnnnnnnnnnnnnnnnnnnnnnnnnnnnnnnnnnnnnnnnnnnnnnnnnnnnnnnnnnnnnnnnnnnnnnnnnnnnnnnnnnnnnnnnnnnnnnnnnnnnnnnnnnnnnnnnnnnnnnnnnnnnnnnnnnnnnnnnnnnnnnnnnnnnnnnnnnnnnnnnnnnnnnnnnnngnnnnnnngggnnnggggnnnnnnnnnnnnnnnnnnnnnnnnnnngnnnnnnnnnnnnnnnnnnnnnnnnnnnnnnnnnnnnnnnnnnnnnnnnnngnnnnnnnnnnnnnnnnnnnnnnnnnnnnnnnnnnnnnnnnnnnnnnnnnnnnnnnnnnnnnnnnnnnnnnnnnnnnnnnnnnnnnnnnnnncctccctaggnnttgggcagctggaagcagggggcgtccccagccccgcacgtgctgctcctgccagcagggtcccccagctcccggatgctctcatacacgttttccagggggccgctgtccacatccagggccctgagcgggagggtctggtaggccaggtcacccgccagggccagaatcgctccctggcccttggggtccagcgggtctgtggtgggtcctgggtccctccttttaggcttgcagaccctggagtacaggacgtccacctgagcggccggggtcacctcagtcttcccctgctgtggctcttggggactgcgatgggtccctttgcgcttctggacgcgggcatactcggccaccacagggctggccgccaggctgaccccgggaagggccgccagccccacgttggaataggtggcctcgaggccagcgcaccctgcggtggctgcagctgccggcagagcccggggcagctcctggtgtgggaaggcagagggggctgcctgcggtccggtgatgtccctggacacctccagccagtgtgggcgcaggagatccatgctggcaggccgcagggctgggggtggggtcagggcagagcctcgtgccggattcgccacccaggc

SEQ ID NO: 323473 - DNA, 743 bp, Homo Sapiens
  misc_feature (46)..(112): n is a, c, g, or t
  misc_feature (184)..(192): n is a, c, g, or t
  misc_feature (237)..(245): n is a, c, g, or t
  misc_feature (391)..(443): n is a, c, g, or t
  misc_feature (537)..(545): n is a, c, g, or t
ggcctgggtggcgaattccgcacgagggagagaactagtctcgagnnnnnnnnnnnnnnnnnnnnnnnnnnnnnnnnnnnnnnnnnnnnnnnnnnnnnnnnnnnnnnnnnnnaagaaaaaaaaaaaaaaacctttttttacaaccatgggagtcccccaggagtacccaaaacccccaatgggnnnnnnnnnaaaaagaaccttttaaatcaaaaccatgggggctcctggccgcgnnnnnnnnntcagggccctatccccacccccatcacagggacgttttcggcccaacccccctgcaccccctttttggccaacctgttgcaggttgttttcaaagggggggcgggtggggacttcccttcccggggctggattttttcctcccccnnnnnnnnnnnnnnnnnnnnnnnnnnnnnnnnnnnnnnnnnnnnnnnnnnnnncccatcccaggccaaaaaaaagaacctttcattggggggccactggcaccgtttgatgtccggcacaaaggggacccccccacgcttgtactgnnnnnnnnnaatggaggggggaacctttaagccgcccaaaaaacccccctccctggagttttcctccaaccttttggatccctcatccgctctttaaaatggagttggaatatgcccctttgcaaagggttaagggccgccagttttttaaccctcccccccttttaacccacccaagattgccccaaattttctccaagggggggg

SEQ ID NO: 323474 - DNA, 888 bp, Homo Sapiens
  misc_feature (279)..(332): n is a, c, g, or t
  misc_feature (426)..(434): n is a, c, g, or t
  misc_feature (571)..(579): n is a, c, g, or t
aaggaaaaaaaaaaaaaaacctttatttacaaccatgggagtcccccaggggtacccaaaacacccaatggggacccccccaaaatgaaccttttaaatcaaaaccatggggggtcctggccgcgcgccacccctcaggggcctatccccaccaccattacagggactttttcggccaaacccccctgcacccccttgttggccaacctgttgcagggtgcttctaaagggggggcggttggggacttcccttcccggggctggattttttcctccccnnnnnnnnnnnnnnnnnnnnnnnnnnnnnnnnnnnnnnnnnnnnnnnnnnnnnncccctcccaggccaaaaaaatgaacctgtcattggggggcaactggcaacctctgatgtcgggcacaaaagggaccccccaacgcttgtactgnnnnnnnnnaatggagggggacacctctaacacccccaaaaaacccccatccctgaagtttcccccagccttttggaaccccatcccctcttcataatggggtggattatgccctttggtgaaggttaagggcgcatgtttttgannnnnnnnnttaaaaccacccaagattgcccgactatctcccagggtggaaatataaaaaatgttgtctaaagccaaaacaaccgtggggaggggacccctcttttccagaagggttctgggttggaaacttgtttaaaagaaacccctcctccctaatgctttaaaaggggccaaaaaggcatcttcttcccgggttttctccaaaccggaataaccccccccttaaggaaatttttccgaaataaatttttgaaggaaaaattttggggcaacaaaatttgggggggtcgaaattcctcccatggcccataaaaaa

SEQ ID NO: 323475 - DNA, 1465 bp, Homo Sapiens
  misc_feature (419)..(436): n is a, c, g, or t
  misc_feature (1107)..(1107): n is a, c, g, or t
caggggaaaagcatgtgggcaaagaagccacgagcagttgaagttgatgggctcccattaaggccaaagaaagttttgcccccaccatagggggtccaaggaaagggtcctaaaagaccagccctgagcagcttggtgggaacagcctcttgggctttctgcccagctcctggctgaagctgtgatctgtgtagctgtgactgcagggcttgagaatggcggagggcttaggcagtttggacagggtgaatcgggattagcgtgtaaacccagccacctccctgaaaaacagtctgaatctcccttttccatctgtctgatgcgtatccaatcttttggcttctctgggccacgttggaagaagaattgtgttgggccacatgtaaaatccactagcactaacgatagccgatgagctnnnnnnnnnnnnnnnnnntagcaaaaagaaactcataatgttttaagaaagtttgcgaatttgcgttgggccgcattcaaagccatcctgggccgcatgcgggcctcgggttggacaagcttggtctaatgggaatacgaagacagccctggctcccactgtgagaaccccttcagtccaagcatactggtcctttccaagctcactgttctcaccacacggccccactccggtttcctggaggctcccccagaagcatttgggggacatagtccaggcaggtgcctcctcccaggtggggcaagcacctggcatgatagcggaattttaggtggccatgattcaggttgcatctcacctcatgggaaccagacttgggagcctgatcacaggtgccaaggaggtcatcgtccctgccagagtcctgatcccagacctgcaacctcaggggcccccctgtggccaggagcacatccccaaaatccagccgcactgaccagatggggttgttattgtcccacacggtgctcgtcctcagctcctggccaccaaagaagagcttcacataggcatccgtggcagtgaaccagtccccccacaggccccatgcttggatgaaggtcacctccagctgggccaggcccctctgccgagggcagcagtcctgggtggtgaccgctgagccatgngcacacacactggcatgggtctcgggggctcttctgccgccctggtgggcacggccggctgcagtccctccagcgagccctgtccgtcaggtactgactcagggccctcctcagtgcctcccgccgcgggtcctggctgtccagcagcacgtgcaggggttccagggtgtagtccaccaggccagggctgccgggcagcgagtttacccaggctgagtactgctcgggcccggcctggatcccgaacagcaggtcgttaatggaggtgtgatggccgccaaccacttccgaatggcgctcccggtaggtttggggaaggaggcctcgtgccgaattcgccacccaggcctcgctcctt

SEQ ID NO: 323476 - DNA, 1572 bp, Homo Sapiens
  misc_feature (494)..(736): n is a, c, g, or t
atacagctatcttgaccacatgagttgcctttacgtgtgtgcagcgccaacgttttcacaatgttgctgccagcgttttctccaatttttttgtccggggcgctatactgtcaccctcgtggggcaaatttgtccccctctctgttgggggtcccgccttccctgccggcatttagtttcagggaacggttccccgtgtgtggcggtcttaacctcgccctcagtgtttgcccgctcgacctccaatgctggattacggctgacatccgccggccatatatattgtattttaatagtctccctatgttccccaagctggactcaaccaatattcctgaataactgggactacatgcaagcaccacagcaccctccaaatagctaaaaatacaccttcctgtaacagttctgataaatatcttttacttcgtttatttttcttttttgagatcagtctcccaggctggagtgcacggcatgctctcggctcactnnnnnnnnnnnnnnnnnnnnnnnnnnnnnnnnnnnnnnnnnnnnnnnnnnnnnnnnnnnnnnnnnnnnnnnnnnnnnnnnnnnnnnnnnnnnnnnnnnnnnnnnnnnnnnnnnnnnnnnnnnnnnnnnnnnnnnnnnnnnnnnnnnnnnnnnnnnnnnnnnnnnnnnnnnnnnnnnnnnnnnnnnnnnnnnnnnnnnnnnnnnnnnnnnnnnnnnnnnnnnnnnnnnnnnnnnnnnnnnnnnnacttcgcttaaatgtccaattttagtagtaaaatccccggaaaatgtttttaggagtatgtttaactgaaaagctcatattttctttcatttttgggcaattcttaaggtaagcaaactaatgttgcatgataaagcccccatcaagtatctcatacttaagcaaagacctcaaatcattgtggctttattgcagctttccttcaaaatatcatctgtgactgaggaaatccctatcttcctatcagactaatgaaaccacagggcagcaattagacttttaagtattggggggtttagagctctagatattcgatatgcagactactcatgtttgtttgttttaataaagactggtccaaaggctcattttcacacaagctacagtttttcagttccaggaccaggtaaagatggtcagctccgtgatccataaaatccaagggtgacgactcaggattaggaccatttcttggtgacattgagatggtcgagctggtccgcaatgaatctatgcggggggaacttggaagtggcggccgcctttatggcctcgaaggcctccctcctgcgcaccgcggcgtggccgcgctcctgctcccgggtcatgtagggcatgctcagccagtaatggttctccgcctcgatctccaggcggcggatcatgttctgcttggcgcgcaacgacacgaaccgcggccgccggtgcttcccgatccactgacggccgggaatgcggccgcgccagaggagcgcagtcaggaacatggtgcctgccgcgctgctcaagactctgcgcctcgtgccgaattcgccacccaggcctcgatacttagt

SEQ ID NO: 323477 - DNA, 1033 bp, Homo Sapiens
  misc_feature (230)..(248): n is a, c, g, or t
  misc_feature (284)..(297): n is a, c, g, or t
  misc_feature (636)..(636): n is a, c, g, or t
tgccagcgcgccctcgcgcgtgcgctggccccgcggacgcaccgggaccggggggccccctgccccgcccccggggcagatccccgttttggggttcttccgtgggtgccgcgacttctccccggggccccccggggccccaaatttctttcaaggcgggtgtctgtatttttcggcccacccccgcggggagaaaaaggttactccccaaaggggaaccccttgggttnnnnnnnnnnnnnnnnnnngctctgggcttgggaagggcggcgaaaattaaattnnnnnnnnnnnnnntaaggggttctcctcgggggcccccaggggaagggtggtttttccccagcccttcctggggagggttgttcttcttggaaccaaggacccaatacccctttccttgggcccctgggatttagggtcctgtttcccccactcgaaaaaaagacccagccttttttaggatggtctttctcctccttggtcctgcccagcatttttggcccctagtacccccaccatctttttctcttctttcctcctggcccttctcttggtggaatcaggcccactcttgtagccctgcagcttttcctgcccccccagggagctgggacttgagtttgttgcgttccntgcagccacactcccttagctcctgcagagtgaagcggggtcggttgggatctgtcaggtcaaccaccattttgtttgggcccaggttcacctccccgctggccggagggctctgtctccgcagcccctccacctccttcctgaggtggtccctctccatcttcagctcctccagcgccaggctgccctcattcaccagcgcctccagcatctccaggacgcggacgactttgaactgcagctgcgtcacccgggggtcgctgcccagggccataagctcgcggcccaccaggtaggagatgtcatacacgtcctcggcggtcagctggaaggggcttttgcccagcgccccctggggcccaacctcgtcccctggtgcggaattcgccacccagcc

SEQ ID NO: 323478 - DNA, 1590 bp, Homo Sapiens
  misc_feature (80)..(80): n is a, c, g, or t
  misc_feature (153)..(153): n is a, c, g, or t
  misc_feature (230)..(230): n is a, c, g, or t
  misc_feature (448)..(458): n is a, c, g, or t
  misc_feature (796)..(878): n is a, c, g, or t
  misc_feature (909)..(951): n is a, c, g, or t
  misc_feature (994)..(1047): n is a, c, g, or t
  misc_feature (1192)..(1209): n is a, c, g, or t
  misc_feature (1471)..(1516): n is a, c, g, or t
ggccggcgggcggcaaaaaggtgggaaaactgaggtcgaggcttggccggggaaatgcgtgggatgggggggcgagtagncacgcagcgagcatagggccacggggcgcacgtacggtcggtaacttttgccgaggggacgagccgcgtaagncgcgcgcgtatctatcgcggagggggtccgatcggggtagaatataatacgagggcgacggcgtcagggcagagtgnacgtacaaacggggggtgactacgcgccggcgcggaatgtaccgtaagcggtatggcgcgcgagtataggggcggaggcgcaggataaacgcggggataaaccatcacggtagataaaggcggacaaaaagatccgggtgtcaagtacgcagagtagggagagcgaaaaagtgcacaacagcgaaagctgcagaacatatagacgcgggggtgaatannnnnnnnnnnacacacacggagcggggggtgcagtaaagataataggaaggcggcggaaacagcgcgcaggagcgcacgggggtatgatgcaggccggggccggcgacagaagagatagatcagccgcgtgacacgaggagtagaatggagtgggtgcgagccgtgcgatcgcgagtgggtatgatatacgggcagtaccggcatgcggtggcggtgagcactagaataagtataaggggaggccacatgaagggggcggtgggcaaaatatcggcgggccgcggcgggagtagacgcggaggaactgcgaacgggggtggaagtgggcgtgccagtgggggaacgannnnnnnnnnnnnnnnnnnnnnnnnnnnnnnnnnnnnnnnnnnnnnnnnnnnnnnnnnnnnnnnnnnnnnnnnnnnnnnnnnngcatgaggtaacaacgggcggcgtgagagannnnnnnnnnnnnnnnnnnnnnnnnnnnnnnnnnnnnnnnnnnagctccttacggacgtagcggagggcgggatcgaaaggagcgnnnnnnnnnnnnnnnnnnnnnnnnnnnnnnnnnnnnnnnnnnnnnnnnnnnnnnaggggcgcccgcgttatggcgtgcgatggcgggaggagaagaatgtgtagcgggggggagaggggaaagggagcgcccggggtgagcgaaaggggccggggtcaccgcgggcccgtcgtaggcgaccgcgggtctgcccaaaacnnnnnnnnnnnnnnnnnnagatttgccgaaggcgaaatggaggaagcagcggtaaagagggggcgtgcggcggattgacaggtggtgcgagggggggaagaggcgccccaaggtgcaggcagcggggccaaagggggaggaaggagaagccaggcatgtcggtctccccgcgccacagcacgccgtcgcagtcgaacagcagcgtgtccacgtcggccagcagcgcctgtgcccgctcggcgctcagccgcacgcagcgggcgtcgtcgccaccggcctnnnnnnnnnnnnnnnnnnnnnnnnnnnnnnnnnnnnnnnnnnnnnnctcgtctggaatcgccacccaggcctcgctacttaggaccgtaatggtaggagcgggaggggaaagagatgggg

SEQ ID NO: 323479 - DNA, 983 bp, Homo Sapiens
  misc_feature (48)..(48): n is a, c, g, or t
ccccctctccacccccgtaaaaggcgtggtggcggttccccccctggncggaagtttgggggttgcgtgcccctttgtccccagacgtgtttccctggattgtgaaggagggtcccccatgtccagccattggacaggcaactcccgctttttggctttggggaagggacagcccggtaggcgcaggtgtctcgaacgcgggggacaatcattgctttcttggtgttggcaagatcgagctggatgacagacttcctgaggtactcatagagcccatacatgggcaggaagtcaatgtcagacaggaacatgtagggagtgctgatgtgcttcatggccacgttgcgcagcaggttcacggggtagaactggccctccttgtacacgatgtggtagcccacgttgtggcggctcataagcacctcagagccctgtgcgtagcggaggaactgctgggcctcggcgtctgacaggtagagggccaggctgatgggcccctcccagtgcttgcagatggcctccagcatctggagcctgtccatggacagctgagcgaccagggtgacgtccgtgctgtctgctgcaggctcatactcgtagtgcaggaagtacaggtgggtgcggtggacagtgaagcgctctcgccggaactcatagcacaggtcgtcctcgtccagctcagacagctgcttctggaggttttcactgttgacatcagcctcactggggcagccaaacagttcccgcctcagaagattgccgtcatactccaggaaggtcaggtagaggttgcgaaaaaactccacatgcttgttcttcacccggagcttcttgggggagttccagtgaatgacctttagatcagacacgtctctgtagcactgctcggagcgggtgtggtctgacagctgcacattccagaagcaggggagctggtacacaaggaaggggtttgttcctcgtccgaattcgccacccaggcc

SEQ ID NO: 323480 - DNA, 793 bp, Homo Sapiens
ctttccagactgtaaaagcatcccccttttatttttcacctcagagaggaggggaatgaaatggtgagaggcagtacagagcacggggcgaatgcgatgctgtcagcagcacatgagcgggggacggatgcggtgggatgggaggacacaggggtgagaaaggcacaatcacgtctacaaggaaaacgagacagtctgaggaccgacagggaggtgagatgggacattactgagcaccgaggcacaggaaggcggggatggggaaggtgggggacagggaggaagcttcgaaacactcgagtgggcagcaggaattgggaggaggaggtgggggtggggcacagagcggggcaacggtacaagagcaaggctaaaactcctctaaaatagaaaggcactttcacatgtacatactacagatgtacattgacacaattaggtaacagtcacaagcaggaagctaccggtaccgcaattgatcaaaccgacaggaaaggacaatactgatttaattacgcgggcagcagttacccttcagtacgtaggtaaacagcagtctctcctgttacacagccacttactatactttaaatatctataataaccatcacactacacactgaacttggatgaatgctctaaggggggcattcacaaatgcacggttcatatattttcttttactaaagtttctaagataagcattatggaacccagtacaattatttaaacatacaaaattccctacgtaatttaaagacacaggtatccatctcgattataccacatagac

SEQ ID NO: 323481 - DNA, 1345 bp, Homo Sapiens
  misc_feature (56)..(56): n is a, c, g, or t
  misc_feature (291)..(291): n is a, c, g, or t
  misc_feature (587)..(614): n is a, c, g, or t
  misc_feature (857)..(872): n is a, c, g, or t
acggtagtgtggggtacgggtaacgggagactgggcttttttgttgttcgccgccncgaggtgggaaaaaattatagaatttttaattaaaggggtccttctctttaatttccaataattatgttcccaaagtatttttccttaaaatgaactctttaataaagccataatttacagtataagtagaacaaaatgtcatgacaaaagtcattgagtacaagacttgtaataaaaaggcataaaatatatttatacataaacccctttcaaaaaacaagggaaagcttgagnccctcaatatagggcgacacacggagcgggtgaccgtgcaggtacaggtactgtactgatttaaagtcaagcactagagatagtggattaatactcttttgccgtacactatatacagatgtatagtacaagtaacaatggcaaacagaatgtccagattaactttaacacaaaaaccccgaacttcaaaatgaaggtgtgtggaggaaaggtgctgctgggtctccctacaactgttcatttctttgtggggcagggggtagttcctgaatggctgtggtccaatgactaatgtnnnnnnnnnnnnnnnnnnnnnnnnnnnnggaactgtcatttccacgaaagcacagcggcagtgattctagcaggcctcagggccctgggcctggggaggctacatgagggggagcctcagtcacaggatcaacctggggcccgaaggagcagggttccctgcctctccctctgcaacagatcatcccatccaacacaacccccaaaatgttgatgatgacgcaacatggtcaaccctcaagacctttaagacaaaacagagcagcataggnnnnnnnnnnnnnnnncgcaccaatttctgcatgtgtcaatggtagggcaccattttaaaaagtctgtctaaaacagtctgtcttcacttggagggacgtagtgcaaagcataattcctctgttagtgaagaaaccatgaacgcactcctagctcaactcctaagtttagtcagaacaattaaaacttcctgtctcccccttccaagtttaaagcagcatatccataaactggggatgggggaaatcaactgttctataaatatcagtaaggattcctgttcaggtaagctatacacagtttctcttagtttatggatttcagatccctaggaagtcatatattatgtatggcggtctctcaaatacaggcagcatcttcaatagccaagggtggtcatgtttttaataaatagttcaggcttttcttatctcagtcagtacccagctcatgcctcgtgccgaattcgccacccaggcctcgctacctt

SEQ ID NO: 323482 - DNA, 919 bp, Homo Sapiens
cccaaatctccgtgggggtgcccacccaaatgccgcttaggtttgtcccattctccctgatattgaaggtgggaaaagattgggaaccaacgcttgttatccctatcttccccatggggttaggaaaggaacccaagggattcgggtgggggccaatttgataaaagattttgccttttaaggaagtgaaaggtgttttagtcctgccttcgtcagcccccatccaaggggggagggttaagtgggggtggtggaggtgaatttcccatgtcggttccatgcatctgaggagtcctttgctccatcattagttcggatattggagaatctcacttgactgtctggagcagagatcacaagtgtttgggtgggtgaatttgcgtggcatgccaacgtcatcactaacagacacacgatggtgagaaggagtcaagggggcgtttctgtggcttttcactcttttgttgcttctcattggtcttgtgcttaggaagtatttgttggttggtgacctaaagatggtgcctgtccttgttgtccagcatttcttgacttgagatttttgtgccctccaatcttctgttagtgcctcctattagccaactccagaaagcaagcgagtctagggaaatttaattccctcaaacaactgcaatttgttctttgtgtggcttcaacaaaatcccaggatgccactttagcagctgtcgcttcttcgcatagaccacctgaatgaagcagaatacttcctcttgttctgtgctctgttcatattgcattcttgccaaactctatccaccacatgatttgctaattttctgggtattttcccacccatggtggctagtactatcggagttgaagccatcagatactgaagaaaatttgacccacttcctcgtgccgaattcgccaccca

SEQ ID NO: 323483 - DNA, 564 bp, Homo Sapiens
  misc_feature (94)..(94): n is a, c, g, or t
  misc_feature (518)..(518): n is a, c, g, or t
  misc_feature (550)..(550): n is a, c, g, or t
aaattttatgaattttaaagaattttgtaactttaaatcttaggaggaagtattctgcttcatcaggtggtctatgcgaagaagcgacactgcntaaagtggcatcctgggattttgttgaagccacacaaagaacaaattgcagttgtttgaggtagattatttcccgatcgattgatgcctatgtgtgatagtttgttacgccactgaatgcttatgcccactttatttgaaacagcttacatgaacatatgtcaggattttttttcaaaagaaaattcaggaaaaatatttcaggaatttgaagctgattatagaagtacatgtaaatataagctttcagttcattcactgttaccagaggcagactctggaaagttttgtttcctagtagctaaataaaagacaattttatatggagctatggtatatatagtatctataagctatacagccatataaatctcttgagaaaagcattccttcctcaatggcactacctgagaaattttatcccnagggttctttctttttttaaaaatgaagagcngggcttgcctttgt

SEQ ID NO: 323484 - DNA, 736 bp, Homo Sapiens
gggaacttgtaatacttccaggctatattggcttcatcttcttccaagtttactgctgtaccaacatatactgtaggttctacagcttcctgatattgaggtgggaaagactgggacaaactgtctatcctatcttccattggtttagaaggaaccaagggatctggtgttggcatttgataaaaatgttgactctgaggagttgaaggtgttttagtcactccttcatcaaccacatcacaagggtgaggactaagtgggggtggttgaggtgaatttgccatttcggtgccatgcatctgaggagtctttgctacatcattagttcggatatttgaaaatctcacttgactgtctggagcagagatcacaagtctttggctggctgaatctgcgtccatgccaacatcatcactaacagacacacggatggtgaaaaggagtcaaggggcgtttctgtggcttttcactcttttcttgcttctcattggtcttgtgcttaggaagtatttgttgttgctgacctaaagatggtgcctgtccttgttgtccagcatttcttgacttgagatttttgtgcctcaaacaactgcaatttgttctttgtgtggcttcaacaaaatcccaggatgccactttaggcatgtcgcttcttcgcatagaccacctgatgaagcagaatacttcctcttgttctgtgctctgttcaatattgcattcttgccaaactctatcc

SEQ ID NO: 323485 - DNA, 914 bp, Homo Sapiens
agggcccaggtaaacttcgggggtaacttattttttgtaagaaagggttattggggaccaagaaggggcccctttttccccccctttcaagcagagtggtaagactccagcgtggggccctgtgcaaggggaccagcccagaaggccatgagccacagaaacttcacagcaccctgtgtgcccacaccctgaaaatgcaccctttgctccaagcagccagcgccctatcaacctggcatttaccaaacatctcaacagcagaccagaactagaaaacacagcttctgtgtagtacacacttatggtctgagacccaactaaggctccctacatccttcaaaactcagactccacaggctgaatgtccagcttcttcctccaagacagaattgccctcagcccacgaattctctctgggactatttacagaatcaaaggggaaacccacggaactgaaaacctctttacacaggtgggttcaagaagaaagccaccaacagaaggcaactcaggagggagaggccgaggctggcagagcccctgggcctatttccaagcagccacccctcccaacaagagcagaggtgcctctcacctcaaccctcagccctttaacttctggctgggccactgattctcctccccagtctgtggcccatctggaaactggctatggtactttggggagataggaaggacaggacgacaagagacaggacaccagtgagtggctgggccaggcggccccatttcctaaaaccaagatggctgccgctgctgcccaagccctcaaaggcagacagtcctcatgcgcagcaccagcacacacacaggtaacaagaccaggggaggggaccctaagtgtcctctccacagggaggtggctatgcctcgtgccgaattcgccacccagc

SEQ ID NO: 323486 - DNA, 500 bp, Homo Sapiens
  misc_feature (14)..(14): n is a, c, g, or t
  misc_feature (407)..(407): n is a, c, g, or t
aatgcccaggggtncggccaggagagtcgggggcagggcagcctttcaaattccacactattgaatccacacgatggaaagaagagaaagatggggaaattctcccagagatcatgagatgcattccaggcaagtgttctcatgtgagaggattagggaggccaaaaactaaaattgctatcagcccccgccgcttgtcttggtacgcgaggaaactttccgaggactttacaagcatagttgcaaaatgctagtaggtttgggactcttcaactttctcttctagggccaagtagactcggtgtaacttattttgtaagaaatgggtatgggtgacaagaggggccaccttccacccctgcagcagagtggtaagactccagcgtgggccctgtgcaagggaccanccagagccatgagccacagaaactcacagcacctggtggccacaccctgaaatgcaccctttgctccaagcagccagtgccctatcaaccgtg

SEQ ID NO: 323487 - DNA, 1319 bp, Homo Sapiens
caagtttcattatagacatttattttagttttattttcaaagtcattgacctcttgtatcagatttaaggcaaagaagaagatacatgtcccaggactataggccaggctgttgactgcactgggatttagatggtgtaatctcccttagttctaccagggagacctcagcccaggtcttgttgccggggcacagttgagcactggattcaggtagaggagggctcccaggtcagtctgagagttaatgaagagattaaaaagtctggcagaggacaggactcttacaggtgactggcttggaggggaacctaccagtccttcttccaacttgctgctgaaatcccagtgttcttgaagacagggttatgatcctcttcacccaggtctggcgggggtggggctcagaaggtggccaacccaccctctgagcccaaatattgttcccagaatgctcaccttgacctcaccctgtggctcgcctagacccagggttggctgtgcaaaatcatgcttagggaagggttgcagagaaacctttgcaccagtttcctgggtcttcatcccagccagtcaatgtcatcgtcatcatcatcatctccaaaaaggggcgttgggggcgggcgtcccttcatgctcacctcgtcttcatcctcctcctcaggctgtgctttgggcctcagagctttcagagttgcccctttaaacagttcatcctcttcatccccagagagactggaacgctgggaatgatggctgggtctgagggctgctcctgcaactgtggaacctgcctctgtgcttgacagctccttgtggggaccggtggagctagtgacatcatctttcttgagctgtggaggctgaggctctcctgggctttcaggccctaaggccagtgggtccccctcctcggggtctgaagtcagggacagtcttgtggagctttcttgtagtgggccatctggtgctacttccctgacacagacctttcctgatgggttgtcgggcttagctgccattgggctggcagcaagtgactcctcacactcagagtccatggatacagggcctaggggctcaggtggaattgaagtcgggggccctagaactctgtgggatgggatgcaagacagttcgggtggaagggaaccatcttttatctctgagagtgcctcagcttctgagtcccctttccttctgtgtccatcctgggaagtggtgagggcctgaggaggcaacggcctcgtgccgaattcgccacccaggctgcgtgaggggaattgattttgtaccggcgtgtttggggtcgagcggggg

SEQ ID NO: 323488 - DNA, 507 bp, Homo Sapiens
  misc_feature (467)..(467): n is a, c, g, or t
cttcaacctccctccctcaagcctgtgcctttgggccctcaaaacctttccaaaattgcccccctttaaaacagttcaaccctccttcaatcccccagaaaaaactggaaacgctgggaaatgatggctgggtctgagggctgctcctgcaaactgtggaacctgccctctgtgcttgaacagctccttgtggggaccagtggagctagtgacatcatctttcttgagctgtggaggctgaggctctcctgggcttttcagccctaaggccagtgggttcccctcctcggggtctgaagtcagggacagtcttgtggagctttcttgtagtgggccatctggtgctacttccctgacacagacctttcctgatgggttgtcgggcttagctgccattgggctggcagcaagtgactcctcacactcagagtccatggatacagggcctaggggctcaggtggaattnaagtcgggggccctagaactctgtgggatgggatgcaaga

SEQ ID NO: 323489 - DNA, 1277 bp, Homo Sapiens
gcatattttataatataaattttttttcacctgcaaactgtagcaaaacatgatcagctttattatgcagacaggtatccctctacattttaaaagaatttaggcatgtataaatagaagagctctttagaaaggaaaaattcaagaatgaataaaaccttccaattttgactctgttactttccagtagcaatggttaaaatgattttaggtcattcattccaagatatatgacagcaccttaaaagtggctgatctatttccccagtaacatttctcacataacaatgtgttaaagttacaaatactgatatgcacaaatagctaatttctaagaaaaatatgtacagtactgcagcataatgaatgtggtatctgcaataacttaatattagccaattttaatatacatgataccgctacccttttctgccaattcacaggttagaaggtgtttactggagccctcggttttgcacatattacctggtgtttaatacacaatgcaggctttttaaagacttctcttgtgtttaaagctaagatcagtgaaacaagacaacagtgcaagaggtggagagatgtaatgtgaccacataaaagttcgttccagtaaattgtctatataaggctataagaaaggattggttgatgagcttcctgttggaaattgtcctgttggtgcaccagtcataaaaggattactagatactccagcagctgcaacttgaccaaaaggggttactactggctttgtttgtccaaatgctgcaaaacctgcaccattgggctgttgagaaaaagctgtctgttgagggaaagctgcttgggctggaaaggcaggctgctgaaagctgccactaaagctggtgggaagactgtagggagcaggagtgccgaatcccgtgggcatgctcatggatgcagtgccaaaggttgccgctgttgctcctctggcattggtctgaaatgggtttgtagaagatgccacagaaggaccagcagcagcaacaaatggatttgtggaaggcgtagctccaaatggagcaggcacacttgatgaagcaggctgtgtctgtgcagaagcaaccactggcactgttccaaaaacattgctgctagcattacttgtggaagtatacgcattactggaggtggctgcagaactgaaaacgctgtctagttctgccagagctgcatacttgtccctcgtgccgaattcgccacccagcctcgcacactaggaaggtggcgctgttcatcggcacgcagaggga

SEQ ID NO: 323490 - DNA, 967 bp, Homo Sapiens
  misc_feature (208)..(208): n is a, c, g, or t
  misc_feature (233)..(233): n is a, c, g, or t
agttcccgtggcaaccccaacccaggttccgtggaaaggtcaagtcccattccttcccgggtgccaccccaggggcccctaatggggaacagagctggggaggtgagaaggggacaactgacccccatggaggcccctaaggggttgacacagcccaacccatgtgccctgggagcagggggaacaggtaggctggaggccatacagnccaggccctccccacttcctcccantaacaaacaaacatcgggaagagctaagttaaaagttgtgtaccttgtggccggagggggaggggaagcctttccctaggtgctgggggagggcccaagcactctcactagtcagcacatccatcagctgaagacacaaaacccagattataaataatttcatttttaattctctgtacaaaacttctcaatctatgaaaataaagtttgcaaaaggcaaagtagcacaggagcctcaggtcaggaggctaagcacgctgacctacactatgtacacgtctctctcccacgacggagagagaggcctctggggcagagctgtgcttgcagtccgggaaagccaagttggcttccgtcagcacagggaaatgtacccctctcttccctgtacacaggaggaaaaaggccactaaggtgcctgcagagcaaggaggggggccccccaaaatggctcggcccctgcagtgccccgatcggccaccagaggtcagcaccatcatggccgccggtcttagggtcaagatcgcgcccctcgggccttccaccgcgaaggcacacagcagccgcaggtcgaactgtggaggccagagtctcttgcactgccttcggccttcaaagcttcgacgcaggacagaagctgcacgggaccaaagtggctacctcgtgccgaattcgccacgcaggcctcggtagatggggaggtagggagagagaaggggcggagggggaggaat

SEQ ID NO: 323491 - DNA, 797 bp, Homo Sapiens
  misc_feature (28)..(28): n is a, c, g, or t
gccaggttcgttgtgttcctctctcggnggtcttctgtcacacacagatgaactttaataaattacaaatgcacctgaaaatgccttcttgatttcctttcagtttaggcctcaaatgggctctcctcaaggctggacctcaaaggcccagtttgggccttcgcaaatgtctctaacccttgacttagagtttgaagattcattccattctggatgtgaatgcaggtaacacccagtttgctgacgtctacaatattccgcctctcatcatcaaagaagatcatctgggagaaaggaattccagtcttctgctgcaacctctcaaagtgtgtgatcttgctgcctggatagatttcccgatgaacaaagtacctgaagaggtcaaagagctccagtagctggttggccccttctatctcacttgtccttgaagcagccgcaccgggcaccccaaggctctgcaatcgttttaggacctcaggcacctctgggtacagtcggacgtcttggccccgcctatctcgtacagttccatcactgctcttatggaacggagggtctacgtgcgtgtcgacccagaaaggccagagagtgtaatccaaatcaaagactgccagcttcggtagccgcgccatgacccgcaccgcaggctgcgcgcagcagaggtggggcttcacccggggccttagagagtgcggaacctccggcagctaagcctcgtgctggattcgccacccaggcctgggttcgggggtggggtaggcgaggagtgtgcaaggtggggtggcgcggggggg

SEQ ID NO: 323492 - DNA, 940 bp, Homo Sapiens
  misc_feature (23)..(23): n is a, c, g, or t
  misc_feature (65)..(65): n is a, c, g, or t
  misc_feature (79)..(79): n is a, c, g, or t
  misc_feature (98)..(98): n is a, c, g, or t
  misc_feature (107)..(107): n is a, c, g, or t
  misc_feature (114)..(114): n is a, c, g, or t
  misc_feature (116)..(116): n is a, c, g, or t
  misc_feature (120)..(120): n is a, c, g, or t
  misc_feature (125)..(127): n is a, c, g, or t
  misc_feature (134)..(144): n is a, c, g, or t
atatacccgcaaccacgacgcgngacagcgcgcccaacgaccgcaacggggggcaaacccacccnaacccacaacccanaaacacaacaacaagccanacgaaccancaaccgnanaaanaaaannncctccannnnnnnnnnnaaacccgggggcttttaagcccacctctcactgctcctgagggtccgtgtgttacggacgtttcgggtgagtttattttaaaaacacgcgcgcaggagacttggaaggagggtgagtcatataccaccgactttgggttcaatgttgatgagctcacatctgaatgcctgaaaccgtggggctgggaggcagtagagaagtgagatggagctgcacagggaccccctggagacctgggattccacccgccagccccgtggggactcgggggccaggcgaggaaaccaccccggggacgaatttgctgccaccacatgtcagacgctttgccggcaggctccctcggatggactcgcagccaggatctgctttgggaaggagggagggagggacccctgggaggggggcttatcaacgcagcaggcccctcaagggcagcccgggcgaaggggggcactggggttctcaggcagacgtgcattcgccaagccccacttggagacaacatgcggtcaggccagggtcccgggggtcttgggggctacctcctggtcccggcccggggcagcaggacgggggcgcaggctatgcctgcgaaggactccgggaagtgcaggtcccgctcccactcgtcggtgtccgtgttgtacacctgtacgatgcccgtgacgttgttgagacgccagttgtagcccccgacgatgtagatcttcctctccagcaggcagcagccggcctctgactggccggcccgcatgggcctcgtgccgaattcgccacccaggcctcgctacaa

SEQ ID NO: 323493 - DNA, 1230 bp, Homo Sapiens
  misc_feature (252)..(252): n is a, c, g, or t
  misc_feature (273)..(273): n is a, c, g, or t
  misc_feature (295)..(295): n is a, c, g, or t
  misc_feature (390)..(390): n is a, c, g, or t
aagtggggcgggtggagaggaataagggggtgcgggagcgacgggttggaagcggaaagcgccggcggaggtaggcggtgacttgcaggcgcgggtgcgcggataagggacatacacgagcgttattcgaacgcttggcaatagcggcggcgcgacagccacgacgagcactcctccgcgctgtgttgtcggcatgctggtgcgttacgatctattttggggtatgaatgtcgattacgttgggtacgtgtngtgcccgtcatagctcgcgcntgtgcggacccgaaggataatngactcggaacgcatacgtaaagggcgcgcttaggcgtggcgggtcgtgaatgcgcactatcggggctcggggcgcgcccgtctggcggggcggcncctgtcggcgtggaatagaggcgcaaacatattcaccacagcgggcctgggttagctcgagttagcactagattcatcgtggccgtatatgcgcactaaaaatgctctacattaggtctgggaggccacataatgtaggggtgggcagcgcggagggagaggttgcgcgagactcgctcctcgcgagcgtgatatgatattagcatagggttcggccgcgggcgcacggtcaccggctgatcgggtgtgtgaggggcggtggggcaccaacaggcgggggtgtggcagggggtaatcgggcgaggtgaccttctgctacggtggcgtacgaaggcccccgccgggcgcagctgcgacaaacggcgttgcggcgtcggacgctcgccggtatgctggtcgggttttggccccgggagccagcgttgacaagggtgtttgtccgatcggaatgttgggcttataataagtgggtgacgtccgtgggacggattggtgtgcgatgccgtcggccacccgaagcgcggagagggtgacgggtccgggcacagcaggtgcgactcacggcggcccccgccagccctcgacgaccgcacccagcgccgcgcccaacgccagggtcaggccggcccgcagcgcccgcatggccggggagcgacctagcggcgggcgacccgcgaggctcttaaaggagccgcgtcgcgggatccaacgagggcacagggctgctggggccgcggacgatagcgtgacctcccttccactcacaaacactgccaagggcttgggcctcggaacccagaagggagcctcgtgccgaaatcgccacccaggcctcgctcc

SEQ ID NO: 323494 - DNA, 882 bp, Homo Sapiens
ttttccaagggtgtaaacaaatgcctttatggggggtagggttgggtgtctggacaggccttccagggtaataaattaacaggtactagcaacaggcaggggccagatggggagttggggacaaatgaccctggtctcaggctttgggagctcttgggatatgttaggggttcagggggacagacgttagccaagacagaggaagcagcagcaggtacgggatttcccccttcccccgtggctcagtcttgccccaaagccaggccccaccaggccagggaagggggacaggtggcaacgtagcttctccggggccagggcaggttaggacacggcctctcagagcctgggcctgggccccagcagggctggtcctggagaacaggtgagctggctccacagagctcagcagccacacggctgaggggccacggcctgggcactccgaggctgccgaagctggcggagggacgcatccccgtactgaatgccagagcccatcctctccgggtctagctcgcctgagtcaatcttgttgaggatagtgcgggcacacttgaggaacgcctcctccacgttctcgcctgtgagagcgctggtctccaggaacatcagctcattctcctgggcaaagcgggaggcctccaggaaagtgacctcccgctcagggtccaggtccttcttgttgccacagaggatgaccacgatgttggggctggccagggtgcgggcatccgtcagccaggcagccagtgagttgtatgtctcccggctggtgatgtcgtacaccagcagggctccagccgcccctcggtaataactccgcgtcactgaccgaaaccgctcctggccagcccctcgtgccgaattcgccacccaggc

SEQ ID NO: 323495 - DNA, 1179 bp, Homo Sapiens
  misc_feature (174)..(174): n is a, c, g, or t
  misc_feature (919)..(919): n is a, c, g, or t
tttgtcgccaaggggcgccagaggggggtgtgaatccgggcggcagggaaattaagggtttcattcctgcacgcctttttgcggagcggagttcccctttgcggggcaaaaaagggtcttataggaaattatccccccatttccttgccgggagggtgtgcccggggcggcggngaagaagacttggaatatcgggagggtgggctgtggacttccctgggggtaagattcccagggactgacgcttccagagcggcccattctgggattttggtcaggaaacgggcgggattgtccccccgggcggtttttttaattggggggggaatccaaaccccctaggtcatggcccaggggtttccttaggagaacaggtaatggcccatgtgccctttaccttacggggcccggcgcgcccaaacgaaatggtgatagaaaaggttctggaaggccgaagggcggccgaccaagggggggtggtggggagcgaaagtggtggggggcgaaaaccactcaccctcgcactgagtggacctgtaccacatcaaacagtctcctctcctccacgcctccggggtgtgggaagtctcacctcactgatttcacgtagaaaagaaggcggaggcccagcagccgccgcgcgccagctccccaacgtgcaaatccatttcagtttgaccgtgaacccccttccagttcgtgtcctcctccgcccccgcccctagctcccgctgctgcgcttccaacggggttctcgggtcatttcctagcgccggtcacactggctggcctcctcccctcaacatctcctcctccggctgcagagggggcaaggggaaaagagggaggaaaaaaaagccccaaacgggaattcgccctgccgtggagtctctcagtcccggcgttcccccaaaacatnctgccatcggccaaattcgtcaccccggagccttctgtcttcatcacgcgtttaaaaaaagggggggaggggtgcgctgggttctcccctcctttcttgaccaagaagcaaaataaaacaaaaccaaggtggtgatgcaggaagggggagactccttcaagtctctagaaaactaactcgccttcttgctgggggtgcagaccctcgtgccgaattcgccacccaggcctcgctacctaggaccgaatgggaggcaccgc

SEQ ID NO: 323496 - DNA, 1004 bp, Homo Sapiens
  misc_feature (47)..(47): n is a, c, g, or t
  misc_feature (62)..(62): n is a, c, g, or t
  misc_feature (139)..(139): n is a, c, g, or t
  misc_feature (252)..(252): n is a, c, g, or t
ggctctttttggccagggaacaggtgggaggctgtggatgaaatttnggggctgcatttttntgctcagccatctaccccttcctttgtgccccaggggatggggtgttccctccaacctcgtgtcctttttctgtggncctctccagaggcgtcccttgctaaacccgtgtttagctccagggaggctgagcatcatagtttctgggcaaccactgagggggtgccaggccgcgcccagaggctgcgatgnagcccctccagtttcttagttgtcaatttctgaggttcagaaaatctcttgctttgggtcagtagcaatgcattgtcgacagcagagtctcgctccaggggctgggccttcgtggaagaggcggtcgtcttctgtggcacttcaggtacaatctgagggggcggttctgtcacctcggtaggcacgtcttgctcagcaccaggctccacttgaaggtcatccagggaatgggatcggggccaagtgtccacagtctgggggccctccagggtctcacagctccggcagatggaaactgggaggcttcttcggtttttattcaaaccagtcacaccaggtgggtcacagctcttggacgtgtctggggcaaggccaccacccagcctgccctcctcctgtccctgcttcagtgcatcccctgatttcattaaaggcaatgttgggtaattgcccaactggtttctgctaaaagacttcaagctgggctcggtggatgacttggcagataggaggctagctttccgagtcttgccgttttccaggttctcactgctttcgtagcatcctgagtctcggggtgagcatccactcaggccctggctgtcaacgagcagcttctcctgggatcctgactggtcgctgttactgtcatactcttgtaacagctccactgctgtcaagagaacagctctgtgttccgggtccctgatatttaactcatccaagtcctcgtgccgaagacgccacccagg

SEQ ID NO: 323497 - DNA, 994 bp, Homo Sapiens
  misc_feature (61)..(194): n is a, c, g, or t
ttccggaatcccggattttttgaaaccgggatttcagggcaggcccccccatgccccaggnnnnnnnnnnnnnnnnnnnnnnnnnnnnnnnnnnnnnnnnnnnnnnnnnnnnnnnnnnnnnnnnnnnnnnnnnnnnnnnnnnnnnnnnnnnnnnnnnnnnnnnnnnnnnnnnnnnnnnnnnnnnnnnnnnnnnnttttcccacactttgatgagcatcagaatggcctgaggagcttggtaagaactcagactccctccctttcttgtccatgggcagaagtggccattcaagaggtactgacacaggggtccaggcggggggcagagggctgagtctctggaggagggaggtcagatgacttgctgcaaagagagtatcagcagaggttcagcagacccacctttgagagggcacttcctactttctgttgtgtttggaatgcaaagatctggctgaaacggtggccacggagaaggggtgatagatttgagaggctggagggatgaggaagtgaggaactctacatactgagctctcaagcctaggagtgaaaacgggtgagaagtttgggcttgttttaggctatgccgagtttaagttcacagtcgagtggatcatagctggcgggtaaggctgaaggtgagatcaggatgagggtttggaagcccttgcctagaaggaggcagttttttgagacagcataggagagcgcaaacctccagggtcacagggctgcagtcttctcctttcggagaccccattgcagagaagagcgaaagcaggggcggggtgggggtgggagtggtctcttccggttcttgaagatagcgtcccttaggcaggaggggtgggtcactcagtctccaggctcgggaggcccccagcaaatcggacgctgtgggctaggccgccaccgcgagcccactcgcccgatacgcgccttggggtccgggtcggccctcgtgccgaattcgccacccaggcctcgctac

SEQ ID NO: 323498 - DNA, 974 bp, Homo Sapiens
  misc_feature (116)..(116): n is a, c, g, or t
  misc_feature (176)..(176): n is a, c, g, or t
tccccccattccttttccccggccccattaaaggataaaaaaaaggtagcccccaatgcctgccttaggaagtttacccagtaatttcttttcatattgattacatattaaccagncctggtgagagtccctttttccccatttttttagatgagggtccaatgtctaaaactctntaaggaaaacatatggtcacagaagatagactttatcatgacttccagcaatatcttctttctctcaacttcattgctgtttacttaggaagacagaaaagcctattttcattctgctttatttaagattctatggatcacttgagattcaacccccaagaatatgctgacaggagtgaggttctcagatgtctactataaaggtgtgaggagaagctgacactttacattgcagttttatagtcacctgtcttggtttgtcagtatatcacaaatatccccattcctattaaaatgtaacacaatcctgactgtctgggcaccattttcttgaagacgacatgctccagaagtgtttttcttatgacatttcatatgctcttctcagttctacgtcctcacaatcagaggttttcccactatccttgttccacatgatatagatgtacatgtttgctgtagaagaatccatatttccattgacaacaccctgtgaaatcattaagaattattaaaaatctcttttataagttggtcatctgtcaatctgcatgtatgagttgtccaaacactaagcatcagctgagagcctatagaaatggttgtgtaggttgctgggaatctctcttttttagttgactgtggtgcttcctctttatttctctttatgttcctgtatttatatatatttatttcctaattatcttcttgtcaatgttaaacacagtacacaagaacctcctctctccgctgcccgggtcaaccagcggaccctcgtgccgaattcgccacccagcc

SEQ ID NO: 323499 - DNA, 974 bp, Homo Sapiens
  misc_feature (819)..(828): n is a, c, g, or t
ggcctgggtggcgaattcggacgagggacagcttgcgcctgctcgcaccgagtgggggctgcccagcctcgtgagagcgattttgggaaccagtaggacattgacatacatccgagaacattctgtggtggatccagtggaaaagaaaatggaactttgttctaccaatatcacactcacaaatttggtgtcagttaatgagaggttggtgtacacacctcatccagagaacccagaaatgaccgtgctcacacaagaagccatcatcactgtgaaggggattagccttggtagttatttggaaagtttaatggccaatacgatatcatccaatgcaaagaaggggtgggctgctatcgagtggataattgaacactctgaaagcgctgtgagctaaggaggcctgtgcctgtgcttgtcataaatggtgatgcttcccagaagaaaggaaagaaggaggtgaggagaggacgagcaaggacgggacggaagagcacgtctggctgcgagggcacacagggccggggaggaggattaggctggactgatcgcgggtcgcaggtgaccccgggaccagatgtccctcccctcatgagcgtgcaacagggagcagccccagccagaccccaccgccgtcgtctgcgtggatggagggctcgaggccctcgcccgtgtcccttaaggggcgggcccatcgtcctgcctgccgcgggggcccagccccttctctccctggaggggacccgtgccgtcctccgtccgcccgcccaaggttgtcctccacctaaggcgccctcccaaactgttggggtggggcgnnnnnnnnnnaagtcttttcgaaccccgtccccctccgggccgtgggaatccccatagtacgtcaccccggggcccggcgccgtactccccgtgcttataatttctggcttttaggcccccatgaactcccctatattatggaagccccccgcccc

SEQ ID NO: 323500 - DNA, 1021 bp, Homo Sapiens
aacccgacttgcgtggaagaaacgggtgtcccatcccaggtcttaagcccaagttctcggaatttggaaggccttcctcccattttaagtacctgggaccttcccttggggcattccattgtgaaccattcgtcacttcatggggtcggattttctttggggccactaggttttggagctggttggggttttttctcccagggaacatgtggcaaaatttagaggctgtgaagtagtaggcttgggttgggttgacatttgatgtggcctgagctgaacttgcagcttgatactgcatataatactgatgagcatacatctgttgccaccatagcatctgcagtgggctaaacgcggggatacactgggaatccaggtggagcagcttgcccaggaaattggttgtctacatttccttgcattacatatggaaactggtgactctgtgcttggtcagtttgtgcttgtggaagggtacgctgcctcaatccttctgaggaagaacccacagctaaagacaaggtttcttgaccagatgatggagttgttgatcctgaatgatctgaactagaattgctgctggatgccaatgcttcatgactttctctattggtgctggattttggagaactgggaggagtccgagaagtacatactagatgaaccatatgatactcatcttgttttctgagaatgtctttcagctgcagatgatcgggaagcagtctgcccgaatacaccaatctctgatccttcgtcaatggtttgctagggtaaacgttagatagatgcgtttttagtttccccacggtccagttcaagaagcagctaatagtctggtcactgtatttctgattcggtgctttaatgatgagggtcacaggaatctccatcccactttggtccatggtgcccccaaagtcagacagagtccagaggagcggcagttaagcccaaaagagccgagatggtcaccgccggcgcgactgggatgcctcgtgccgaattcgccacccaggcc

SEQ ID NO: 323501 - DNA, 1601 bp, Homo Sapiens
  misc_feature (95)..(95): n is a, c, g, or t
  misc_feature (247)..(290): n is a, c, g, or t
  misc_feature (383)..(559): n is a, c, g, or t
  misc_feature (1099)..(1099): n is a, c, g, or t
tagcgcgcggtcggcgatcgctacgtgtctatcgcggctaattgggatggatgcaggtgctatgggggttgaaggtgtggtggggagccgcactnagcagcagaccctccgaccccagcctctgacatacgagctcggtggcgtctaccgcactcacctcacgggacaagccacgctgtggcgcgtggggctccacatgctttgggcggttctggggggcgtcatgagaatgtgtgagtcaacggannnnnnnnnnnnnnnnnnnnnnnnnnnnnnnnnnnnnnnnnnnntgcgcgggccgaggtccgagtcgtttgcatgcggcacgggagtctgtgggggtgggtagggggagtggagctggagggtttagtaaagcgttnnnnnnnnnnnnnnnnnnnnnnnnnnnnnnnnnnnnnnnnnnnnnnnnnnnnnnnnnnnnnnnnnnnnnnnnnnnnnnnnnnnnnnnnnnnnnnnnnnnnnnnnnnnnnnnnnnnnnnnnnnnnnnnnnnnnnnnnnnnnnnnnnnnnnnnnnnnnnnnnnnnnnnnnnnnnnnnnntatcagcactcagggaggatgaggagtggctacacctcctgccaggttgaaggcatggctggggcctcctactgggaggctagaagcatctccatcgattttagcaggttcctccatctcagcctggtctgcagagggccctggaggaggaaggcctctggtgctcacttcaaaggcatcgagaagaacttgttcccagacttgcagcggacttgctcagtgtgcacgcgcagcagcacctcagcatcttcaaacccatccacgattgcctgtagttcctgcaggcactgcccctccagctggagacgtgcatcacccacacaccaggccaggctgaggtggaaagaaggatcctggtagaaagtggtgaggttgaattcctccatgactctgtccacctctgaaaccaggtccaggaactgggcatgccctgaagtgacctcaagcccaataaaggtcctggttttctcttgattggtgtaaatctttacctggttggcagtaaagaagaatctgtggaaggaggtcatacgggcttcnagagcctgcacgaaggggaggatccagtggtggcgcagaaccacactctgggacaggctgaggtggaacaccttcatccttaccagccgggggacatatgtctgggcatggggcagcaacacatcaagcagatccaggaactcctccttggcttcatatggtacatagacgtgggtggcccagttgcctcgctcgtgggggaaggtgcgcacccgtcccccgtgttttgtgctgtcatcttcaggcccctcctcggtgcccgggaacatgttcagcacactgtcaggtactggaaatctctgcctgggaagggggctctggccacgacggtggctcccatcccccggcctggtccgcatcccgtcctcggactcatcctcggagccgctgctgctgtagcccaccaggggcgccgcgctcatggggcctcatccaagaccaccagagcaggtccaccagcaacctcaaccggcacccggagttccgctgtgccggaagcccc

SEQ ID NO: 323502 - DNA, 1080 bp, Homo Sapiens
tgtgggtggtgcgtgtggcaaacacggtttctcgaggcgtgacggtggggcccacgctcacgaccggggcctcggactgggcggctggcacagaggggacgcatagaacggactacggatatccgactcttacgcacaagacgagtaacgggcctcacgggggctggcttttcgctggtgcgaggcagtagggattcgggcacatgtcggctgaaggaggagagttcgtgcgagggcatgtgagcgggtttgctggttgccgggcggtagggagttgttgtgggggggacgggcaccgggtggttgtccgcttctgggacctaaagcgtgcagccccttcgtggccgcggccggcggagtccccgctccttttccacgagggtagggatgttgttgttcccagagaaagggatatttcccggtgaaggtttcctttgtcagccttaaggaggcggggggctgaaatttttcgggggctgtaaggcccgtgcctgagcagcaaatgggtggcccaggatggagtcgatacccatgcaacagggctctgggtacggagggctggtctgggtgcagttgctacagccgctatccaccgagtccgcttgccaactccgctcggatatggcctcggcctgctcctccttgcgctccatctccaggacctcctcctccgtgtactccagcttggcccgctcctcggccagttccctctccaccgcctgcagctgtgccgtggttctggccaggagcaccgtcaccgcatccgtcttgccggagatggagatggtgtgtgcagggtcccgggcggagctctctcctgcacacccagcctcccgcgtccttgatggttcagagctggtgaacacctgcacggaatgccagcgcagctgcatctcactcaaactgtcatagtcagccaggttaatctgagcaatgcccagcagttcttcctgcagctgcggagtcactgaacacacgtataactgaagtgacttcagtgtcaacgcgctggaatgcacggggattctgaacacttcgttaaaccctcgtgccgaattcgccacccaggcctcgctcgtt

SEQ ID NO: 323503 - DNA, 819 bp, Homo Sapiens
gagaaattattaaagaaaacaagttttatttttatcatcagaacattctaataaaaatattatgatgagattagctacctttattctctgagccttgactctgtcccaggcctgccctggagcgcctgcacgctcagctccctgaggtaggtccggaggagaccccccgctgccccccgccctcggccagggatacctctcacctcatgtcccctcctccagacccccacagccctggatgccccatagcagccctgccacggctggcagaactgcctccaccctccaccaacccccaagacaggcaggaaccgtctcaggctggcacacagcaggtggtgcgggggtagagggaagaggcgcacccttctgcactcaaacgctccagcgggcagagctgaaggccactgccccccccaggctggcaccaccatggtctagaccccaagtggcctgaatgctgtggatcacttccttctccccttccacagtgtttggggagttggggaggaagggaagggagaggagtgtcaacgtcgcagtgacggggtcctgagacaactcactctgccaccccggcaggcggcagcagaacaagctgccgcacggcctgaggggcctcctgtctgtggtgcccatcccaccgagaggatcctggcccgcgagccggcagacactttattatacagaaacactatcgtcgtctccacgggcggaaccaacaaaagcaagtctctccaagtcaaaaataggttttggattcttggtggcggcagtatccgctgaaaaaatagactgaacttctgaaattatcttagt

SEQ ID NO: 323504 - DNA, 1316 bp, Homo Sapiens
  misc_feature (146)..(207): n is a, c, g, or t
  misc_feature (282)..(282): n is a, c, g, or t
  misc_feature (498)..(717): n is a, c, g, or t
  misc_feature (721)..(738): n is a, c, g, or t
  misc_feature (760)..(849): n is a, c, g, or t
gggagaggaaaaggatagggagaggagtgagagcgtagttcgggggttcgggcacacagggaatggacgcggcacggtggaaggagtggataaggtggacgggcgaacgcgagggacagcgcgcggcgtgcgtgacccggacgggnnnnnnnnnnnnnnnnnnnnnnnnnnnnnnnnnnnnnnnnnnnnnnnnnnnnnnnnnnnnnntaggcgcgggtcaggaatcgcggcgaagtgtcatggcagggagcgaaacaaagaggggaggcggagggaaagatngcgaaaggctggaaagggggatatacggatacacacgacaaacgggtgagaaggcgcgggttggacaaaggggaggggtgacatcgcggccgccaggcgagaggcagaaagtgcggcgcgccggcgagagggtgggtattcactgatagaggggcgcgggggggcggcgacagagagggcgagatatcgtagcgagagagagggacggcgtggacnnnnnnnnnnnnnnnnnnnnnnnnnnnnnnnnnnnnnnnnnnnnnnnnnnnnnnnnnnnnnnnnnnnnnnnnnnnnnnnnnnnnnnnnnnnnnnnnnnnnnnnnnnnnnnnnnnnnnnnnnnnnnnnnnnnnnnnnnnnnnnnnnnnnnnnnnnnnnnnnnnnnnnnnnnnnnnnnnnnnnnnnnnnnnnnnnnnnnnnnnnnnnnnnnnnnnnnnnnnntaannnnnnnnnnnnnnnnnnaaagggtatacgaacgcgcagnnnnnnnnnnnnnnnnnnnnnnnnnnnnnnnnnnnnnnnnnnnnnnnnnnnnnnnnnnnnnnnnnnnnnnnnnnnnnnnnnnnnnnnnnncaggagcgggcctgggacaggcggggagcgacaaggcggaaccgacggcgtaaacgattagtggctccggcgcgcctcgcacaacgacgagatttgtgcgggggtccaccgcctcgccggccggatctctccgacggcccttcgggtccccgcggccagccggtgggaagtcgccgaggtccggcgccgccaggcccgcggggccgccgagcccggcgctccctccaccgccgccgctttcctcctcccgccgcggcggccgcggctcgcggaattcgcccttcttctcggctagattcttcaccacctgggcccagcccatcttctcgcggccgccgtcggcctcctcgccccgggccgcgggccgcgcggggggcagaagctgcggccgcccccgtttcctctcttcctccgcgccgccgccggtggccattttacctccttcccagcatcctcccctcgtccga

SEQ ID NO: 323505 - DNA, 1082 bp, Homo Sapiens
  misc_feature (852)..(852): n is a, c, g, or t
ccacccccacccctcttctccggtgcaacaatccacccatcccccgaggcctgggtggcgaattcggcacgaggcgaaaggggaactggggcactcctgaattggattcagggagttggcgtgtgcagggtccgggatttggagtggatgggattatgaaaggtggacagaaaagaaaagtgcgatgaggcaaatgtgaagctgtatggggaggtgacaggaagagaggatatggatgcaagggagaaagcagcttttcagggtggtgaggtgaggatatattctcgtccaggtgtatcttcccctaacagggaaggaacgaaaaaagggcctgctttgagtgaaaactgaaggcactcccggacttcctattggactcgaaggatcccagcaagcttctgagtttggtggggtgggatgcaggaatgtctggagagcattctctcagggtggaaggagagcagcacgtgtctgttcccgctgtcccaccctctcatttgctcctgtgctggccaccgtgggaccattctccaaaccaggaacctcttccaactcagagaagccctgaaaaccagagacaggtgtgagcaaattgtagaggtgagaaaggagaaaccccagacagaaacaactgcttcctcctgcccaattttctatcctgtttcccatagtcctgccaatatttaggcagcttcctaatgctttcccactcttttaacctcaatcatttggattcccagtttcctcttaccccaccattaggggaagaaatgttccaaagcccagagaaagccaatcaggtttcattctaaggacctccttcttttctctccctgcccccattatttttcnccttaagtggcccactgacccaggattaggcaagtgggaaaaaattaagttgggcaggctaacctatttccttgccttttccttcccttggcccccattacctttcctgtcaaggctcccttgaatagtggccaaacttcctgggcctccctgcaagccatcccgtgggattttccctcctggggctcccccccacagaaataaagggccggtggcaccctcgaacacac

SEQ ID NO: 323506 - DNA, 495 bp, Homo Sapiens
tggcagtggttgtggtgccccttgctgtctcagtcgcctgcctgaactctgattgtcacatggccacagcgctgcctcttgggcctggagcctcaggtctcctcactgggactgtcactctggagcttcgcagagcaccccgcctctggaaggtgcgggccatgatgatattcaacaccttcaacttgatcttgggtttcatcgtggtggtggtcgaggtgatgaagacagccttggggcctgccccaactgcctcctcccagcatgctggcttgctggtgctggaactcagtgctgaggccttcaccctagggggagtgctggtctcagtgcacgccctattcttgctgagccagaggaaaccaggatgctgcaggagccagagtctgcactatcaagagctgcaggagggcttctctgagttggaagaggttcctggtttggagaatggtcccacggtggccagcacaggagcaaatgagagggtgggacagc

SEQ ID NO: 323507 - DNA, 497 bp, Homo Sapiens
ttttaccgcggagagaaggctctttatttcctagccggtcacgggctagcggggcatcctgggacttgtagtctccgctacagtagaaaggagatggatcgaaaggggaactggggcactcctgaattggattcagggagttggcgtgtgcagggtccgggatttggagtggatgggattatgaaaggtggacagaaaagaaaagtgcgatgaggcaaatgtgaagctgtatggggaggtgacaggaagagaggatatggatgcaagggagaaagcagcttttcatggtggtgaggtgaggatatattctcgtccaggtgtatctttcccctaacagggaaggaacgaaaaaagggcctgctttgagtgaaaactgaaggcactcccggacttcctattggactcgaaggatcccagcaagcttctgagtttggtgggtgggatgcaggaatgtctggagagcattctctcagggtggaaggagagcagcacgtgtc

SEQ ID NO: 323508 - DNA, 1141 bp, Homo Sapiens
  misc_feature (788)..(796): n is a, c, g, or t
tgtggcctcgtgcacaatccggcgcggcttttaacttcctacgtagcgagggctgggtggcgagacatcgggcgaccctcgtcccgccgggttttggggtcgcgcaaacgagcgacgggggctggggctccggattcaggtgttctttcttcagcgctcacgggtttctgtccgtacgcgatgcgagcgaacgtcgcggtcgaggctagggccccgaagcccgcagtaatccacgtctcccgcccgctccgggcccccagtgccgccgtcgcgggcggaggcgcgaggtctgggctttggcgccttcgcagccgcaggcgacatcctctttcctagctaaagccccaaacgcccaggtggcttcctgggagagcacggctgagcctccgccttcacatcagaacatgcagagcctccaagggcggcttgggcccagtgcctgcttatcctgcccgtctctccacacttcttctttctctgttcgttggagtccattccttcctggaaaagcccaagccgcgctcccctaagaggcctggatgtgaaggtgagtgagacgccctggcctctgggtgcaaaggccggcgccctgccgctttcaacactcaggaggcgcgtttcagcccggctgggccccgggccgcagactccggaacgctgagctccccccggttcccaatcacccggacctccccttccccgggaatgagggcacccccggggaagcgttagccacctactataacggagggggccatgatccccacttctcttccccgactatctcnnnnnnnnncccggttccagaagcctgcgtgcggtggcaccccctggaaagcgcggggaactcgtggctgcgcaaggggacggcccctagacccgcgcacttccccccccattatggaatcctcccgccgccgtgagaacccacgagacacgcgggtttcctacacgcggtccaacacagtggttcgccgaccccacgcgcatcttccaccccgccgtttgtcctattactaatcctcccacccatgcccccacggcgtgtgtgcgcttcttcttcgccacacgttgataagcaccgaagagacgcacgcccgcgcgcggatctccctgtcgggtgctggacccagggagagcg

SEQ ID NO: 323509 - DNA, 1206 bp, Homo Sapiens
  misc_feature (52)..(52): n is a, c, g, or t
  misc_feature (92)..(92): n is a, c, g, or t
  misc_feature (151)..(151): n is a, c, g, or t
  misc_feature (292)..(292): n is a, c, g, or t
  misc_feature (450)..(450): n is a, c, g, or t
  misc_feature (501)..(501): n is a, c, g, or t
  misc_feature (525)..(525): n is a, c, g, or t
  misc_feature (612)..(622): n is a, c, g, or t
  misc_feature (680)..(723): n is a, c, g, or t
acgcatagaatcactgtatagaatacaggtacgatcgcgcgcgcgcgcacgnggggctgcgcgcgcatacgcagatgcgataacggataacncagccatcgtgtggtgtgtctgtgcctcgcgaagagcgagaagaagagagcgcggcgcngcgcagtgcgatgttgttataatgtgcggcgtgagcggatcgcgtcggcgatatagagtcttgtattagcgataacaatacaaacacaaccacgccgccgctgctatcggcgatgggtgtgcttgtgtatgtacactgagngttgcgtcgagctagagaacacacaaacacctgacctctctatttatctgttagaaaacaacagacaccgctctccgctgtctaggtgaagagagagaaaataataacacaccaccgccgccccccctcgtctcaccttattgtttttatctcggcancggcacgcgcgacaaaaaatagtgtgtgggcccccccacggctttttcttnttcttggcgggtgtgttgttaggnggcgaaaacagaggcttctccccgctttagaaaaagcggaggggtagcgcgcgccccccacagaagcgccgccaccacagagatagnnnnnnnnnnngaggggagaaacgcacccggggttttttttcccccgagagaaaaggggtgtttttctnnnnnnnnnnnnnnnnnnnnnnnnnnnnnnnnnnnnnnnnnnnnggccaaaaaggaaggccccccggagattgggtgccacaaaaattttttgggttttcaagaaaatttcccggttaaattttttccattttccccttggggccagggaaggaatttgggtcccaaagaagccccctttttactccttcaatcctaaataactgcttagccagaggggagcgaaatgctgcagctggggtgggaaaatccatggtccttgtctcaagaactggttttccctggtataaactttaagctgtttggatttggggtatcttgtgtttgaataaacatgtatctcactgggtgataaaaggctgcaggtagtgggaaaagtggtctttgtacaaactgatgcagaggctgtttcttaatggtgtatggattcttcaacttatgacagagacgcctgcgcagctcgcggtaacagccgcagctccccagccccgcctgccgtcgccgccctcgtgccgaattcgccaccca

SEQ ID NO: 323510 - DNA, 1032 bp, Homo Sapiens
agagcgaggcctgggtggcgggcctgtgtgctgcagaacccccagaccatcatgcacattcaggaccccgcgagccagcggctgacgtggaacaagtccccaaagagcgtccttgtcatcaagaagatgagagatgccagcctactgcagccgttcaaggagctctgcacgcacctcatggaggagaacatgatcgtgtatgtggaaaagaaagtgctagaagaccctgccatcgccagcgatgaaagctttggggcagtgaagaagaaattctgtacctttcgagaagattatgatgacatttccaatcagatagacttcatcatctgcctggggggagacgggacgctgctgtacgcttcctcgcttttccagggcagcgtccctccggtcatggccttccacctgggctccctgggcttcctgaccccattcagctttgagaactttcagtcccaagttactcaggtgatagaggggaacgcagctgttgttctccggagtcggctgaaggtcagggtggtgaaggagctccgggggaagaagacggccgtgcacaatgggctgggtgagaacggctcgcaggctgcaggcctggacatggatgtcgggaagcagggcctgcagtaccaggtcctgactgaggtggtgattgacagaggctcctcctacccgctggtaagtgaggctcgcttccctggaggggttctccctctgctactccgccggtacatcgactcctccttctccgtctcccaccccccttttgcctgccccgtgtacccgctggatcccgtacggttttatgtacgccgcgctggcccccatttatcgccccgccgccttggcctcttctgttggcttacatcgcggcccaaaatgggtacccttcgcgtgggcaccgcacggccacacgccgcgcccgataatgggccctagcgagacgcccggtccactatgtccaccttgtctccgccagtacctacgccaagtactatcccatgccgcttggtgtctttcgtggtagaccct

SEQ ID NO: 323511 - DNA, 1005 bp, Homo Sapiens
  misc_feature (49)..(136): n is a, c, g, or t
  misc_feature (190)..(190): n is a, c, g, or t
gccctacgggcgcgcccccgcgggctcctcggggctcggcgttcctcgnnnnnnnnnnnnnnnnnnnnnnnnnnnnnnnnnnnnnnnnnnnnnnnnnnnnnnnnnnnnnnnnnnnnnnnnnnnnnnnnnnnnnnnnctgcctgcggaccgctgcgctttccgcgcctcgcccggcctccgccgggccgtncgcgtgtgcggccgcccacccttatgcgcgccggagggtctcggacgccgccccctccccggcatccgggcacccccccagggcgcgccaggagtgggctcgcctgggcctcctgcgcttcgcgtccgggagttttccccaagtgaggaggcctcccgatgggaggtttctgtgccggtgtccctgattaggtaccaggtgggccccataaggggggtttccccctgtttcacttgtagtccatgactcccagatcctttccaggagatcccaaaggctggcaatcagggtgttctcttccacccctgtgatgttcacctccccatgccctagctccacagcttctcggcccatcttttccaccagcatcctcttggtcttattgcggcattccttcagcaggccctctacaaacttccaattggtctgggcaatcactgatggagagaggttagacagtttgggctggcggatagtgctgcccatagtcctggcttcctggatgtacttctccctctggtcattatctaaacgcaggtgttctgtgtgctgcttctgccgatctttccgcctccactgggcaggggcattccttttcgtccacttgttgctggctggcccagtggaaagtacatcagactgcagcttagggaagaagcccggctcatatttcccttgtccaatcttcatgtcaagtaaatgtgggtgaattgcagtatggtcaatttttgccagacgcagctcaattgctttctctgcttcatccacagtggtacacttctggtacacctcgtgccgaattcgccacccaggcc

SEQ ID NO: 323512 - DNA, 1162 bp, Homo Sapiens
  misc_feature (111)..(138): n is a, c, g, or t
  misc_feature (847)..(906): n is a, c, g, or t
  misc_feature (1096)..(1115): n is a, c, g, or t
ccctctccttttttctcccattcccctttattcccccttttcgaggcctgggtggcgaattcggcacgagggccgcacccgccgcggacggagcccatgcgcggggcgaannnnnnnnnnnnnnnnnnnnnnnnnnnnggcctcggacccggccctggccccgggggcagtcgcgcctgtgaacggtggggcaggagaccctgtaggaggaccccgggccgcaggcccctgaggagcgatgacggaatataagctggtggtggtgggcgccggcggtgtgggcaagagtgcgctgaccatccagctgatccagaaccattttgtggacgaatacgaccccactatagaggattcctaccggaagcaggtggtcattgatggggagacgtgcctgttggacatcctggataccgccggccaggaggagtacagcgccatgcgggaccagtacatgcgcaccggggagggcttcctgtgtgtgtttgccatcaacaacaccaagtcttttgagggcatccaccagtacagggagcagatcaaacgggtgaaggactcggatgacgtgcccatggtgctggtggggaacaagtgtgacctggctgcacgcactgtggaatctcggcaggctcaggacctcgcccgaagctacggcatcccctacatcgagacctcgggcaagaccccggcagggagtggaggatgccttctacacgttggtgccgtgagatccggcagctcaagctgcggaagctgaaccctcctgatgagagtggccccggctgcatgagctgcaagtgtgtgctctcctgacgcagcacaagctcaggacatggaggtgccggatgcnnnnnnnnnnnnnnnnnnnnnnnnnnnnnnnnnnnnnnnnnnnnnnnnnnnnnnnnnnnnggctgctggagcccagtcaccccgggaccgtgggccgaggtgactgcagaccctcccagggaggctgtgcacagactgtcttgaacatcccaaatgccaccggaaccccagcccttagctcccctcccaggcctctgtgggcccttgtcgggcacagatgggatcacagtaaattattggatggtcttgnnnnnnnnnnnnnnnnnnnnctcgagactagttctctctccctcgtgccgaattcgccacccaggcc

SEQ ID NO: 323513 - DNA, 1011 bp, Homo Sapiens
  misc_feature (69)..(83): n is a, c, g, or t
tgaaagcaacccgtttcccgcagggggggaaaaaaccccatagggattttttaatgaatgcgccgggtnnnnnnnnnnnnnnnaaaacggtggttccccagcctctaggaaaggcccagggctgcatcatgggacctcctattcccttccagggtaatctcgcaaaaatgtgagactcactgtgggggttcccgcatagaagagtcgccccccccttgggagggggagagcccttcttccgagttaccgaggcccctgctgctgggctttcttgggcccctcaacagtacccggcgtcggcggccatcaccctttgagaagttcagcgaataaccatttttccgcttctggccacgctttgggaaaccaggcttctgagtgaattctccctccacctgctgagccaaacagacagtacagaaccaatctccttctgggacagcctccatcttgggacgatggcagtaaatgtggcagccacggtcacacccatcacaaagcagaagaaactcatcattgtcacccttccggcagactagacatgtcactttgttgacagacttctcccaggcaatggacctctccagctggcccaggcacaagcacacctgggctgcgctccggcaccgctcgagggtctggcgccagacacgaatgcgaggggtgatctcatatgatatctctgtagtggtgccctcaggggcaccattaggtgtgctaagcagggccttctccagcacaacctcatgagttggccagaggggctcccgcaggtaccgccgttctacattctgttccagggcagccagccgcatcacagccaggtccaaagggttggtagttttacgctgaggtgccagtccctccctgccccgacctcgccaggtgatatcctcctgggagtcggagaggtgctcacagtaggccaagtcttcacgggtagagtctgggctaggacatgtccagccccgaatctgccctcgtgccgaattcgccacccaggcctcgctc

SEQ ID NO: 323514 - DNA, 1087 bp, Homo Sapiens
  misc_feature (1067)..(1067): n is a, c, g, or t
  misc_feature (1070)..(1070): n is a, c, g, or t
ggtaccggcccggaatttacgggatatcgtcgacccacgcgtccggcggaaaagtggttattcgctgaacttctcagagggtgatggccgccgacgccgggtactgttgaggggccgagaaagcccagcagcagggcctcggtactcggaagaagggctctccccctccaagcggcggcgactctctatgcggaaccaccacagtgatctcacattttgcgagattatcctgatggagatggagtcccatgatgcagcctggcctttcctagagcctgtgaacccacgtttggtgagtgggtaccggcgcatcatcaaaaatcctatggatttttccaccatgcgggagcggctgctcaggggagggtacaccagctcagaggagtttgcggctgatgccctcctggtatttgacaactgccagactttcaacgaggatgactctgaagtaggcaaggctgggcacatcatgcgccgcttcttcgagagccgctgggaggagttttatcagggaaaacaggccaatctgtgaggcaagggaggtggggagtcaccttgtggcatctccccccaccttccaaacaaaaacctgccattttcacctgctgatgctgccctgggtccagactcaagtcagatacaaccctgatttttgaccttggccttggcagtgccccacatcctcttattcctacatccctttctcccttccctcctcttgctccctcagtaataggcgcagaccatggggcccttctgggcttcagccccatttgcttggccgcccggcaccaataggcttggccgcccggctcgtaccccggaacacactttaaaaccagctctcctcccgggggcggcggggcctcccccagcccaacagaaacttggcggcaggaaccccgtccccgttttctcgcacacccacgccccggacaggaaatgttctctagcgacgcattccccgcggcggtaccaaaaccggcgcccggaagtccgccacgaaataaccccgcgccactataaacccaaccatctttacgctcccgcccccgcgacccgggggnggncatttttccaactaccc

SEQ ID NO: 323515 - DNA, 895 bp, Homo Sapiens
gacattttttgctttattaaacatcattcactgagaatttccaaagcactgtgtggtgcctagacctgtgtaccagcgctctgggggtcgggagaagtctaaggcacgggccctgccctggcgcacggctccttctccctgggaaggcagctccactggtgaaaggccactgaccaagtccagaccctgaggatgacgaaggcctcggggcagaagcctgagagaatcatgccccactggcagtgggaggcggtgcaggctgggagccctgcccaggccccaggctgagctgtggggaaagctatgacccagtttgctgagagctgcaatgacgaacattggctctgtgcccagaggcccaagaaggccatggactgggctggcctttcctgggaaagggggaaggaggaagaactggggcctagcagggccgtctataccctggagaggcagggcctgacttctccctttagagcttgcatcaagaggaggctcaggagagagagacttgcatcagaacactccagacagccgatctcccactcagtattcctctcctgggagacccacccagacccttcaggcccctggcagccacgaggagcagagaccctggagtaatttggcttggggacgtccccaccccaggcccaggccagtcagtcacccaggctacagcttagggtaggggaaggggaggatcccggtcactccttcttactatgcgaacagaggcagaggagggatagaggcccagccccagtttgggtctgtgctggggctggcagaacccgtgggcatgaagcttccctgccccatgtgacacctcgctacggccccacatgtcttgcttcatcctggggctgggcatctctcgtccgaatcgccacccagc

SEQ ID NO: 323516 - DNA, 1077 bp, Homo Sapiens
ccaaggaaggcaacgctcgacctgattgttctctttccgcacgaactttggctggcccaaaacccaaacccttttcattttagcccaacccaggtcatggataggtttccaaggataccagaaccagtgtccaggacgagcattgacaaagtaaaagcaattcttgcaaagctgcagttcatccaggtcaatgacatgtgtctttatatagcatcctcgcaatgtcagcttgctcactgtctgctccatagaaaatcacggtattgtggagaagcaattgggcatcagctttgaactcttcataacttcggtatttcccttcattcactttctcttgaatggtgggaacgtccacagctgagtgcaccagcctcctgtacatcgggtgtttattgtccttcccctttttattaagatctatagccctctccttcatgcgggagacaatgaatctgaggtatgtgcccatctcctgtttgtttgtattcttcttcttaatgctcctgcaaactgggcactgccagggactactgctgtctctaagcctgaactcatcagacaaacacttggaatgatacacacgaaaacacaggtcacatatcaacacctctccaggcaaatggcattcaaaacaataccagtcatgattttctgtttcccagtcaatctcatctcctggcaaccaatatccttcttgttcaataccagcttttgaacctttgcagcccactgttagagtttcgacaataagaccatctttcacagctaagctcagctgacgggtggtctctttagggtgcataccgtggactcgagacatatactttgtaatacggtcaatgttggcaatctgcttctggttccgtataatctcaatggctgcccaaagatgctggatagcttttgtatccgcctgtcgtctttttgttaaacgtgccatgacctgtttacttctttagcttccccacgtcctgtcttcggcgcctctatccgaaatttgttggagcatattcctctgtctccacacatgcactccgtatcctcgtgccgaattcgccacccaggcctcgctaccta

SEQ ID NO: 323517 - DNA, 647 bp, Homo Sapiens
  misc_feature (48)..(87): n is a, c, g, or t
tgaatcttaaattattattatttcttcctgtcgcttacacccgaggtnnnnnnnnnnnnnnnnnnnnnnnnnnnnnnnnnnnnnnnngtgcctctccccctaaggcactgactgggaaagccgaaagtagggagaagggaggccacattgtccccactttctggggctgggccccaggtctccccagccctgggctccccccatcacctgaaatgctaagatgaggcccaggacaacccgatctccccgccaccccaatatattacatcatcactttttaaatagataacagggactggtcccgctaccccctccctgtgacccctccccactgttaggggtacctgggcagctgtgcaaatgggcatgggggtgcatggaagggaggaagagcaccgggcccctgaacctgccccttttaaggagggggaggagccgtcaggccaggaaggggaaatagtgcaaggcagagcccaggctgcaaaaggggtccagcacccagcgaggaagggggggtgtcccccacccccagcagaattgggtagttaaaaatctgaaactagatttcaacaagaccaacagaagaggctatgtacagaatgggggtggattcaatcctaagcctcgtgccgaattcgccacccagc

SEQ ID NO: 323518 - DNA, 998 bp, Homo Sapiens
gtatgtgtggttgtgtctgtttgtgatgtgactgtgtattttttatcttctttgcttggtgttacgatctatttattttgttatctgttggggtacacgtaggcgaccattgcttttgacctccagagctggggcccccccaggctttatgttgcaagggaaggctcttccgtcggacctcggcccatctggctgcggcttggtttattccactgaggcaccgtgggttagcccggcagttcccaccgcccactgctccttgagcccaggcccaaatggggagaaagaggattctgagaaagaggcaataaccagcatgagctgacctcagccccgggcccgccgaggtgaccggcctgttgcaggaccaggggaagcattactaaaggatctggggctctgcactctggctccatgcacagcgggtgcccagagagtcctctgcccctggggtggtgctgccacatctaggttggggggcacagctaggtccagtgactcagctttgatgtccaagccctcgaactcccgcctgcctggcgtggttcttcctggtcacatgaaccagatcgtgttccaagtggaggatgtggctctgcacagcggtcatcaatggggaaggaggtcaggtacctcttgaccatggcaaagtaagccatggcctccccaaagctgggtacaggcacctcatcaccatcctcctcatcatcatcgtcgtcttcatcttcatcatcctcttcctcatcgtcctcttcctcactgtctgaatcagagtcctccccaccttccaggaaatgcagagtagggcactgggcttcctcctgggcaccataagccccgaagctgccaccggcctccactactccctgggcccagtcctcagcctccaagccctccgaggagctctcctcatcttcctcctcttcttcatcactatcaacatcaccctcctcccgacgcgtgggtcgacgatatcccgaggattccggaccgtacca

SEQ ID NO: 323519 - DNA, 994 bp, Homo Sapiens
acttgaagttccagggggccgtatcttagggggggaaagggttgccgctcgggccggtctgggtcctttccatccggattctcacagccttggtgttttcaagaaagctggcctctcccgtcttattaaagaccaggtgcagggagcccaccagcttcttggcctcctccatgcgctccccgaggtgcagcgcctgcgctgcgttttcgctgcagaacttggcctgggctttttctaggacctcccctgttttgccgcaggtcctcgtccagcaggtggtgcagcttctcgtactgcagccgaacttcctccttcagttggttcactttctcctccaccaggcgcttgtctgactcgagtttgtacagctggtcctcaatgtcctgctctcgctcctccagccggtcctgctgcttcatgagcatcttccggatttcattccttcggatctccacgtcgcacaccgagtgtccctgatgcgcgccgctgtagtagcagcagtactggcacacggccacctgctcggcctcgcagtggtagaggcggtaggcgttgtgctgcgggcagctccaggcccgcacgtcgtccgcctccaccaggaggtgcccgcgggcggtggagggctgctgcaggtgcgtctgcacgtgggactggcagcagggcgcctcgcagcgcaggcagaccttctgcgcaggcagcggggggccgcggcggcagaacacgcagtgcagcgccgccggcggcttctccacgtgcagggcattgaacttctccacgatgttggtgagcttcaggttcttctccaggcccggcttctggttgtaggcctggttgcactctgggcagcgtacgaggccgctgtccttggcccacgcctcgccgatgcagccccggcagaagttgtgtttgcacggcagctgcactggctccacgaaaacgtgcaggcagatagggcagatgagctcctccctcgtgccgaattcgccacccaggc

SEQ ID NO: 323520 - DNA, 970 bp, Homo Sapiens
  misc_feature (81)..(81): n is a, c, g, or t
  misc_feature (319)..(319): n is a, c, g, or t
  misc_feature (327)..(327): n is a, c, g, or t
  misc_feature (330)..(330): n is a, c, g, or t
ctcgccgggggtgggttacgtatcttcgggaagtagccagccttctttcatttcgcctcttaggctggatctagtgcgtgnattgagggcgggtggcgtaaattagcctggaggagcgtggcggttctagaggggtaaatttggggacgcatgtcgttagagctcgatgactgacagttggccgcaagggcggtatgagggggtgaggaggcgaacgtagcgtgggtggaaggagacgaagggggcgacgccgggaggcagggaagcgaacaacagaggggggggcggcgcaagcgcacatgggcccggccatgggcangcgggggnccnggggcccccccacgccactgaccccgcatcgggggccctgggctgcagaacccatcgatgctgttgccgtgcccctggttctggtgacactgggaccctccaggttgggctgagcagggcccccccacccagtgcgtactccagcaccagcgggagtgggcctgggcaggggctgagggagtgacacccaaggggacctgccccagcctcctcctgtaccctgggggttctcgttttccttggctgagggaggtggcctctcccagctgaaacctggggacaggctgggcgtgagagcaaaggggggtgagcaggaccccaggccttggaaatcctgagtcgggggaacaggctttgcctatgacgtgcctgggagctgtctgggggccctcctggggagccaggctcacaggatgttgtgtgggactcaacgtggggcaacgtcccggccaagagggggaaggccatcaccccagggtctgtgggaggcacatgcaggccaagctctcgcccacccggcgtgccgatccgctgcagccagggtccctcagccttggccagaacctgaagtccgaccgctatccctggggctccccagccaggcaggcacccgccgccctcgtccgaattgccacccagc

SEQ ID NO: 323521 - DNA, 832 bp, Homo Sapiens
  misc_feature (444)..(461): n is a, c, g, or t
  misc_feature (463)..(746): n is a, c, g, or t
aaggggcaggggcggtccctgggcttttccccggtgtccagtttcccgttcggttcctgtttccagcagcacttggcgcccttggggccaagagagcaaggtcctgaggaaaatcccgaagggctgggaccccttcagcttgctgtgacactcccttgcctttccacccttttcagcttgaggtcctacctggtgtcctccatgagaatcatacaagccccgctacagacaacagaattggaaggtcctgagagctaccagaagcatcttcagttttcatatgaaaaacttaagcccaggagtgatttgtgcagccaaggacacacagcaagttagtggctgcaccagaaatagtactcactgcctcagacagtccctcccacagtctactctgtctccaccccaaggtctggttctgaatcattcagttgtcagttgtctccnnnnnnnnnnnnnnnnnngnnnnnnnnnnnnnnnnnnnnnnnnnnnnnnnnnnnnnnnnnnnnnnnnnnnnnnnnnnnnnnnnnnnnnnnnnnnnnnnnnnnnnnnnnnnnnnnnnnnnnnnnnnnnnnnnnnnnnnnnnnnnnnnnnnnnnnnnnnnnnnnnnnnnnnnnnnnnnnnnnnnnnnnnnnnnnnnnnnnnnnnnnnnnnnnnnnnnnnnnnnnnnnnnnnnnnnnnnnnnnnnnnnnnnnnnnnnnnnnnnnnnnnnnnnnnnnnnnnnnnnnnnnnnnnnnnnnnnnnnnnnnttatctcctaacattttgatagcacaaaattttgaaaacccacttctgtgtacgttatgaagcatagaaaattaaacagtatcacc

SEQ ID NO: 323522 - DNA, 763 bp, Homo Sapiens
aatcaattaggaaataaaaccacagtgcccaggaaagttcacatgagacgccacggtgtctcttgccatggccccaccactccagggggcaggggggtgctgctggagggaggacagacggacaggcggcctgggtggcctccccagaaaggctggcgtggatgttcgagatgagccaccagcgaaccagtagggatgtctgggccgtcctggtgggattgtctgggacatcgccaccaacacggtttcagagccatcagtggggacatcggaggggccaccaccaggtggggtatattcaacaggctagaacccctgaggcttgagaggccaacccccggcaggagacctcccctgacccctctgctgcctctcctgtgggaccctccagtagacacaccagatgaggacaccccaggaggcctcctcccaggacaggaggcagctggctgggcagccacgcagtgcagggttcagggccctccagcaggagctccatggagatggctaaatggggacatcaaggcaggggctgacagtggtgacatccaagtggtcacagtcaattccggaagctttcagggcatcaggaggggaaggtggggctggggaaatgtgacaggaacggggaagtgcaaaaggcaattggcctagcctgggagattttccagttggcctgggggacccccggctcctccattcagcagggagatgattcctgcagtccccaaaagcagctggaccctacacaagatgcagctcc

SEQ ID NO: 323523 - DNA, 1052 bp, Homo Sapiens
  misc_feature (856)..(856): n is a, c, g, or t
  misc_feature (1024)..(1024): n is a, c, g, or t
ggagaagggatcagcatgagatgagatggggctggatctccaagggctttgactaccagactgaggagctgaactgtgttctgaggacatgggcaaagctatggaaggagagaaagatgcttccagatgccaggtggaaggtggattagagaggggcaagaaagaaggccctgggcccaaagggagcagggcagggacatgaggagggaaggcaggaggtgtccctgacaaggcccatgatggttacctggggactggaggagcaatgggctgccctgacatggggtcatggaggaggataacacagagaggaaattcagcagaggtctgattagaagggccttgaatgttgaagaggttggactttatactgagggcactggggagctatcgaacggcccctccccgtgccactaaggcggccatgcacaggctccttccgggcgatcgtgcggctcctctgcggccgggtaatggggcccatttgctatgcgctggcctgtctccaggcggttcgctagggcgcggggtgtatagcaggagtggggcgccgccgtctggaaagaggcggggaataacgccgcaccaccgtgcaacccagacaactcgacgccagcggccgccccgctctagggtaatcccgccccggcgcacccgcgcggcccaccgcgcgcggcctcacgtaacacagcaggcccgtccgggccgggcagcggcggacatgacgagcggggcgcaccagtggcgctccgccgcagcggacgtgcggtgccagcggccgcttctaccgacgcaaccaggccaactcccagtcccaccagacttgccgctgccaacaggcacccactatccgcangcctgcgtatattctccttggtgccctcaccgcggtcgcgcgctcgcacggctgcggcaatgcacccccaagatacacgtgagtaactgcacggcgacgcagtcccgcgacactgcagaccgccagagccgccgcgtggacgagcgttcgcggcatcggtacgatccncactcgacatgactccgcgagacacgag

SEQ ID NO: 323524 - DNA, 382 bp, Homo Sapiens
ccccccctccctccagggccccaggcctggcgcggggagcagcggagggggcgaccgctcctcggcagggccccccgagccagcgtcccggccccgcgcgcgtttccaaacttggtcacgctcggcggcggctgcgcgtcccggccctccccaagctcggcgttacgagtccgggcagggtgggcgggacgaggtgcgatcgccggctcgccttcgctacgcccttgtgatcttggggccacggaggccaccagggcccggccaaggatcggatgccactcccaacctcccagagccgcgccgaagcctcgtgcctgcccagcctcgtgccgaaatcgccacccaggcctcgctacctaggcctgtgggggcgggcgcgctt

SEQ ID NO: 323525 - DNA, 952 bp, Homo Sapiens
gattccaatggggtgtgacttcaagtgtgactcaagaggggtttgtgaccctggggtgagcacatctccagttctgggattttgttagcagggtctccccagcctgtggtttgggggggcaggtccttcatctgtggtttggggggtaagtctgagagttggggtttgggtggcagttcccccagctgtgttttggggggcagttctcctggcttaggcggcaaatctccattttggggcttgggggccagttctgtgggctttgggggcaggtctccagggtggtggcttttgtggcaactctgccaactgtgatgatttctgaaagatttcgggcgggatggtggctttgtctagggagagatgatctgttttccttagtgccactttctgaggtagtttaggaagaactcttgggccaagggcagtctttgcagaactggtgctcgactgctgggatagtccctcaaacttgtttgtagtcttacttgaagaggatggacccccatcgttaccccaaggaactgcgcctttgtttgggggcccatgaggtagtgggctgggagggtcggatagggttctcttgtgtccgggtggtgggggaggaggcctcttcttggatagggtggagctgccactagaggtctgggtgcttagagggagtgttgaaggtgggccagttggacctttcccggcgttcctaggaggcagagggggagcctccgtggttggtgatgtgggcgagtctgtgcttgtggaaacgaagatctggttggtgaaggctccataggagagccgctgtttgtcccttggagtgctgaatcctggcagtgccagcttgtcctggggggagatgctggaggagtggcagaagctctgaggtctgggtgagcgctctttcttgatagggcttggtttgtcatcccctcgtgccgaattcgccacccaggcc

SEQ ID NO: 323526 - DNA, 1112 bp, Homo Sapiens
gccccgaagagaaagttccccgccacaaaggtgtttccggggcgcaatctttgcgccccattgcctttttttccccggggagggcccccccttggagaggtctcttaccccggggaccagagggcaccgcggggtggggtgttttccccagaacggggtggcccctcggccaaggtggcccaggggaagggcccccttttcccttcctttgcggggcccatttgccccaagttttgaggattttccccccgggggggagagcgcaattccaggattggggccccctttgttcccccctggctgtggccagccaggaacccaagaccgggaaacacaaccccaggaggccccaagggggcaggtgcctccaccgtgcaggggcccaggttccacttgcgggcccagccaccggccccccttagaacccttcctgcggggcatgggcgcccgccagtcctgggtctccccggcttcaggtagttccaggaagctgcgggcatggcggacagctgtcctcggtctggaggcgccatcctggctttcaaatctgctccagaggttatctggggagggggctgctccctcacagagggagcgtctaagcccaccaggcgggcactttcagcccaaagcctccgggccacctcctcatcctcagcctcgggggccggggccttctgtttgagtccatcgaagtactttccggaaacatccgccagttcctccgccacggccaggtatgtgctgggctgggcggccagctcggggctcttgaccagcagccagaagatgggcccgagtgtggtgctggagaaggtggagccatggatgcccgtgtgtctgcccagctctgtcctggccacgccggggtgcagggcgttgacagtcacaccagagccttgcagccgccggctcaactccttggtgaagaggacgatggcgagcttgctctggcagtaggcggctttggtgttatacttcctcgtctgccagttcaagtcgtcaaagtctatgtgcccagcaacatgggccagggacgagaggttgatgatccgcgaaggggctgaggctttcagcttgtccctcgtgccgaattcgccacacaggcgagt

SEQ ID NO: 323527 - DNA, 1147 bp, Homo Sapiens
tttggcagggaagaggacttggaatttattagggtcacaagcacccctgcttcccatattcagcattcctgaaccatacactgccaccccttttgtatcctgggaacttagagtcctcatcagcaggaggccaggcagagtggtgggggggtgagcagagtccagggtccttgaggcagttacatgaaaagacctccagtgacttccactgaggtccctgtgatgtatccactatcttcagatgccaagaatgcgaccacatctgccacatcctcagggtcccccaagtgtcccatcgggatcatttcagtaatcttgtccaccactttttgtggcactttttgtgtcatgggtgttgcaatgacccctgggaggacagagttccagcggctcccatgtcgtccaagctcccgggctgcggtctgggtcagcccaatcactccagccttggatgctgcatagtttgtctgccccacgttccccacctttcctacgatgctactgatgttgatgatggaaccacgacaaccattggacaccagggcttgtgctgcagcctgagtgactaggaaggtgcccttgaggttgacagctatgactttgtcccagtcatcctcagacatgtgcagcagaaactcatcctgggtgatgcccgcacaggacacaacgacagatggtgggcgagaaaagcaggcctgcacttgttccagcaggcacctggcggccctggcctcagacacgtcagcctggaaggcagcatggttccctcggggcggcccctccttgctccctggcccgcccagcagccgcaccgtctcctgtgccgctgcccggtccaggtcgcaggcagctacggtggccccctctccggccaggcgtacactgaccgctcggccgatgccgctccccgcacctgaggtaggacagaacacgccggaccgggcacggggaggagagggcagggatcagaggtcacagggcagaaagtaaaatgtgggtaaggggccagaggtcacagcggccgcgcactccaagggcacgcccctgacctcactccaataccccaaaccgcccggggaaagaaccccctcaacctgtgaccaaggccagtgcggagcggagtcggttccctcgtgccgaattcgcc

SEQ ID NO: 323528 - DNA, 1049 bp, Homo Sapiens
  misc_feature (1021)..(1021): n is a, c, g, or t
  misc_feature (1038)..(1038): n is a, c, g, or t
gggagagggtaatgagggaaatattcatggggtgtaaaggcgggaggcgtgtctgtaagaggggtgtactaataggcggcaaatgtgttagggggatgtggatgttggagggtccacagttaggggttcttgttggcgggagagcgagtgtttgggggacaagtgtggggtttgtcggtatcccggttcgcatttgttctgtgccagagtttgtccgaatttttgtaagtggggcgtggtttgttgttcagagttttgcagcagcttgggttcagattttcaacaggttggttcaaattgctgtgtttgttcaagcttgttaggctggaggtaattgttttgctgtcctcctggttctttctcacttcttcagattgcgtttggtagttttcaaataatctctgggccacgtttctcagagctgctgctcctgcttctctggaggcttgcagctttgcatttagtttgtgatttgtactgtcatgtcttatttcatctttaaacatctgggtcctgatcttttgcagagtagttcgaatctttttcacatactcggtttcttcaataatgtgagcggacgtagactcatacaaggcagaattatcttccatcttatcccttgggggaatttctgtggtcactgtcactgttgtcattgtgaattctggccaagacgaagtaaaattaatagagctaaaacgccaaccttggtcttttagaagttcagagatgtttccatcatattaagactggcttccctcttcaacaaggacccttttacaggaaatgtccttgatgccaggaactccactggggaagccgctggaaaggcacctggacacccacacacatggaggggatgcgggggcgcgccgcagggaccgggcccgaaggtggccagactcgcctaccttgtggggcgcccagccgacgcggggtcccggtgctgctcctccccctgggcctcgtgccgaattcgccactccatactctggggatggcagccggcttggtgaggggngcaccggggaaggcggnttggggctgga

SEQ ID NO: 323529 - DNA, 1250 bp, Homo Sapiens
  misc_feature (233)..(233): n is a, c, g, or t
  misc_feature (658)..(658): n is a, c, g, or t
  misc_feature (666)..(666): n is a, c, g, or t
tggcggcttggagctgagtcttgcatggcgtatgtgtgcggatggggagtatagtagtcgccggtggcgcgcgtcgggcgagtggcggatttgtggtctaggttccttaccggcgcgtggtactggccgtgctccgtcgcggggagggggccgcggtcgggggccatgggtctctcggtttggcaagcagggcgatatcctctcgggggccgccgggctacgcgggcaagccngggccgccccacagcggatacagcagaagcagcggtctgaggcatgccagtgctggccctcgtaagccatctggccttggtccaggccgatgtgctccccacagccatcacagtactccgcgtggccgggcctcgtagcaggcgccagcagtgggggcggctctgacgcatgacatagcgttgccctcctaggtgaagcttcacactcaaagcagcagaagtgatccatgtgccagtggcggccttcagcctccgtgcactcaggggagaagatgatctcgtcacaggcttggcagcgtggacgcaggcattcggcatggtgacgcccgcagtagaccttgccaacatggtagaagtagatgaggtcaaccagcagttcctggcacgtggtacacacgaagccactgtgggtgccagcaggcacnccaggccntgcacggctggcaaacactgcgatgtccccacctccaatctgctttccgcactcctcacagatggccccagtgatggtcaccgggaagatgcgcacgatgccacgccccagattctcccgcttccgctgctggctaaaggctcggagctctttcttttcctcctcttccagtgctgtgcagtactgtgcctcactgtcgtgtgggggcagctggtgcagcagctgcttgatcctgtatttctcccccaggactgttgacgtaggggaccttgtcctctgggaggcagctgaaaaattgatatacctgctccggcttaaggcctgggggcacccaggcatactcctccgatgcacagcctgagtcgtcgtcggagatggagtggcgctggaagtccgagattagccgacacatgatgcgttccaggtccacaggcaccgcgtgcactgcatgctcctcccgcgggcatttgcaatgctggcagatctttctccagccgtggagcaggaagccagggcactgctccctacaggagttgcagggctggccccggcctcgtccgaattcgccacccaggcctcgctcc

SEQ ID NO: 323530 - DNA, 932 bp, Homo Sapiens
gggcggaggagaaaccccgtggaacccccgaattagccccaccggggggagattctggggggaggggttctcccggccgcgtggggtcccgaaggaggcagcggcacaccgggaagagggtctccctgggagtccaaattttccacctgtcatcattctgtgccactgcgacgcctcagtagccagggcttgggagaggctgagaacccgctcccggtgaccttcggaagtcggcaagtaaggggtggtgttccttggacctttgctccacgtcaggctggcgtctggctggggacagtgtccttcccagggtgagaagccggggggaggtcgggcgagggaagggccgtccacattcctggtttctgcgcatccgctccagctgctcctgggcactcatccggggccgggccaccggggccttggttcctagctgtggggaagggaggtggcgaccctcagggctggaagcccgggagaccctcggagacccaagacctaagtgagggctggcgaggtctttgtcgcctccaggaggccgcccccagtcagtctcgggggacctaggggagctcagttccaaggactctggcaggctctccctctctgaggactcctcgccctggagcacgggagatggggagtcaggctcagtgtgtgggggcggtttctgggggccacccagacctgccagcgtgtcttccaccatccacagctgctgctgagcagacactctgtcctggggagaaccaaggtgcagcaggtactccagcgtctctcttaaggtgcccagctcctgctccaggccactgtacgtgtcccaaaccctctctcgctcctgagtcaagtgacagagggtggccctcacactgaccagccggtcctgcaagaggcgctggcctcgtgccgaattcgccacccaggcctcgctc

SEQ ID NO: 323531 - DNA, 1113 bp, Homo Sapiens
cgggtggcgaattcggcacgagggttttgccattgtttattagaaaatttcagcttaatccattgtgtatatgttacatgcatttcatttaactttgctatactgtatatattgtatatataacggacaaattagtcccgattttataatatctagtctctagatattaaagaggttgccaatgtatgacagaagtagagttagtaaactaacacattttgtacactttgttaaaatttgtagaaaggctgtcttctgaaaaggacttttggaagtgagataacatcagctctaagtgacacgtgcctatatccatcaggttggtggtggagaggagttggaaggaatgaagggttctagaccagaatgttcgtatttagaagacactatcagatataaccattgttacatgtgtgtagtttattcaaccctactgtgtatatagcggacaaacttaagtccttatttgaaacatctagtctttctagatgtttagaagtgcacaaagtatgttaaaagtagaggtagtaaataacacattttgtagctatccttttgatatgaaatattgtcttggaaattgatcaattctctgagcagtacccattttgatatttgtggctggttcagggggaaggaggagcacaaagtgcaaagggctttctaccagtgtccagtgtgtttatgaggaggcacattgaccattgtcccttatgtctgcattttcatttactgtgctgtgtatatagtgtatataagcggacataggagtcctaatttacgtctagtcgatgttaaaaaggttgccagtatatgacaaaagtagaattagtaaactactacattgagtaccctttttgttaaaattcatagggaagacttcttaaaaacaagtgaaattgttaaacccccccctaagcattacagatggcttatagctgtccacggggttggtagaggtgggaaagggaagggttctaggccagaatgttcctatttagaagacactcaaattacagtctgtgttatgtatgtataccatttattcaatgctactgtgtatataatggaaaacttaagtccagtttgaaacatctagtctttctaggtgtt

SEQ ID NO: 323532 - DNA, 958 bp, Homo Sapiens
ggctttctgggtcttttatttgtacccatgtgtctgtcacaccatgaatgtacctggggaaatcaactgacctccctgaacatttcacgcagtcagggaacaggtgaggaaagaaataaataagtgattctaatgctgcctaggtcaccctcaacccccatttactggcacaattgggtggagagaagggaaggggtatgattgtcctgatggctcagggttgcaggaggttcagaggggaaggaggaaaggccaggctggaggctgggctgttagcacttccctcccacagttcagacggctcactctgggctcaggtttgccatggcttcctttggtccaaacataggccctgtccttagtcctgtgccctgtttgacttttggccaggaggcctttttgtgctgctgctgttgcagggctagctgcatggcccatatgctcagtggccgcatgtaggccagtgagcggaacactcgctgctggcagtatgcctctggggtctggaaggccagacccaggcgctcccacacggtacggtagcagccttcagctgtctggaagccctcccaagtcaggccctcttggatcatggtagctgccagcccgtagaccacacccacccagacttcatcagactgcacactggatttatcagggacaccatggggctgcatcccattcacagcccccatggcccctcctgcaaagggcctggacgttcagctcaaaagatattttggaggagcacggacccacatgtttgggtaggaaaccacctcagtggtcttctttctccctaggccccagggccttcaagggaaccactgttccggcacactggttcagacataacacttccaaaacttgggcccaaaaacttccctgccaaaaattggaataagcggccattccccagaaagcttccccataggtttctttggccccccggctgggt

SEQ ID NO: 323533 - DNA, 486 bp, Homo Sapiens
  misc_feature (59)..(59): n is a, c, g, or t
  misc_feature (77)..(77): n is a, c, g, or t
tccccaacacggttaggttaacaacccttccaactgttctggaaacccctccccaattncaggcccctgttgggaanagatgaacaagtccatacaatactaacttggcaacccctctgaaagagcccacttcccactggaatagatggaggcaattagagtctttgccttcaaggagctccccagcaagtggaggagataactatgaccccacagacagaaacctgaaggcaggagctggaatgcatacccagggaaaaatgggaggctttatagacggacaagatggcattgggttatgccttgaagaaatttggtggttgaggaagttttctgggccaggatacagatggtggagagatgggaaaaggagtgcattacctcttggatcatggtagctgccagcccgtagaccacacccacccagacttcatcagactgcacactggatttatcagggacaccatggggctgcatcccattcac

SEQ ID NO: 323534 - DNA, 973 bp, Homo Sapiens
gaagggtcccggtgaggtttgttgcccccgtgtgaagcatttgtcacaacacatgacatttgtaccttggctcagagtcttcctccatgtactttgcgtaagtggacctgatagagcagaggattcgggcactgaaggtgcagttctcaaaatcacaccctgtaggctggctcctcgctgtgggtatccaggtgcttctggaggtcaataagattcttgcagctgtagtcacaacagtcacatttaaaggggccggtcctcactgtgacgaaagcgcatgtggttgcggagggaggaaggcagcgggcaggtcatgtcacacagagggcacttatagtgattcacatggttgcgcatgtggtcccgcaatagccgctctgtggcaaatctcttggaacagtgagaacactggaagtgctgctgatccaatgaggtctggcgacggatgtgatctaagaacttggtattgttggcaaacatgcccccacaggtggggcaggctaccactttctcctgggtatggctgcggaggtgctctcgaagtttactgcggtccttgaaggtgcaggtacagcctttccagccacacagcaccaccgggttgtccttgccgactgcttcgtattcacagcacagactgtgtgcttccacatgccgataaaaccactcaggattgtcgaaggaattctcacagtgctcccacagacacaggaagtggtcagggatatcagggatgacgttccggctctggaagtccaggatgcaggggccaaggtcagcctggctttgcaaggcctgcagcccccactgtttcagcttggtgtggtagcagtggaagtagacatggcggatgaggtcagcagaactgtccagagaacaaaagccacattcctgccacaagcaggagaattcttcctcgtctgtcggctccagcctcgtgccgaattcgccacccaggcctcgctacctagaa

SEQ ID NO: 323535 - DNA, 983 bp, Homo Sapiens
  misc_feature (70)..(70): n is a, c, g, or t
  misc_feature (254)..(254): n is a, c, g, or t
  misc_feature (279)..(279): n is a, c, g, or t
gcttctttcaaaagactgtgggtcactccattttgataccacagagcttctctagcacttcttcctcatnccagattctccaaaattgactctttgaaaattttaatatctgtttctaactctgatagacttttgccatttctgtagtaaaatgttgcagtttgctttctgtctacagaagaaatgtttggggttcacccaagccattccaaggtcttcaaggatcagtggctgcaaaatgctaagtttccccntgaagggtgttgatccaatattgcnaggagtgcttctatagctctaaactcaaaaggttaaagggtatgtaacgagttgaccctctccaagacaactgtgaagggagttcccggaacagccattgctctaagtttaaattacgataatctaatatcagaagacactctggagttatcacagctttcaaatactccattctcatgataatcctattgtttctgactgtgatactcattacatgctgaaatctcaaatctctggcttgaagacctaactcttggtataattcagttttcttcctttcaaaagaagtaacgtttccctgtttgtcaaattttgtcacagtaaatactggggctacactggctaaagtggcttgagagacgtcagaggttctaaaccggtgcacttcacctgccacgcggagccggtcgggcccgcaaagctgcgccgctcggctccttccaatcaggttggctcggcggccgcaggcagcaacgggaggacccacagaggtcacgtccaaggccagggcacacagcgtccgccggggaagtctcatcgcgcggggcaggaggcagggtaaactgcgcaggcattccatggtgctggagcaagaagcaggcagcagccagaccccagaccttcatgccggacgctggctgctcaggccgcagctctgacctgtcgctaccgcccgaccctcgtgccgaattcgccacccaggc

SEQ ID NO: 323536 - DNA, 1008 bp, Homo Sapiens
ggggacagagagtatggcgcgtgctagggcgtagtgtgtaccccgcaactgagtgcggtagatgcttggagccgcggtcaactcagaggcaaagggcggcgcggttggagtgtcaccctcagtttggcacggcagggtctcgggaggcgagttgtagaaaggttcacctacacggatgtggtcctcctctgagagtcggggcacccttcctgtggcgcgcaagggcgaggccagcctgggttggttaaaaagggccggcataaaagttttgtctttcagaccggcaggtgcgcgttttcctttccctggtatacctgggttgcatcgcagtcctcctaaaagtcaagacccctggacggagtagagagagggccaggcttctccctttgactttgccctgtacagcaactaactgttccagggtgcttttaaactgatggtaagactaaatgtttagcccagctctaaccagactgataactctcacccctaccttttcccctataccttctgctcttatttatttcttttgtttttctcaatcttttccctcccagagccagctgttgacttctagaagctactgcatagctgataagcccctgactattccttccctaattttctgctttagaactgtcagtggagtgtccagctcaaacctgggctagccctcctgtttgatgcttctcttagcagcccctacctcaataccatcagatctgtcttcttacctcccctcatctccaagtcccttagttgtaatttccacccacttctataacccagactgacacagcccagcaaaatcctcaggtctgtctaccattctcctatagcctagctcagcccaaaatttcttagtccctttaaatcacattctaccttgctcctcccaacattgcccactctggaatccagtatccattacttttcctagtccaactaagcagccttcatccccagtctaattggttggggcctcgtgccgaattcgccacccaggcc

SEQ ID NO: 323537 - DNA, 807 bp, Homo Sapiens
  misc_feature (435)..(485): n is a, c, g, or t
ggcctgggtggcgaattcggcacgaggcctgcattcaggtgtttaaaaacatttaagtgttttttcataacttcttttggttttcccacacttctgagtttatgtgccaggactagtaactagaaattttagggatattgatttagctcagtggaagatattttttattgtaagagcaactccctaccagactgcattaggaagccctgaattctgtgtcaagccaaggctaaatgtccactctccagggaacatgaagaatcaatgcctgtgtgggagatgaggtactattagagcacctgaaaagtcctttgcttttgatttgttcatcaaatagttattgagcaccggttatagaccagcgtccatgctgggctctgggaatatagcagcgaacaaagagaaatggcaccttccctcttggaatttatagannnnnnnnnnnnnnnnnnnnnnnnnnnnnnnnnnnnnnnnnnnnnnnnnnnaattaattagattgaaataccattaaaaattcagcttctcggtcatgctagccacaaatgctctgtaggcacgtgtggctagtgactgccctacggtcggcatgggcagttgtagagtgtttctgtaatctcaggaggaactcttaggcaggctgatcatagagctaagattctgtgtttctagacccgacatttatgattagcatttcatggtggaggcaactgaggcacagaaaagccatttgtttaagactgagctaggaacaggtctcttatctttgagtgtggctcttctctcccctgagtgaggtagggcaactga

SEQ ID NO: 323538 - DNA, 862 bp, Homo Sapiens
aaaatcctcttcctggatgtacttttcccacttaggttttgacagttccttgtttgggatgcgtaaccaggatgtacgaaacagatctgaaaggtttaaagatttcaattttgattgtgcctccttatggttaccactcctttctgggacacccgaagagaaatgggacggctacggtttctggaatccgggttactggcccattccttttacccggggcaaagtttcctttccgggccactttatgtgttggatctgaagagttttaggaaaatagctgctggtgacagactcaggggacagtaccaaggtctgagtcaggaccctaacagcctttcaaatcttgatcaagatctgcccaataacatgattcatcaggtgccaattaaatccctccctcaagaatggctttggtgtgaaacgtggtgtgatgacgcctctaagaaaagggcaaaaaccattgatttgtgtaataatccgatgaccaaagagccgaaactggaagcagctgtgcggattgtcccggagtggcaggactacgaccaagagatcaaacagctacagatccgctttcagaaggagaaagaaacgggagcactgtacaaagagaagacaaaagaaccaagccgagaaggtcctcagaaacgtgaagaattatgatctctggagaaggacaggaaatcaccccatttgaaaaacagtttttataataaatgctagttttttctgatctgtctatacaactgctgataagccggctgggcaggagtgccacaccttttgattctgagcatttgattctgacttctgtactctggtggccactggatctttgggattaaagctctattggatttgtaaa

SEQ ID NO: 323539 - DNA, 935 bp, Homo Sapiens
ggtcgttcacgtgcggtcggtaccacaattgtaggcgttctttgtaacgtcacggttcaggaaaaggtcccggggggcacgtaattgctgggggccgacagacacaggaggataccgtgtcccctacgcagcaagttcctccccacggggaattaacggcacggcccgcccgcgccatccgcccccaaagcttaattgcccgttgaggggcgtcgtaggctatagaaatccatccagggagtgcaacttcctcttcggacaatattggcactccattcaacccttgtttcagggtcagtccgcacttcatcatctcccaatttgtccaaaacatactgtagctcaagtacagtttttaaacgtttctgttcagcttcttctctcataagctgctcccgacgtgctgtcttctttattgttttctgaatatcttgacttagtgccatgaaactcctctgtaattcttttgcaaactccaaattatttgtgacttcctggtacttagaaacggcatccagctgatcttgattaagcctttcccctttgttcattcgttcctggtaatcatcaagcttaccctttttcttctccaggttccgaagtttcttgtcgatcaccccgagaatctgcttcatggcctcggtctggacagcgccggtgccggttgcggggtgctgagaagccggcgcggcggccccggctcccgcggccgcctcactcccggaggaacccgacggcggtggcggtccggacgacttgctgccgctcccgctgtggctggtggccgagggcatcgtgcgcgcgcggaggccgctggaaatcacgagtgggcagctgagggggcaagggtggcggtcccttccgggcagtgtcgcgcgctccgtgggcgcaggccgcttcgccctgtcccgccctcgtcggaatttccacccagc

SEQ ID NO: 323540 - DNA, 1137 bp, Homo Sapiens
tcttgcggggcttttaaaaaagaaatccacagccaaaataagacattacctgcaaaatcccaaaatgggttgcggcttaccctatgtataaaaatgcgtccagtccggtcgggggcacggcctatgctttcccggggatcttggcccgcttgcgtgcaatagcatcctccacggcctttcagctgtttcagcagctcctcccgccgagacagcgtgctggccttccctgatttggtgctggcggcgccgggatccgaggctttgccgggcacgctcgtgaccttgctggagctcttggactggggtgacagctggcgcttcctgtcagccggggctgcaggggctttggagttctggcctctctgccgctctggcttcggggagcccagtctcccacctgacttccggtcccgagaacctcggtctggggatgtgttgggccgcttggctggaggagggctctgcctgtccttgtctgatggttcatagcgcttcctgcttcctttatcagccgccttattcaacagtgtcaacttgatctccttgtgggccacaaatgtgccctgctggggctgcccggggggtgcctgctggggtgtcgagggctgctgggaggacttcccccctgctggaggttttgcagatttgggtggttgtgtggacgaatcccttttccgcttttcctctttaacaccgtcttctttcttagattttcctttctccttcctggtctgggctggggccggggaccgagagctggctgaggacacggggctagccaggtctgcgtacatgtcctccgagtccacgctgtgtgcagagctgctgctcgacgtagcactggacactgaggagacgctgctcacgctcagggacctggatcgggagctggaaccactatagctgctaccactgccactgccgctgccgcttagcgtccgcctcctggggggggtcctggctggccgctccttcctcctggcttcccgagggtctcctggcttggtgggctcggggacaggagcagtggttttggtggcctgtggtggggctggaggcggggccggcttcttcactgacttctctcctgctttcccgggcggcggggccggctctcccttggttctgatggaagcc

SEQ ID NO: 323541 - DNA, 889 bp, Homo Sapiens
  misc_feature (170)..(170): n is a, c, g, or t
tatttaaatgtaaaagaaatgttcccccaaaatgctgggaataaagcaaaaggataccatacagtgctctcttcctacgagttagccagcctatccaagtacagggcgatatacagtacttaatgctggtagaatttcacagtagtttagtgttaaagattatctgtgcntagattatgaagagattctcagtgtgtgatgtttagttcagggtttacatcttactgggcatgaacaagagcccctgctccttggccatagccaaatcccttgggcccaaagttctttgcatagcatcctttacaatagatttcaccttctttttcagtcagagttgttgattcaagactcttcccacactttgcacatcggaaacagtttttgtgccagggctttccagctccaattatcttctcggcagcatatacagaatccccacatctggaacacttctcagcacctccatatttctgagcaaatttagaagtgtttggatttgttgtaggcctgtgaggctgaacactctctggtttgatgcccagcctctcgccacggtccatgttaagcgtgccagcgccctggccataaccgtagccttttggcccatacttctttccgtagcaggatttgcagtagatctcttcatcgtgaattgccactgttgtgctatctaaatttttcctgcaaaccatgcagagaaagcagcagcggtggaagctcctgccatcacactgcacctcttctgcgtggtacacggtcctcccacaggccccacacttgtttccacctccccagacaggcattttgagtcggaggcgggagcacgtaccgcaggcggagctagcgaggctgggctggagggagggtccagggagtccgagatcccccc

SEQ ID NO: 323542 - DNA, 1175 bp, Homo Sapiens
  misc_feature (61)..(74): n is a, c, g, or t
  misc_feature (398)..(453): n is a, c, g, or t
  misc_feature (458)..(613): n is a, c, g, or t
  misc_feature (659)..(667): n is a, c, g, or t
  misc_feature (987)..(1109): n is a, c, g, or t
cgaaataagagacacgcggtaggggcgacgaggaaagggagagaggcgtggggatgtaaannnnnnnnnnnnnnagaagaaacgagtgaggtgacaatcagtatgttgacgaagtgtgaggggtggagtaaaggataaggcgcagagaaggggaaagaaagaataaagttgtatgtgagaaaatagtggcgtgggagagggggagtaagatcgtaggaaaaggtgatagtagccgtcgcgggtgtagcaaaccaggatgttggcagacaaagaagcgagcgaaagaaggacgggggcgagggtcaagacagaaatatgcggggactcggtagggcgtgggggacagcaattagcggggatggcggcagcaagggggaaggggcggctagtgtgggttnnnnnnnnnnnnnnnnnnnnnnnnnnnnnnnnnnnnnnnnnnnnnnnnnnnnnnnnatgtnnnnnnnnnnnnnnnnnnnnnnnnnnnnnnnnnnnnnnnnnnnnnnnnnnnnnnnnnnnnnnnnnnnnnnnnnnnnnnnnnnnnnnnnnnnnnnnnnnnnnnnnnnnnnnnnnnnnnnnnnnnnnnnnnnnnnnnnnnnnnnnnnnnnnnnnnnnntacgtgcaagggaaaaaaagcaaaacaaggcgaagtaagagttgtnnnnnnnnntgccgggcagcgacaatcatagggggggcacgagagggaaaaggacaggtagttagtggaggacagaaacacagcgacgcgggggaggcacccacacccgccgccgctgcgcccagcgcgtcgccgggaccgccgccgggaccacctgggcccccgcaaggaggtggagaagcctgttgtggccggggacccgccactgcaccaggcggcacggccagcgcccagcgatgaagagcgcccggcggtcctggtagcgggccttgaggcggtggcgaagctcgcggacgggcccccacgacgccggagtcacggtcgcgatnnnnnnnnnnnnnnnnnnnnnnnnnnnnnnnnnnnnnnnnnnnnnnnnnnnnnnnnnnnnnnnnnnnnnnnnnnnnnnnnnnnnnnnnnnnnnnnnnnnnnnnnnnnnnnnnnnnnnnnnnnntctttttggggagtatagtcatggctgcactgccgagtcctcgtgccgaattcgccaccccaggcg

SEQ ID NO: 323543 - DNA, 965 bp, Homo Sapiens
  misc_feature (89)..(89): n is a, c, g, or t
  misc_feature (176)..(176): n is a, c, g, or t
  misc_feature (205)..(256): n is a, c, g, or t
cttatccctcctgctcctcaagtggctggattcattgggagcccagttcctttccattcatcaatattatcgctttcctttaggtccantgtcctcctcagaaggatcactgctttttgcaggggctgggtctcttgactgctctcttctgaatttgcacagggcttggtcacctnggattctatattctcttctcttccatgtnnnnnnnnnnnnnnnnnnnnnnnnnnnnnnnnnnnnnnnnnnnnnnnnnnnntttcttcctcttccatatcctcttcctctctgcctttctttttaactgattcctgatgtttagattcatggctcttttcctcccctatagcagaaacagactgtgtatctttatatttatcctttgccacggcccaatccacagccactgtccggcctggtttcctagggatatttacttccaggacagctccaaattgagcaaatactgtcttcaagtcatcttctgaacacttaaagctcaggttccgaataattaatctggctttcttatctgccactttggcttttttagccttcggctccttctttgggcactctgagttttcatttttccccttttcctttgtcttgttcctcagttttttcttggcaacagtcacgttgatcttgcaaccttcaaaggtggtaatctccttgagggccctctgaacatcttccagcattgaaaaagtgacatagccaaagcctcgacatgccttactccctttttcagtcaccacgaagcactgcttcaccggccccacctgactgaacagttcctccagctgctcactgcgggccgagggcgggaggcggcccacaaataaggtcaggccggccatgagaccgggaaacccaaagcgcgtgaggacgcgagcaaactaggccggcgcacgcgagccgaaacgctggctttggtaggaccctcgtgccgaattcgccaccca

SEQ ID NO: 323544 - DNA, 983 bp, Homo Sapiens
  misc_feature (553)..(594): n is a, c, g, or t
  misc_feature (627)..(683): n is a, c, g, or t
  misc_feature (735)..(849): n is a, c, g, or t
gagcgaggcctgggtggcgattcggacgaggggcacctgggttccaaggaccctgggccttgcaggagaccttgtgatctggattctctagaagggtgaggataatgggttgaacacctagattcccaagagagcgatggtgctctggggtctctggaaggggttgtcaaaggctgtcacttttaaatggaacaggggctgttggtgctggtctgtgaacagctggaggtcatatccctggcaccctgaggggctggtggaaggctgggatatatctgaatggggcagggactccgggggctatgtggtactgcagcccagtctgggcaggagttgggggcctacagtgagctctggatttggagggggtggtccctgtgggagcaggaactactgattccctggattcccaaggggaaggatcccttgttggattccagacttgggtggagtctttgagggtggatgtgttgcctggaggccttgttggtacctgtttgagctggggcccagggaggcggattgtcccctgcagcccgattggacctggtannnnnnnnnnnnnnnnnnnnnnnnnnnnnnnnnnnnnnnnnnaggggaacaccgggcccttgcttctgcctcccnnnnnnnnnnnnnnnnnnnnnnnnnnnnnnnnnnnnnnnnnnnnnnnnnnnnnnnnngccttgccctgcgggccccaattatttggttggcccccctggctggttgcgnnnnnnnnnnnnnnnnnnnnnnnnnnnnnnnnnnnnnnnnnnnnnnnnnnnnnnnnnnnnnnnnnnnnnnnnnnnnnnnnnnnnnnnnnnnnnnnnnnnnnnnnnnnnnnnnnnnactgcctctattttttttcccgcccacacttccttcccccaccttgtctttttactttcaccgtatcacctctctcccccccttaacccaccttttctccttttttttgccctcggacccgctatcacttctgt

SEQ ID NO: 323545 - DNA, 1244 bp, Homo Sapiens
  misc_feature (563)..(575): n is a, c, g, or t
  misc_feature (581)..(581): n is a, c, g, or t
  misc_feature (1144)..(1144): n is a, c, g, or t
  misc_feature (1151)..(1151): n is a, c, g, or t
  misc_feature (1153)..(1153): n is a, c, g, or t
  misc_feature (1163)..(1163): n is a, c, g, or t
  misc_feature (1168)..(1168): n is a, c, g, or t
  misc_feature (1194)..(1194): n is a, c, g, or t
  misc_feature (1196)..(1196): n is a, c, g, or t
  misc_feature (1225)..(1225): n is a, c, g, or t
ggcctgggtggcgaattcggcacgaggcggagcactacaggttgcgggcctttgtgaccccaggctgcggccgcaaggtgcgcagtattgggctgggccggggcaccagtcgggtttggttttgctccgcccggccgagctgcagggaccgcacggtgcccgggtctcccgccgcagagcagccgctggcccgggccgggggagccggtgctgattagcgcgcgctgtccccggatgtctccttgcctgccgccatggaccatcacccgatgttcctccagggctacggccttgattcataggccgccgttcgccgctgccgctcatggacctcatgcgctccggattctcgcgctgtacactccccagggcctgcaccgtggcctgaagcatctgatggatgcacatgtcgcatccgaaccccctccccagcttgcttcgcaagaagtgccgctacctgcatgctgtgttcccgtcgcgttgccggtttcctcaattgccataaaccccccctgcctccgtctgcgtccctttcgtcgcaaccccgtgcatggctgtttatnnnnnnnnnnnnngtcaanccgtcccttttctccccctgccctcccccaatacttcaaacgcttcttccattcgttaccgctgtcattccccccgccccctttcaaaaacaccgcggcccggacatcctcattgccctcgaaacgcccttatcgcctaaactaaatcggcctactgccccggccgcccaccccgttgtcttaacgctggcagtaccctcacggttatgcgacaccgccttgcccattatcccgccggttgctccaatacaggtgcgttgtaaaccgggctctgcgcatccgcctatatatacgcccgccaatcccgcgcccgcgcattttgccgcgcggctatcatcgtatcctataacctcccaatatgatacgcctgatatattattattactctgccgccacccccaccttgccatcaccgcgtgccataacatatatacttcctcgcatatatatgtgccgtgtaatattctgtaactaacatgtgcgcggtgtcgtgcgcaccacactcgggtgatcatatattaacccgcgcccactgtgtcgcgctgcgctcataagcgcgtgtngcgcgcncngacgatatantatgncgccgcgagaacaactgcgcgtgcgncncaacatctatatatgtgcacgcgcgccanatatgtcgtccctgtcgca

SEQ ID NO: 323546 - DNA, 1057 bp, Homo Sapiens
  misc_feature (130)..(130): n is a, c, g, or t
cgggtcacaatttttgattcctgtgaaaaagggggaggtgtcccgggaacaaccagtgggcattaggggtttgggggccacatctgatggggggagaaagtccccgcaaaggaccttgcccaggccattntgggtgcatccctgcgtgggaacgcgaacctccaaagggcattctttttgcccccttgtccccaaaggcagataaaattccatctcccaccccgcacagagcctggctgtcttgtccctttggagaaattttcaggtttgatgcccccggagattttgctgtcatggatgggctgggagatgactggcttcaggggcagggagaaggagccatcactggctttaaggaaggcagagaagcgcagccgcactatactcagatccatcaccttcttcagttctttggcctcttgctccagctcccgctgctcggcctccgtaagggccctggggcctagagcggagccgctgcctctgaagtttttgtatcatagtccccatcatgttcttcttagtcacatgcaggacacccaggttgttaaattgggcagtcatgtccttgggccccacagaaacggcgcagatccccagctccgagcattgcttgcccaccagactgtgggcatgagcacgaggtgggtcactgtgtgttaccaggtccacctcgatcttggctggtccctcgtagttacagatcttgacagtgggataggtctttcggcccttctcactggaggcaccgggcagtcctccatgggaggggccttcacagccatatcgaaatcggaagcctctctgcttaggctgttccacgatcaccaggtaggggccatcagctgtttctggggctggctccttgggttccacaatggaggagttcaatttgaaatcatcatattcaataataccatccagacctgggttgtagcaactctccatgtctctgggctaggcccggctctgtctagtggccctcgtgccgaattcgccacccaggcctcggtctttagtgggttgaaggaacgatgggggggacgggggcagcatc

SEQ ID NO: 323547 - DNA, 867 bp, Homo Sapiens
  misc_feature (114)..(114): n is a, c, g, or t
  misc_feature (121)..(121): n is a, c, g, or t
ctggccaggaaaggtcttattttaaaaaattgttttaaagtgaataccaagtatgtaacttgataaaaagaccaatgattccattttaattaaaaaaccatgaaaataaaaaanctctttntatgggcatcaaaagctaacactcaggagaaaagcctggccccccccgggggcagctcagccaatggcctccggggaacccgctctcggtgacagcgctctgaccgcggtctggagctgggctgaaactcaacatgtgtccagactgctgcagttcagaaccagcttggcaacgccgaaccgcattccggtttgcacgaggtgcacgttacttagaaaagtagccacagtctgcctgagttcccgttttaagtattttcacaacttcactgaaaagcacagcaactcactcacagtgtgcagcctagtcaccaggacacgcgccctcggccgctagctcgtacagggaagggctgtcatgacatgaccacaagatggtctctgcctcccccaggggcagccaagggccccacagaggatggcagggacaagccacccatgtggcaacggccacgtcccctccctcagacggcagccagtcatacccgaggcggcaccgcgggcggccccgtgtccagtctcacagaagcacagtccactgccgaggacaccctgttgtccacatcgcatgcagcagcctggctcttggaacgtgctgggggcacacgggacacggagacgctgaaacactagctgtgggattcctgagcccgccctcccactctctgcagtccgcgtgtgggattcctgagcccgccctccgcgtggggcctcgtgccgaattcgccacccaggcctcgctacctt

SEQ ID NO: 323548 - DNA, 1097 bp, Homo Sapiens
  misc_feature (23)..(23): n is a, c, g, or t
  misc_feature (51)..(51): n is a, c, g, or t
  misc_feature (62)..(62): n is a, c, g, or t
  misc_feature (76)..(76): n is a, c, g, or t
tgaaattctgaaaattatcttantaaccaaaacaattacaagaaaaaattnccaacttccantgctatgaactggnaaaaggggccttttgcggcggccccctgttaaccggcggcccctgtgcgcctgggaagctcctccgggcttgaggaagccgcccacgtgccctgatggagaaaatgggactccaacaggaggccgtgtcctcacacctcagactgcgctcacagctcgggaggatcaagttacaataaacagtccattaacttcttgctttcaggtttccctggagtcaggcatctctgcacagtcccagggcagccaggggctgcagagggtctgtgacaccccgccacgatgcagcagtggggacacaagcctgagggaacctggagtgtggagaggcaggagaaggtgcaaggagaggctgccatggtgtgcaaggaacctgggattgcgtctttaaatagttctcagtcattcttaaagtcctccctcaagacacaatgggacctagattaaagagaagccgtctctccgctgtcccagggcgcaggcggaatgcccgagcggtcttcggaggcacgggtgctggtggcacctcactgaagctcagccgggctgtcgccagcccatcatggcctggcagctctgtctgctgtgaaggtgacaatgccacagtcctcggggcaggaacgcccctcactgcatcctgtcaggctgcagctgcggcgcctggtactgcacgaaagtggtgcccgcgggtgctgcggctgagagggcctggggcacggcggcagggtagctgtagcccacgaagctggcagccgtggcaggcgaggcggcgtatgggtactggtcataggtggccggtgggtactgggcgtaggccgggctggccggcgtgtactcaatgtagggcgaggacagcgacgggacaggggcggctgggatcaccacgctgggctgcacgatggctggtgggtagatgtagtgcggggtcagcccgtctggaggctccgcggcttggcgcccagatatgccaggttcacgttggccttgcggccgtccctcgtgccgaattcgccacccaggcc

SEQ ID NO: 323549 - DNA, 991 bp, Homo Sapiens
  misc_feature (20)..(20): n is a, c, g, or t
  misc_feature (45)..(45): n is a, c, g, or t
  misc_feature (55)..(65): n is a, c, g, or t
gtttccccttgtattctggnccaccagggggggagaagggggttnccccttggtnnnnnnnnnnnaggaggccagccgacttcaaggtcctgggtcagggtttggggtcaggggctgccccttagaagccccctttcattagaaggccaccatactttttttagacgcctcccttggggcaagggggaaggcggcgcccaaaaacgctttaggggcataggttctggactcaggggaacccactgtttggggaaaagctgggctggagactagcaggtccaggtaccgtgggcgcaggagagtagccaaagcctccagggcatgggcacaggccggctcactcagcagcaccacaggcgctttggggtctgggttctgggcctcaaaggccttgacacagagctccaaggccacagaacgttgacgaagcacgaaggcaacgggcagtgggcgggctggagggcttaagcaggcagggccaaaatgtatgagagcctgagctccagcttgctcagcacccagcacatccacgcagcagctgccgtaggctgtgtcacccagaatgaacatctttgaccctgtcgtctcctccagtcgtgcagccacagccacagcatctcccaatagctggtcagggaactgcaaggcaactcgttcacaccccaggtcgcggacaaatccagcgactcgctccagctcgtacactccgtccaggtccggaagaggagtaagcagtcctggcaccccggtctctcgctgcagcgccgcctcggcagggctgctaaacatcgactccatgaggcacagcttgggtggtgggatgcagcggggacctccctgggacagcttcggggcctgagtcctctagagcagccctcagggggtcaaaatcgccttgtgggggtagggggaatcacagtcggccttcagccggtgagtatccccttcagccatccctcgtgccgaattcgccacccaggcctcgctcttt

SEQ ID NO: 323550 - DNA, 940 bp, Homo Sapiens
atattcgcgagggggctggtccatccttatttcatgaggaaaattgaaaagttggacctccactttatattttttcagactctgatttgggcgggtatgatgtatttatccccttctttttccctgaattctgttttctcttggtggctccgataagctgtaagctctttgctcttcacttgaactgcatactgttaattcacgcaccaaacgagtttttcctaaagaaattttgggtgacgagcaagaataagaacgtgagcgaactccagaaagcagtgattccttcgactgtagattacttgatagaggaagggattcagccctggagatattaaaatccggttcagtgttagtctcaaaagagtccaattcatccccactaggaatcccagttcttgaggagctctgagaccctggagtgtaacagatgtgggatggctcagaatgcccttccccttcactgtcggcgtccaaggcatcaaggctagaacttcttttctttagatgactttgttccttttcaaatccatgccaaccaaaagaaagattcaagttggaagcacacgaacttgatggtgacatgaaggactgctgggcttcagtgtgtgctgtcccttcgacattttcactaagtgggtacacactgggactggtttctgtaggaagggtgtgtttgctgctctgaggccacagagtgcaacctctggattcagggctggtagtggcagtgattccctctatattaatatagctgatatccaaatcaccaacctgatcaatcaccatacagttagcgtagacttcatcacctccattcagcatgtctgaaagccggcctgcagcaagcaatgtcgagggcggcttggattttttaggatatcgaaggagcgatccaaatctaggctgtgctggtctttcgccacccaggcctcgctac

SEQ ID NO: 323551 - DNA, 998 bp, Homo Sapiens
gttggggtgttggggtgggtattaaattatgtcgacaactccttcgccgcgcggcctgggtggcgaattcggcacgaggacaaggcactgcccccaggcctgagcaaggagcaggcccctgactgtagcagcagtgatggttctgagaggagctggatggatgactacgattacgtccacctacagggtaaggaggagtttgagaggcaacagaaagagctattggaaaaagagaatatcatgaaacagaacaagatgcagctggaacatcatcagctgagccagttccagctgttggaacaagagattacaaagcccgtggagaatgacatctcgaagtggaagccctctcagagcctacccaccacaaacagtggcgtgagtgctcaggatcggcagttgctgtgcttctactatgaccaatgtgagacccatttcatttcccttctcaacgccattgacgcactcttcagttgtgtcagctcagcccagcccccgcgaatcttcgtggcacacagcaagtttgtcatcctcagtgcacacaaactggtgttcattggagacacgctgacacggcaggtgactgcccaggacattcgcaacaaagtcatgaactccagcaaccagctctgcgagcagctcaagactatagtcatggcaaccaagatggccgccctccattaccccagcaccacggccctgcaggaaatggtgcaccaagtgacagacctttctagaaatgcccagctgttcaagcgctctttgctggagatggcaacgttctgagaagaaacccacgaaggaagggggactgcgtttaccggttactaaaggaaaactggaaatttttggcctggcgttttcggaaaatggcaacccaaatttttgccaaaacccccctctacatcaaaaccggaaatacctttttcccctttctttatggggggtcccgggataacacttccttacagaaacccctacgcggctattcttagtaa

SEQ ID NO: 323552 - DNA, 479 bp, Homo Sapiens
  misc_feature (306)..(306): n is a, c, g, or t
  misc_feature (342)..(342): n is a, c, g, or t
  misc_feature (351)..(351): n is a, c, g, or t
  misc_feature (390)..(390): n is a, c, g, or t
  misc_feature (398)..(398): n is a, c, g, or t
  misc_feature (407)..(407): n is a, c, g, or t
  misc_feature (433)..(433): n is a, c, g, or t
gtaggtaacagggctgcggtttaaacactatgctagcttctagccagagggtacaagagaccagtagtccaatcatagaaggtctgagcttgaggatcatctttcccaacgtctacattttacaatttaggaaagcaaggcagcttgacccagggtttacagctcacatgcatctgacagttactagcgactaaaatccctgtcttttaactccaaggcctggtgaatttccattgcaacacactcccttgctctaatgagatcttgctttcgtcttccttgcagctgagccagttccagctgttngaacaagagattacaaagcccgttgagaatgacatnttcgaagtnggaagccctctcagagcctacccaccacaaacagttggncgtgagtnctcaggatnggtagtttgtctgttgctttcttacnattgaccaatgtgagacccattttcattttccttctcaacgtcatt

SEQ ID NO: 323553 - DNA, 806 bp, Homo Sapiens
gggggcttctgagtatgagctagggtccatggggtctaactcttcatcctttcggcttactgccttcttgctcttgggatagggagcccagctcctcccggcgatgtggcgccgttctttgccctcttcccggtctgccttgtcatacccgcggtcccgatcccgttccctgtctcgctctctctctctgtctaccttgtcatagccacgctctcgatccctgtcagacttgtcgtggccccggtctgacttgtcgtggcccctgtctagtttctcatggctgcggtccgacttgtcatggcccctgtccgacttgtcatggctccggtccaacttttcttcagcattctgcattactgcttctgagcttcttggccgatttggtaaccacggagttggggtcatgtggggagagccaggatacaaggtctgtgtctgccattccagtagtaagggagcccgcaggaagggtcgaacaccttgtaccagcttggtggtaggccctccaacctggtggcctcgtagtccacaggatcatcgtcatagtcctcggcaatgatctcttcctctggttcaggctccagatgtttgaggatgcctctcttggccaagcgggtctgcagcgcaacgggcagcggcatagctgatagcagacagaccaatacactcgtgcaggtagtggaaggctgtcacaccgcccgtctctctcgtgtcgccgctacgatacctgggcccacacgactctcttcccaaaacaccgaatgagaccttctctcaacgaggccttcactccccgagcctgaaag

SEQ ID NO: 323554 - DNA, 856 bp, Homo Sapiens
  misc_feature (142)..(142): n is a, c, g, or t
  misc_feature (185)..(185): n is a, c, g, or t
  misc_feature (663)..(688): n is a, c, g, or t
tgtaaaggaattccctttccaggtgggctttggtcccttggttccagaaacccttcccccctttgggtacttgctgggcaccatcccatctttgttgcgggagaaaacttggcaaagatgccatgacggtccatggcttgcntgggcatcgccagggaagcgcacccctgtttttctctttgtcncccatccccatttctccagggggcccttcttctcgtcccgggtcccctggcaccttcgtagaattcgatggagaggctgacaatctcatcatcactcagagcccccttctcctgctccaagacctcgccgcggtcctcattggagccgttggggacctccgtcagggggtacgctgcatagaaatcccgccgccgtttcatctcatctttaaaaagcccagggaccaatttgtagacaatgtcttgaagtgttttgtcagacctgatgctcagcagcggccgggttttatggacctgcacgtcacacatggggcagtatttgttggtctccaggtagcgcacgatgcaggttttgcagaaggaatgcaggcactccacgatagtggtggcgtcgatgaagtaccccccgcagagggcacacatgaggtgggggttcagctctgtgattttgatccgtgtagtccgatgcatgattccnnnnnnnnnnnnnnnnnnnnnnnnnngcgttgccctcggaacagggtctgcccgggggctgctgcacaaagaggtggtggtcgagggagacgccaaatcgttaagacggggagcccgtttcggcctgggttcggggtccggtgggtctcggggagggcctcgtgccgaattcgccacccaggcctcgctacttt

SEQ ID NO: 323555 - DNA, 932 bp, Homo Sapiens
  misc_feature (68)..(184): n is a, c, g, or t
  misc_feature (215)..(229): n is a, c, g, or t
  misc_feature (246)..(309): n is a, c, g, or t
gagacccaagccttggttaccaatggcaaaaactccattctcaattaaaaaaatccaaagattagccnnnnnnnnnnnnnnnnnnnnnnnnnnnnnnnnnnnnnnnnnnnnnnnnnnnnnnnnnnnnnnnnnnnnnnnnnnnnnnnnnnnnnnnnnnnnnnnnnnnnnnnnnnnnnnnnnnnnngcagggctctagagcgagactctgtctcttnnnnnnnnnnnnnnngatgaagtttagcctcnnnnnnnnnnnnnnnnnnnnnnnnnnnnnnnnnnnnnnnnnnnnnnnnnnnnnnnnnnnnnnnnagtttttgattctcgcccctgttctcttatctctgccacaagccagatcaaagaaaggatcatcctaatcctttcttggctacatagattagaacaaaggaggacacatagaaatttcgttttttttcttattactaagatgtaaaacgtagtaataagctacattgtgtccccagactcggccagacacatagtatcacacatagtatccagcatcaggccttgggccttccttgggcttattacatccagctaataagcctggatagagtaacttgcgtgcagtcacatagagatacgatggaaagtccagagttagagcccgtatccctgctcagaactccattcgatgggttttccattcccagacctagagtggggctcagggttcttagaaagtgagagttcagcatcccttcccattctcagagtgcaggtttgacttggtcctggtggctgtaccccaggagcaagaatcgggatgtggcacagggaggggaggtttttaccttgtcagcaatcatttgacctgtccaacacagtaactggtatttatgatttcctgtcccagatttccaggcctaactgccactgcacctcgtgccgaattcgccacccaggcc

SEQ ID NO: 323556 - DNA, 601 bp, Homo Sapiens
gctgggcacatgtgtctattgttatgaggggagtccggaatgtttgagggttgaccagggatgccccaccccctcctaggggctgggcttgggcgtttctgaaagaggtgtctgcaggacagagcccagtatcagggaccaggctgtgggagctggaaggcagaggcagacctatctgggccggccggggcagtgggctgatgggtatcacaggcagcccaatctctggccactttggcacaggcctagggcatacagaggccccagacccagcgctgacaagcactgagaagggacagcttttggccccagagggtagcagcctgagcccagggcagcagggggaggcacgagtcttactcagaggccggggtggccagcacagtgctgaaggctcaggggtgtgaccaccctcagccatccaagctgggccagaggagccttgagtttggcagtggctcctctgccagctcccgctctcccagccagggctggctgcccccaggagccaaggcgggggcgccaggtctgcggcgggaattaagaatgctctggtcgctatatacattcgtaccctcgtgccgaattcgccacccaggcc

SEQ ID NO: 323557 - DNA, 1025 bp, Homo Sapiens
ccgcccccgcgcccttcccaggtcgcacaggtttccggaacgggagggggcccaggcgagatatacgccgaatgcggcgcggcccgaagggctcggtccctcgcgaggagggggtatgccaccgggtgatgcgcaaccgggaccgggacggggaggccaaagggacgggggtgtgggcccgggggtgcagggagccgttccgaatggcaagggtcccatccccgaaaggttcggagtgggatgttgggtggcaaccctcaagggaaggcctctttctccattcttctgccgtttttggcactcgcttggaggaacaataaccccattttctccagcaacctgttgggcttcttcataggcagctcctctccgtgcctgaaaatctgctttagtcggtaagagaatcattgccgtatttgcattggtgcgagttcctgacgtctgtcaaccagacatcctgagcggtgccgtccgtgatctggtgatcaagagaggcatatgtgttccgtcagatcctcggtcgcatcgcgaagtggggataataagtttgcctcttacagggttaaataatgagtcagcgtaacgaaagttccctggacagggccagttacagcagggactcaataaatgatgggtattaggattattctcattcccagcacccagcccacccagaccccgtctccagccgggagtgggggtaggggaggggacaggccagaggagggctctgatgagggtgttggcccctccagaccctgcccctggagacattatctgtccccaaagccccccatgtcctcacaatcatccatgcctggagcccagttcccctgggggcatctttaggaaacagcggcggctcaggcctctggggctgggtctctagccaggacagggtgtcctggagcagtgggctctcacttcctgctgctggcctggtccacgcatcttctgtccagggtcgggcccaagcagggcagcaaggacccctcgtgccgaattcgccacccaggcctcgctac

SEQ ID NO: 323558 - DNA, 1013 bp, Homo Sapiens
aaggagcgaggcctgggtggcgaattcggcacgaggctttgcaggtttggtggcttgaggggtgggggcaactcaccactgccaggtaactccctgaagggtgggagtggattatcttctaggctcttacccgcggtagggaagggcatcaacactgtcttccttccattctcctttcccccatcccatttagtgctgccacagggcagacgcacacaaaccaaccacacagtctctgacttctcctaagcactttgagttgttgaatggggctcaggggcaagagtttttgctgccctccccagcgtggtcacagggttattgaactgcctgcacttgtttctcatgcaactccagcattttccccagaagttgaactatggatagcagcttggtatggatttcctaaatcttaacatttgaagcagcttcttgaggctggcaactatcctggtttctgtcttggagggggtggtttgtttgctggggcccaacgtctgtcccaagtggtggggtgagagtaagttaactttggtgccaggtgagaggtgggggctctttgcttagactccctatcatggaaagattggagttttctatgcagggcactggggaaaaggattgctgattctgactgaccctgatcagagagattaggattgtattttgacataggatttggaaccccatctaaatgttgaagttccctgagacagctctccagctgctgagcctgcgcccagggctaagcagcccctaatgagaggctctgctccctttcccacctcgccaatgttgttgttgctgcctttttgatttgtatcctctgttatagacattttttaaaaacgatttcctctttcattgtgcacaagtgctgagagtctgaggccccatttctgctgtgtatatatatcctgactcggggcttttattcagcaaactgttcattcttctgtcagacaatgtcatattcaactctgttcatattaaaccactgtgaagcaaaaaaa

SEQ ID NO: 323559 - DNA, 1059 bp, Homo Sapiens; identical to SEQ ID NO: 245225
  misc_feature (811)..(820): n is a, c, g, or t
  misc_feature (822)..(822): n is a, c, g, or t
  misc_feature (986)..(993): n is a, c, g, or t
  misc_feature (995)..(996): n is a, c, g, or t
  misc_feature (998)..(998): n is a, c, g, or t
  misc_feature (1002)..(1004): n is a, c, g, or t
  misc_feature (1010)..(1013): n is a, c, g, or t

SEQ ID NO: 323560 - DNA, 1027 bp, Homo Sapiens
  misc_feature (138)..(147): n is a, c, g, or t
  misc_feature (301)..(449): n is a, c, g, or t
  misc_feature (995)..(995): n is a, c, g, or t
  misc_feature (1004)..(1004): n is a, c, g, or t
gttgtaggacaaccccacggcggcgcgcggagtgggggcgccggccaagccgggggcagggcacgatcgccctggtggccgccgctctactgcccgcgcccttctgctccggcccccgccgccgcgccgcggcggcgnnnnnnnnnnacattgcgtaccgcgcgactgtgtctcctgcttattccaagccaggggggcgcccgcgagtccgcgcacccaccatgtgccgcggtgagaggcccggtgtccctgcccccgggcaaagaggccgcgcggccgccccgggtcggcatcgggcgcnnnnnnnnnnnnnnnnnnnnnnnnnnnnnnnnnnnnnnnnnnnnnnnnnnnnnnnnnnnnnnnnnnnnnnnnnnnnnnnnnnnnnnnnnnnnnnnnnnnnnnnnnnnnnnnnnnnnnnnnnnnnnnnnnnnnnnnnnnnnnnnnnnnnncctgttaagactttgtacagcttccttatgaaatcttctgactgggccttgagcaataaggtcttttgctacaatttagtgctcttttcctcacactaaatcgaaaactctccctgttggtcctgatctgtttcagtcaggcaaattacatcctgggaaaacgtcagatgacaggggaggccactcgcttcctgctcatccagtttcgacactttctgtgctttcattagcttccagacctcagccctggccctcgctttactgtacagtcagaactggtttctacgcctcgcgagggtgggaggtcgtgtatgggaggaggaccgcttcccaccagcctcgttgggaagccaggagaaatctcttcaaatcctgcgattcagagtcaagtcccagtcgtcctttttctggtcggcccagaactgtttgtgcctcctccctcatgaggaatgatgtcagtggggccgcggtcgccgcccacgaagagtgtaaggctgcgaagtcggcctcgtgccggattcgccactcaggcctcgttcggtgggngggtagggngcggggtcaggcccgccgaggga

SEQ ID NO: 323561 - DNA, 1138 bp, Homo Sapiens
atatataatatatatatatacttttattattcacccgttaactccattatatgccaatcacgagctagttttcagcagttacattcccttgatcacggctgcatgaggatgtaattaactggaaaacacggagaccagagacacgaccggaggtgacgtcacgcagcccacgccatcgcaatacaattgtcaagttcgctggcggtttggtaaagccggttcagttctgctccctttgccagggattctcacgtgtgtgaaaattggaccaacagtggtggggttccatttcctggttcgaattttcagtggctttatctagaatcgcactggtgactggttattgtagcaccagtccaaccttcttctgcccccatgctggggcatttccaattgtaaaggtaatactgcaggttgccgtcccctatgccaaacttgagcttctccaggaaggttttgttctccatgagatccagtgcattgaacacatcaaaccctttcattttggcgaggacaagggcgtcgctcatgaggtctagaagaggggtctgggtgtgaacgttgtagaaagaataagcagctttgagactcttgtgggttggatggttcatgatggtggagggcagcgtataaaagctcaggaaatctgtcacctctccgtttgcgttctccaccacgaaagtgtcgatgatattctcctgggggtagaaccagtgctccacctcctcctggctcatgacgggcgtaaggtgaaattgcttcaagtacctggtgaggagctggtgcactactggaatgtcctttgtttccattggtcgcagcccagctgtcttgggagtctctggcagtcggtagagcttcatggtgcgctgcatggtcatatttctgctcaggtgggagaacttcacttcaatcagcttccgtgggtttagggaccgatgccaatacctgcaggtgccaacgggctttggtagtaccaccccggcagtgtaaactgcttggaagatgccctccaggtgaacccgcctggtgatctctcggatcagaactggagcaaccctcttggaacgcagcttcttgtggacacacaggaagttgatctctaccatcttcttctctgcctcgtgccgaattcgcc

SEQ ID NO: 323562 - DNA, 999 bp, Homo Sapiens
  misc_feature (18)..(18): n is a, c, g, or t
gaaaaggccggccccttngtcccttttggttggccgcagcccaaggatgaaagtgggctttggagcctcttccccaaaaaaggccatcggccccttttccataagagggaaacgcagagaggtgaagcctggtttcctacttaggacccccgtggcctgtggagtgaggagaaaaagccataggatccagattacatcctctcattagtgataaaatccatcatccctgccagaagctgcatggccccaggtatatcacttctctccctaagcttttttcatctgtaaaatggggatctccgtttctctctctgcacgtttgcccatgtaggtgacagggggctaacggacttcgaatgcatactgcaaagggtgatggtttgagctaataataatagtaatacaaataacaatagcaacctttgaacccgccatgtatttagctcttcaccctttaattattacagccatcataaccacccttttaccagaagagaaaactgaggctcaaagataaggatctttccaaggggcctccagggtgggaatcagtcttcgggccgaccaatgcggatggaggttgggcccgggttcagtctggggcagaggttcgggtcaggggtgagccctgggagaggccttgagggtcggaagataggggacaggatcagccggccggcaggggtccgcacctgcagcctaggaagagatggttggcccagaccatggagagggagagcagctggtccaggcggccactgccgtcgggcgggtcgcggtagtcgggcaggtggcgcaggatgaattccatgcgggccttccattgcttctcgctctctgagtaggagcggaactgctccgcgaagtcggccgcctgccgcacccccgaaaccagctcctccactgcggcagccgcctcgccaccgaccatggtgcccgccgcagccgaggaccggatagcccgccgccttcccgacgcgccctcgtgccgaattcgcc

SEQ ID NO: 323563 - DNA, 974 bp, Homo Sapiens
  misc_feature (195)..(195): n is a, c, g, or t
aggaggtttttgaggggacccatgtgcacgcaagggtgtcttaagaaggcctggagggcgcatcccgggagccgccatttgccatccgggggtgccttttccctcctccgggttgacgttctggcttcaagcttctttccctggggggcggcggtttctttcggcaagccccttgattcttcacccaggaaaagnccagagcaggagcagtgggcaacctactgcaaaggaggaggtggagggcaaaggtgttgtttcccactagcaaaagcaggcagccaagtacaggagccatgcccctctgggaatcccacgaaggctgcatgccaatggatggctggaaagacaggctggtggcctgtggagtagaaggtctgtgtggccatgagggcccaagccgagactgcctgccatggcacagtaaaaggaccaggggtggtgacgggtatcccagcagcaagcagatgtaggagaaggaagctctgcagaaacagaagcaggaacacaaggctgatgcgctccgcatgcaacagcagaagtgggaaggccaacagggtgagggctgtgaccatagcagctgagtagacactccccaactgataagcagccacagtcaggggaccctgagatttggtcctctctaaccggccccggaactcctcctgcatgtgtcggtagatttgagggaccacataatccaagtcagcttgagaagtgggggggcctgagaagggagtgaggacagtcctggtccttggagcgcctgccccagccttcaccagcactgtcacaggcttccagagcagcagcgcgagccctgaagcagccagccctgctacagcccgaggcagcaccatggatgccccagagaccaggacccggagacgggggggagcctcatctgcccccgacgccaatgcccagtaggcagcagtacccaatgccatcctcgtgccgaattcgccacccaggcc

SEQ ID NO: 323564 - DNA, 1167 bp, Homo Sapiens
  misc_feature (180)..(180): n is a, c, g, or t
  misc_feature (279)..(279): n is a, c, g, or t
  misc_feature (369)..(383): n is a, c, g, or t
gggcgtggaccttgtgggaggccgcccacgtggggtgtcgggccagggttgagtatccgtcgctatggaggagtgtgttcgagaagtgtctcctctcgtcgtgcgaggcgatacgatggtattcgcgtcctatatcaagagagcgcgcgcgcttctaccgcccaccctgggagggtgtgngcgcggtccgtcggcccgcggcgcggctttccatatttcgccgtggggggggagcttgttattatttttgcgtttctgcaccccagcgccctcgtggtnctttttcccgccccgccgggaaaaaggagtccccgaggggcccgaggggcgctcctgtgggcgcccaaaccctttccctgcctaaaagannnnnnnnnnnnnnnaagctcccacaagggcttttggggcctccccccctctaggcgatagcgccgggccgggccccaaggtcccgaggaacccccagggcccctgcgggggaaatcccccgcggaaggggtggccatgccaaaggggatgggctgggaaagaccaggccctgggtggcccggtggaggtagaaaggtcttgggtgggcctgaggggcccaagccggagggttgcctgccatggcccagtaaaaaggaccaggggtggtgaggggtatcccagccagcaagcagatgtaggagaaggaagctttgcagaaccagaagcaggaacccaaggctgatgcgttccgcatgcaacagcagaagtgggaaggccaccagggtgagggctgtgaccatagcagctgagtagacactccccaactgataagcagccacagtcaggggaccctgagatttggtcctctctaaccggccccggaactcctcctgcatgtgtcggtagatttgagggaccacataatccaagtcagcttgagaagtgggggggcctgagaagggagtgaggccagtcctggtccttggagcgcctgccccagccttcaccagcactgtcacaggcttccagagcagcagcgcgagccctgaagcagccagccctgctacagcccgaggcagcaccatggatgccccagagaccaggacccggagacgggggggagcctcatctgcccccgacgccaatgcccagtaggcagcagtacccaatgccatcctcgtgcggaattcgccaccc

SEQ ID NO: 323565 - DNA, 1031 bp, Homo Sapiens
agcgtatcctgtgggtagccgccgacgcagtcggggcggggtttcgatgtcaggatggttggtatgtgtgagatctgccatatagaggacctccggtaagagttggtgtgactattgagtcgggtttcggctgtcgggtatggaattggcggtggcggtgtgcaggtatccatgggtcggctcgtgtaggtcgataggggtcgattggggatgtgcggagaagggacggtggcgcggctgctgcgtgggcacggaagtggcctgcgagagggccaatgtttgcgcttgtccggggtgagggcagctcggggcgctaggggctcttggggccaggagttgggcagcagctcggccttgtgcttcacggaagctggcgctggctgcaatggtcttgttgggtctccctgctgtgccgtgtgcaggctgtccggaagctcctgcgtgtcactcgggtgtccttaaggactgaaggctccgctccaaggaggtcacactggagttgattcggaagacgttggccgacatctcctgggaacagctcctggaggttgcacggatcgacctgggtggctctgggcggctccagactgaagccctcggagggcagggcctggcaagagaaggtcttggccaccacctgctccacgggcgtgagagccagggcctggggcttgccggaaccagggctggggccatgggccgccttccggaggtcgcccagcttgcgccgcacgacggctcgtaggtcccgccacttgtgcttcaggtccacaacgtcgcggcgacagtagcccagcgcattcacggcctgcaggatgcggctccacacgcggtacctgcgagtgggctcggccttcagcagccccgtgccaaacagcagctggtggtgcttgctcaccttggacaccagcacctcggtctcctgcgggcagaagttgggcttcctcttcttggcccgggtagtgctgggccccgccatccggccatggggcccagcagccgagcctcgtgccgaattcgccacccaggcc

SEQ ID NO: 323566 - DNA, 1026 bp, Homo Sapiens
  misc_feature (993)..(993): n is a, c, g, or t
  misc_feature (1002)..(1002): n is a, c, g, or t
  misc_feature (1012)..(1012): n is a, c, g, or t
tttaagcggtcgccttcggttcttttgggtggctccaatccgttttggtttttttgcccagcagttgccttttatattcttcctgctcccgggagctgttgttcctgtagtaactgttgtctccggaagagccttcggaaacgttctttgttctcctgctgcagtctcaggaaaatctcggcgaagagtagactcacccaggcacgttcacaatggaacttggctctccttcctgttcaggcacttcctccttcttcttcctcactcccactgtactcatactcagtttcatctttcatttggctgatcccttataaaaggatgtttcaaaagctgctctgtagagggccgctgcatgtaattcttcaccaggcacccttctataaaactaaaaaacttcttcgaccatttttttgacttcagccggggaggagggtttctgggaatgagaaacagtgctctcattggatgcatgtcacagagagggggagcaccttctgccatctcaatggctgtaatgccacaagaccaaagatcacttctgtaatcataggtggcatctgggttctcatcacaggcgatgacctcaggagccatccagtagggagtgcctatgaacgtatttctccgccccacagtcctgtccagctgagcactcacaccaaagtcaacaagtttcacctctgcattctcagtcagcaacacattctggcccttgatatcccggtgaatcacatgatgaatgtgaagatgtgccagtcccctcaggatttctctggagatgtaagcgatccagtcttctttgagtgtgttccctttggtgttcttcacaaggtctgtaatggacccagccccacagaactccataacaagccagagttggtcatcatgtcctggagggctctttttgatgaaagcaccataatatgttgcaatgtttctgcctcgtgccgaattcgccacccaggcctggggggttgggccggttaccanactgtgggngtggagggangatgagggtggaga

SEQ ID NO: 323567 - DNA, 959 bp, Homo Sapiens
  misc_feature (326)..(326): n is a, c, g, or t
gataaagaggggggcgcgaccgggggttatatatattttatttgtgtgaagggtgaaatacgcggatagggggacccaaaagggcgagcggcggtagataacaaaaggcggcgtggggaaaaagaacggcggaggggcggaaaggaaaccgggaaaacaaggggggagggggtcattccaagaaaaaagcgggtaaaatccgggggcctaagcccagggagattgcttccgctccccgggccccccaggggtcaagggcttcaggacctctgatccaactcacgtggcctcccactcccattggacaagaggcagggaaagggaanactggagtgctgggccagtggaggactgccctagactctggacaagagggtgcagaagttgtgatccaagtgccctgcaagctgcttcagcggagctggggacactggggcattgtgtgggctgagagtctgtgaattgaggtgtcttcgaggggaggctgaggtctgtccagctattggggcttccccaagctttcctccacttaacgctgaaggactcagccaaaccctcctatacacattctcctctcagggaatctgggaacttcaaccctgtttctagaagcacccatggtcttgttaggcctggccacaccctctgatggggaaatgatgagatcctggtgcctggagggacattcaatcagcagagatggggtgtggcactcccaagcccttctgcaggctctctgaggctgagggcctggcccagtaccctgcaggagaaaaacctcttttcccaacctcaggtctggaattcccaggcatagccacactgaccctgatcttcagaccccagtcaggcctggcctagttcgctgctgccctctggtggctactgcctgcccagccctaagtccactcgctcagtcccaggcagagcagggcaaacatgccagcgccacccaggcc

SEQ ID NO: 323568 - DNA, 1076 bp, Homo Sapiens
  misc_feature (700)..(708): n is a, c, g, or t
  misc_feature (984)..(1003): n is a, c, g, or t
ggcctgggtggcgaattcggcacgaggaagcattgcaggcacccgggaaggtgagcagagggtaggtgggtgggcttgtcccctccccggtcccccgccctgctcacctctactatgaaggtgcccccaggtcacctgtgctgcccgccatctgcccacgtggcttgcagtgactcaggagagcaggcccacagcgtttgccatcttgcagagctggggaggggcacaggaccctgccctcgtgttccctcccagcccgcagtatttcagggacaggctcttcccctctatccctcaccctgagagcacccctggtggcttggttggggaagggaggggctgcctgtctctggaggtgtcaggcaggcaggtggcaggcagctcacccacccaccccatgggatcccccagcccttcacccgcgcctgccttgtccccatgatagttgacaatcggggcttcctgcaaggcccgtctgtctgtccaggactcctggtggccagattcggcctccgaccttgaccttaaactgcagctgaccccaggggctcgccgctgcccctcccctccacaacaaggccctgagacagcaaggagcccccgcctgggccccgaatccgtttcccaccgcagcaaagagcaaaggggcctgggacagggaactgttcagccaaatggggcgggcggtccctccaaaaannnnnnnnnttagggagcacccacaaatgggaccccttccccagaggttctaaggatggaaagcaagcgcccctttatcacgcccgccggttcgcccccccatagggtgccccaacccacagatatacaccgccccgagtctcgcccctcctggcccttatcaaagccggcaccccagtcatcgccccgttgtacctagaccccaacccttgcctcccgccccggggatagaggcatcgcgggccgcgagccacccctaccagcgcgcgcagttgttgcgccggnnnnnnnnnnnnnnnnnnnnaccggcgtatttcggcaacacgctgggcggactcatcttcatacaccacccgccaccccacgtaagatgccac

SEQ ID NO: 323569 - DNA, 988 bp, Homo Sapiens
  misc_feature (880)..(936): n is a, c, g, or t
aacgtagcgaggcctgggtggcgaattcggcacgaggaaccgagtgtctcccggacccagccgcgggaggtgcgccgggcagcctcttctgtgcccaacctcaagaagacgaatgcccaggcggcacccaagccccgcaaagcgcccagcacgtcccactctggcttcccgccggtggcaaatggaccccgcagcccgcccagcctccgatgtggagaagccagcccccccagtgcggcctgcggctctccggcctcccagctggtggccacgcccagcctggagctggggccgatcccagccggggaggagaaggcactggagctgcctttggccgccagctcaatcccaaggccacgcacaccctcccctgagtcccaccggagccccgcagagggcagcgagcggctgtcgctgagcccactgcggggcggggaggccgggccagacgcctcacccacagtgaccacacccacggtgaccacgccctcactacccgcagaggtgggctccccgcactcgaccgaggtggacgagtccctgtcggtgtcctttgagcaggtgctgccgccatccgcccccaccagtgaggctgggctgagcctcccgctgcgtggcccccgggcgcggcgctcggcttccccacacgatgtggacctgtgcctggtgtcaccctgtgaatttgagcatctcaaagggggtgcccaatggcaccctccccctgccctcccccggaagttccaatgaccaccattgccccgcctcccggaacccgcccccgtcgggcttgtgggcacccaaaaaacaacaccccccacgccccgcgcaaagccagccctcagcccccgacccgcgccctgaaaccgcgccccacgggccnnnnnnnnnnnnnnnnnnnnnnnnnnnnnnnnnnnnnnnnnnnnnnnnnnnnnnnnntcaccacacccctaccggagaccaatcgaccgttaagccgctacgtcccagc

SEQ ID NO: 323570 - DNA, 932 bp, Homo Sapiens
  misc_feature (77)..(77): n is a, c, g, or t
aggctataaaaggagaggaatccttagtctctcatcttcttaaaaacagcttcccaaaatatttggaaaaatcagcntaaaggtaaatagaaactgcatttcccctccattcttgaagccaatctttttcaagaaatgactaagcagcacctgttgttgaggacagcaataaagccctgaacttgacactcaaggctttggtacaggatcagttttctggcttggactggtcagggagtcacttcactcagaatcttcattagtgattttaagcgatggtgcgttagcactatcttctctttcagctctgcaatcttttctgatagaggaacattttgaatatccatctctgatgcatttactatggcttttgtttttaagagatagcacaccattttgtcactggaaaggcagaagtgacctctcaaggcagccagggcagcatgggtagaatacagatggaaaccaacgggaatcccacaagaaccacagaataaaaggttgtaagtactgcctttgagtgaaccttcaatgccaactaggaagggcgcttccaaaacgacgttatttgtaactctggagaagaccacggccccgagggaccgcgacaggtcccaggcgaggtgcaccgagtcggcgagcactgcgtgacactgtgcgcactggaacacagcgcacctctcaggctgcagccaagacggcagctgcgggccggcggctggctcctcagcccccagccctgcggggccgagcggcgaggaccccttcaccacctgcgtatcccactccatggaggtcgtaaaagaagcttggtcaatcgccctctcagtgccaccacaaaagtccccccggggcggcgttgcacaacgtgagcgatgccgcagcggctgagccgccctcgtgccgaattcgccacccaggcctcgctacct

SEQ ID NO: 323571 - DNA, 696 bp, Homo Sapiens
attttttttagaaggacaaccttgagctgcttgaggtttatttataaagtacaaggtacacttactgggcctggcctttttaatttttactcttttgccttcctttccacccagccaagatttttgcttgctctcacctgggagttgagccgatttcacaaatctgctcttggctgtcatgagccaaataccagcacaaccttccctggacctgagggtggcttcatcttagaaggcccacaaggatcctgctgaagcaaatgactctgctccagtcagctcaggcctctatggagcaaagaaactggtgtccttcttggagcgctgccttcatctccttgaactgagccaactggcaggcctcctccagccccagccagcggtaggcttggtgctcatgggagaggcggatctccacgtcatagtccttcacctccgccagccagtaaatgactgttttaggcttgttcctggccacataattgagttcccttttgaacccctcaataatggtcagctggcctgcttctatgcctgcttcctcttgggtctccctcagggctgtttccaagtcatcctctcctggttccacatggcctttgggaggagtccagtgatgaatgccatctgatgcctgcagcagtaaaaactcaattgcatcctcgtgccgaattcgccacccaggcctcgctacct

SEQ ID NO: 323572 - DNA, 768 bp, Homo Sapiens
  misc_feature (67)..(67): n is a, c, g, or t
  misc_feature (86)..(86): n is a, c, g, or t
ttgctctcacctgggagtgaagccgatttcacaaatctgctcttggctgtcatgagccaaataccangcacaacctttcctggacntgagggtggcttcatcttagaaggcccacaaggatcctgctgaagcaaatgactctgctccagtcagctcaggcctctatggagcaaagaaactggtgtccttcttggagcgctgccttcatctccttgaactgagccaactggcaggcctcctccagccccagccagcggtaggcttggtgctcatgggagaggcggatctccacgtcatagtccttcacctccgccagccagtaaatgactgttttaggcttgttcctggccacataattgagttcccttttgaacccctcaataatggtcagctggcctgcttctatgcctgcttcctcttgggtctccctcagggctgtttcccaagtcatcctctccctggttcccacatggcctttgggaggagtccagtgatgaatgccatctgatgcctgcagcagtaaaaactcaattgcattgttgtccactttgggaatgaggcatcttcggaagatgatcaagccacatgctctcaaggccatggtcttatcctaaggactttgtgtataactgcaggaccctggcaactaccctcagtcaatgtggcctctatcccaactcctccagggcttcctgtaaaacagggctggcatgtgtttgttgtgacactggagatcctcagaagcaaacgcaccgaagcagaaggccc

SEQ ID NO: 323573 - DNA, 904 bp, Homo Sapiens
  misc_feature (145)..(153): n is a, c, g, or t
  misc_feature (164)..(173): n is a, c, g, or t
acgcccccgtccttgttggtgtagcctaaagaatataaaagccctgtgggggggttcccagggggcagagaacccgcgggggttatatgtgaagccccccgaatgtgttgcgtcccaaaattgtttccccattttaagccggtgnnnnnnnnnctttcccctgnnnnnnnnnngaaaccaattaggaattggccccttcggaagttttttagtgttgggtgtgtcggctgtaaatggaagccaagagacgttttttctgaggaagccctggcgggggacccatgctggacttgctgggggaaagtgatgtctttgtgggactgtccaagcttccatagcctacaacaggggctgacatctgccctatgcgtgggtccccatcagctgtaggagcaaaaaacgtgtgttcagacagggcaggacagcacactagtgcagtccatgaaagcttcatgtccagaatgttagagcacttcacaaactgtcaagcagtgttgaggccccactcgtgtctggcagatgcataggatgcttgaggtgaagtggcttggagtgcatcactggcggtccatgctcgtgctgcccactgggatgcatgagaagggccctgcagcagtttccattctgaagtcccaggaaggtgcttccatagcgaggacattataggggagcaggagaagaaagtggggtgtcaaggcacgggtgccccagtcacctctccttacgctccactctccacagaggtcaggtgattttgagaaccaaactcatggaattagctcagtctagccaaaaatagatggtcactgtgctttgtgtgcagtaggattatagaaagccacgacacatcagaaggaagctagctctccttgtggccaagtacatacatcgaccgccgcggggg

SEQ ID NO: 323574 - DNA, 1274 bp, Homo Sapiens
  misc_feature (305)..(305): n is a, c, g, or t
  misc_feature (576)..(576): n is a, c, g, or t
  misc_feature (772)..(820): n is a, c, g, or t
  misc_feature (824)..(824): n is a, c, g, or t
  misc_feature (826)..(1016): n is a, c, g, or t
  misc_feature (1021)..(1021): n is a, c, g, or t
  misc_feature (1033)..(1033): n is a, c, g, or t
  misc_feature (1039)..(1045): n is a, c, g, or t
  misc_feature (1047)..(1051): n is a, c, g, or t
  misc_feature (1053)..(1059): n is a, c, g, or t
  misc_feature (1061)..(1070): n is a, c, g, or t
  misc_feature (1072)..(1101): n is a, c, g, or t
  misc_feature (1103)..(1122): n is a, c, g, or t
  misc_feature (1124)..(1151): n is a, c, g, or t
cacggtgtccacgtgggtgcgggtcagacggtttgtggcgatgatacgggatcgtgatgataagcgtgcgagcatattgccggcgggatgagcgtatcttgggacaccacgtcgcttagcgcgcgattacgtcgctcggcggtggtacattaccagcggcgggtggtataggcgcggagaccgccactgtatcccgtctacgcgcgtgcgggggtccgtcacgacggatgatattagcgggcttgtcactagggctagtgggagaacaccaggggtgttattgtcacgcattcggcggcgcgcgngcgggacccgcgtgggcgagttcagatcgggtcctgacaggaattcgtcgggggtcacgttcgagagacttgcgcgcggcggcgtagcgcgcctgcgttcttgtgtgcgtaatgcggaccggcgtttatggcgggcggtgtggacgtctatgagaactgcgcgcggaagcgtaataccgggtgacccgccggtcgaagcagcgcggccatcgggaatgtgtggaggccggcgccggtcgggagggcgctgggggtccggcgcgcgtcgttngtggggcgttgatgggcgcggcgccgtacgcgggtcgggcgcggctcaatccgggtcgtcccggcccctgtttcgcgtctttgtccgtttcggcgcctcgccgctgcgcggggccgtcgcggtgcggcgtgcgtcccgcgccttctgggcgggtgggctgtggcgtgcccgtccccccgggctcgtgcggtgccgnnnnnnnnnnnnnnnnnnnnnnnnnnnnnnnnnnnnnnnnnnnnnnnnncccngnnnnnnnnnnnnnnnnnnnnnnnnnnnnnnnnnnnnnnnnnnnnnnnnnnnnnnnnnnnnnnnnnnnnnnnnnnnnnnnnnnnnnnnnnnnnnnnnnnnnnnnnnnnnnnnnnnnnnnnnnnnnnnnnnnnnnnnnnnnnnnnnnnnnnnnnnnnnnnnnnnnnnnnnnnnnnnnnnnnnnnnnnnnnnnncgcgncgtggggcgcgngggggnnnnnnngnnnnngnnnnnnngnnnnnnnnnngnnnnnnnnnnnnnnnnnnnnnnnnnnnnnngnnnnnnnnnnnnnnnnnnnncnnnnnnnnnnnnnnnnnnnnnnnnnnnncccctccctgagatgtgaaggagtggcaaatgtccaggggctgctggaagacggagctatgttccccgaggtacccatggccagggtgggctgggaggtcctcgtccgaatcgccacccagcc

SEQ ID NO: 323575 - DNA, 1190 bp, Homo Sapiens
  misc_feature (499)..(509): n is a, c, g, or t
  misc_feature (714)..(773): n is a, c, g, or t
aatcacaataacaagtagcgaggcctgggtggcgaattcggcacgaggaaggtcccagggccccacctaggtgcagagccggcccctcacctaacagctggttcctaccagaccggagaggggagaagtcatgttgcccctaaacccctccccacctctgcaggacagacatgggagggaggacagggaaggccaggcttgctctgggacttttatgctcccagaggccctgccaaactgaccacctcccccgactgccactctggacctaatagctgttccttaggccccactccatgccacccccaccagctggaggacccagcctcacagtgtgtcctttgtgccagaccaagcggcccgtgggggatggggggcagggagtgtaccacacagggccattgtctcacctcccaaagggaccgcctgcccccagctcatcccagagcgtccctgctgcaaccctgacagccgtctcccaggccgcttccccaacatnnnnnnnnnnngcccttccctcttgaccccggaaagggcagggaatgacctccccgggggaggaatccccaccggcctcggataccccccaacttgccctccgcgggccccgcattacctaagcgctggcttttaacaaaacgttgcccttcgaaccacacccttccggcgcccaggggacccaacgggactcacgcccccggttattgcccttgnnnnnnnnnnnnnnnnnnnnnnnnnnnnnnnnnnnnnnnnnnnnnnnnnnnnnnnnnnnncgcccgacgggcccccgttcgcgtcagcggaacagtgaaacccgccactcctcgcctcttacgcgcgcacgccgcccagccgttcgcctaccctcccagtctgttgccatcttgtctccccggtcacagtctacgccacccgcccgccggcgcgaggcgaaggcgaccattaactgcggggggcgcggtttctcgcggcaccacgctaccactcattgactcgatacactacccgccccgggacgcactcaacatcggcacacaccccgcaccatctatcgtcaatttatgatgggtccccctcaacggggcgacctcgccggtcttccaatagactcacgcagcgagggcgcccggcgcgaacgtcatcagcaccctcacaccagaggctacacggtggcggacagactccataag

SEQ ID NO: 323576 - DNA, 1005 bp, Homo Sapiens
aaggagcgaggcctgggtggcgaattcggcacgagggtggatccagagaccagaggccaaagagatgtgataaactatgtcagtgactggagccgaccctggtcagtccctggggcaggcatggcagcaagaggctggtttccacatgtgcccagagtttgcttcatggaaaggccagctctgcgcaaaggtccaggggggaccagtcacgaaggtgtgaagaggcctgagtgtttgtcttccattcagctgagaaaggcagaacaccgccacactgctgcacagacggcaccttctacacctttacactcctcacactgagctccagggtccggacagctgtgcacctgccacctttagcaaagcgaaggccaggggcccctgctggccttctgcaatgggcatatattttgtctacccagcattcctttcctttttgagaataactcttcaggtcaaagtagtcacgcccagtcttcctgggcaagagaaacagcccctccttccccttcttcctgggtgaatgtgatgaggatgaccaattagaatagccccaccccctaggcagggtgattggctcagggctgggcatgtgacccagacccagccatactgagtcctcctggggtcttgccagagttcctgtgcaataaacccactgtctgggacggtaagcacggcactagctcacgatggccagtagccacctggctccccccttgaaacggcctgtctgccggtgcagctaaacagagctgagagatgaaggcacagcatgagcccttgatgtgcgctttctgctcctgctcctgctcctggccccttcggaggcctgtggcagtggcagctggggcccggagacaccaggccggcactgctctccttccagggcaccccgggtttggggcgacccctgactccccgggtggcctgcaacaaccccacgtgggccgaaatgggaacccttcttcacggggggggctcccttcccccaagccccctggc

SEQ ID NO: 323577 - DNA, 1054 bp, Homo Sapiens
gcctgggtggcgaattcggcacgaggtgcgcgtgttcatggcccaccaggacctgcggttcccccggatcgccttcttcagcacccgcctgatcgaggccggcgagcagctcgggtttgactatggagagcgcttctgggacatcaaaggcaagctcttcagctgccgctgcggctcccccaagtgccggcactcgagcgcggccctggcccagcgtcaggccagcgcggcccaggaggcccaggaggacggcttgcccgacaccagctccgcggctgccgccgaccccctatgagacgccgccggccagcggggcgctcgggagccagggaccgccgcgtcgccgattagaggacgaggaggagagattccgcacgcaaccgaaagggtccttcggggctgcgccgccggcttcctggaggggtcggaggtgaggctgcagcccctgcgggcgggtgtggatgcctcccagccaccttcccagacctgcggcctcaccgcgggcccagtgcccaggctggagcgcacactttggtccgcgcgccagagacgctgggagtccgcactggcatcaccttctgagtttctgatgctgatttgtcgttgcgaagtttctcgtttcttcctctgacctccgaggtccccgctgcaccacggggttgctctgttctcctgtccggcccagactcttctgtgtggcgccgcgaagccaccgttagcgcgatgcttccgttcgtcctgcccacggctgcgtggctggggcgagtcccaggggccgcacggagggacagtctcctgtcaggcttggagaggtcaggagaccgtccttaccactaactttggagaaaatgtgggtttgctttttaaaggaatcctatatctagtcctatatatcaaacctctaactgacgtttcttttcgaggaagtggcttggtgggtgcagcccccgccggttccgttgacgctggcaccttctgttgattttttaagccacatgctatgatgaataaactgatttattttctaccattactgaacattagggacaaacac

SEQ ID NO: 323578 - DNA, 989 bp, Homo Sapiens
ccccttttagggattaggggaggcccaagggaggccggggggggtccacggaagctggggcccaccctgcaaaaggttgaaccccccagaataggtcccttccccttccggcttgtgcccggaggaggtagggagagaaaaaaccctgacttctctgccctcttctcacctccagtctcccaccagagcctcccactgaccaaatctaactggaaaccaacaggcatgggagctgagaaatgtaatttaccggagtagctcctgtgagacagagtagggagaggaagagtgaagaatggatctgagagcaaataagcagatgaggagcacgaatcctcccaccagcattgtattcctggtacaacagaggctctccaagatcgtgcatcatcttgtaaccaaagaagatctacccacaagttcagaacagtttagcatagagtcaagtattaggaggccttgcttcttacctctatggtttcacgtcattgtatcgcctccctttggatctctcccttattttgggtggaggagcttctttggctggagcctatgctgatgggaccaacgttagagctttgatgcagagaaaaatttaaattctgcaggtacatactgttcttcctccccttctttgccatcttgtagacctgggccttttattgcagaggggaccaggcgagagagaagctaggggttcagtgcatcccgtctttctcctgggaaaacaggacagagtttgtgctccgtgaaggtgtgtgaaggaggccatagaggtgggcagtggtatgctgctcccagtcatctctgcagaggccagtggctgttttcatgaaggctcttcctgcgtaagactgtagtgtttctaatttgccccaagcacagggcatatgtaatttggagtttccctggattgaggacagctagaagcaatctatatgcaagatgaggatgtgcgcacttgagcctcgtgccgaattcgccaccca

SEQ ID NO: 323579 - DNA, 1391 bp, Homo Sapiens
ggaggggcaagctcttttccccagggggtattgggaagagggtgattccagggggatgagggtcttctgaggctatagcaccccccctggggggggcagcccagctctgtgaaaattcccaggtgcaggtgaacaacgctggaggcctggggacttggactctgagaggagtttgggcagacacagcagcctccggcccccaacattgccctgggttggcaggccccagccctggtcctgacaggcaggtccttgagctcctcgggagggcgtgacgacccttagtgtttcatgggaccactcggtgggccctcctccgtgccaggcctgtcagaggacaacctccggtcccaggtggtccccacgcccgctccgctggtgccgcacttccaggtgcttgttctggaccttctcaaagtgctgcagcagctctgcgtaggtcgatgctaggggagtcagctttttgggacttggggggctgccctttagactgttcttcggtctgcagcagctcagggttgggcacgccctggaagccggtgcgagagcagctggaaggcgctgctctgcggcaggagcatgagcaggccgtagagggcccttgatcaggtaggggttgtttttcacgtccagcagctgcaggcgcagatatgtgaagatggggcactcaatcagctgcaccagcttgtccacctctgcgaggaagtccacggtgacctccaggtccccaaacttctggatgaggtcataggcgtgccggtagttctgggtgaggaagcagagggacaccgtggtgactgggttgtggcaccaggagcggtacaggcagcagaacaggttctggctctccagggtcttcaggtccttcagctggttccttagctggaagagctctgtggaggtcagcaggatggtgttgagggcgtggaccatggtcgaggcgaacttgaggtcctcctcccgcagcaggatgtctgccattgagtggaagatgttctccgcattcagcaggaggcacagctgcctgatgatgaaagggcctctgacctccaggagcttccgttcgctgctgaatctcttgagaaggttgatcatgaacttataaaagtaagaattcatggtgggagttgaaggagaacattctaagcctttggtaccagaggtgttcagtaggccggctctgccaggggtgggcacctggagctctgagtggctggcctggaggtcagggccatcgagggggcctgggtcatccgtctggcctgcgggggaggaagcgatttctgccagcacctccaggtccttcaggatcacctcatccgattcatccgataacgtctgcagtagcggacgcgtgggtcgacgatatcccgaaattccggccagtacca

SEQ ID NO: 323580 - DNA, 942 bp, Homo Sapiens
  misc_feature (164)..(164): n is a, c, g, or t
  misc_feature (166)..(166): n is a, c, g, or t
gttccttgaggaagaaaggagttttcaagccaataaattctcaggatggaataagtttccatttccttgggggcccccccggaagggagcaccgcgggcagggttcttctgccggcccgggtttccagtggcccagcaggctcttgtggggccggcattctttngnctgtccctctccaccaggcgctggctccgcagcagcagctcctcctgcgactggcactcccgctcccgctcctgcagccagctctccctggtcgcctgcgcccgctgctgctgctcacacctgcacagccagcgccgctgctcctgctggagctggtgctgaagctggtgcacattggccagctcctcatgctgcctgtccgcgtcgcgagacttctggtcctgcaaggggccgcctcggaggatagagtggccgagagacaggccctcctgctgctggagaaccagcctgtggatctcaatgtggctgtcctgaatggtcaaggcggcctgaaggctgtataagagacgggttaaattctgtatggcttgtataatctctgattgtgaagaacctggaaaatttctacattccaccttctcccctgcatcagagacggccaagtcggttaccacaccctggatcccgggatccacatccgaacagcctcttccttctctccctcctgtgactaatgaggcagtcggtgatcctggtacatcatgagaactgagtgtgtccgccaagacagagtctccacaactgtcctcacatgattgactcacggcgcccatctgtgaggccttcactgcaacttgtaggctctcagcttctttcagtgctgctgccagtaatgaggctgcctggggaggctcgcctgggtcaggtttaataaggaggtggggctctagatggacgtcctcaaatccgccctcgtgccgaattcgccacccagg

SEQ ID NO: 323581 - DNA, 1290 bp, Homo Sapiens
  misc_feature (119)..(130): n is a, c, g, or t
  misc_feature (162)..(180): n is a, c, g, or t
  misc_feature (271)..(271): n is a, c, g, or t
  misc_feature (300)..(300): n is a, c, g, or t
  misc_feature (320)..(343): n is a, c, g, or t
gggcggtgagggttacgaagccctctctttatttcttaccgccgagggtgtttctttggtggggagaccaacgcataggtgtccgagttcttttcttttttctcgtacacggggcccgnnnnnnnnnnnnaaaaataatgttgttacgaaaagaatttcttnnnnnnnnnnnnnnnnnnnccgcgacaattttctttcctctctttcttgttcgtcctttgttcggtgccctggcgtgcctctcttgtttttttggggtggttgttctctnttttttctgtgtcggtcgcggccttcgtntgcgtgttgttgtcccttgnnnnnnnnnnnnnnnnnnnnnnnnttgcatgtgcacacatgtatacatttattgcataaaattcatcatagcactttcccccatatttttataatccaaaaggaaaatgattcaagaaaggatttcattgtgctcagtttcaaaaaatataaaaatggacatcagattagagatacaagttcatacgctgaactgaattgtacataccaactgcctggctatggaaacccgtgacttgacttaggggtgctgatgacatgatctcgacaagaaccccctagcaactctcaggtggaggcagcacagggatgcggttcctggtgaggagggtcctcactcggtgaccacactgcctggggctcacagctgggagggctcacccatgagggacgcgggtggacgcccactgcttcacatgcgtaattcgcattagaaacatgtaaagccattcagtctgtgcaataaagagatcctgtatgaaatccactccattccttggagggaagctggcccggaggcacgctctggttgacgggtgacgcacagtcctcccagggcctgcattgcatccatgacacagacacacgtgaacacccagcccgccggtcctagcagccagctgtgaaagctgtgtcaagtcacgggggttcctttctaacagctaaagctcaaaggcatactggaccctgagggaaaacaggagagcctgagatgggaagggaagaaagggatttgcaccttcacagagcaaaatgggacaacgggacggggaggttgaagacaaggccttggctcaggagtgtgtctgtcttcagcaccagccagccccaccgttcccgctgcactgtgtgtgcaaagacacacactctcaccacagtgccacacctgcggcccagacactccctcctggtctctgaaggccagaatcccactcgtgggaagatccagcctcgtgccgaattcgccaccca

SEQ ID NO: 323582 - DNA, 902 bp, Homo Sapiens
  misc_feature (804)..(812): n is a, c, g, or t
gggggtaggaatgggaaaaggggcaacctacaaagattgttggggcaagggaagtcacaagctttcggatgggcggtggcttttcacaaaacatttagctcatcttattctctctttgtcctctctcccctcctgcccgcccgcaccctggaattgccactcagttcctctgggtgtgcacatatgtttggagaaatagaggagagaaaagagggccacgtaactgagagcttacagtgccaatgccgtttgtgttctggccagagtggagtgcgcagccctgactcccaggcgctgagattgttgcctggttacccaggaagctgctgttccggctgcccagcctttctctgagccagcggatgcacagtccgtggccttcttcaggcttattgatgatgctttttgcaaatgttgaatcatggttctgtttctaagttggatcttttttgttttctccttgccaccctaatttgacatcaaaattctctcttgtgcattgggccctgggtcattcaaacccaggtcacctcattccccttctctgttcacacctaatgtcttgaagagtaggtagcagcagtgtgggctgaacctaggccagcttgcttagcgggtcaccctgctgtgaagtcctggcaggtgttggtaatgtgtggaaatgcagtcagcaagtttgctggggagtttgataaaagtttaaaccaaaccaaaaaagcctccggataattttggtccacgacttcttctgtagctttaccccaaaaggaggaatgggctaccccaagaaattgaaggaaaaannnnnnnnnaacaggtggaattaaaaaaacctaaccggggaaagggcctaaaaggggccccccctcgggccccctttctcaaaaagaaaggggattggg

SEQ ID NO: 323583 - DNA, 853 bp, Homo Sapiens
cctccaggtatgtgtcatgggcgcgagagggtcctgtttcccggttcccgcaccccacaagggggttcacctccttggggaacgccttgtagagcccccaccccgggcgagaagtcgatccccttggtcctcccttcccttggatgatgagccggggcgacgtgatcttggacaccttctcgatgttagggaaggggtggaagcagtaggtcttcttggtgtcagggagggcgacgcgcatgcccgaggtgagcggcgagtgcagcaccaccgcggcacactggtagcgggaggccaggtccacggtgggcaccgtgccgatgctctggtgcgcagggcctgccaggcggcgtcgatgtcggcatagaggttcctctcggaaggcctgcccgagctggcatcgtagccggagtagtcgtaggagaagatgttgcagtggaggcgggagcccaggccaatgtagaagctggcaccaggcacgcagcgaacatacatgcaggagacgcggttgccgcgggcgctcttggtggggaagacctcgatggtgtccagctcgcgctgactgtactggaagtcggtatgctccgtcaggtgcagcttcctgcgcccgggtgcgcccgaggaggcccgcagggtccccaagggggcggtcccggccccaccaggccccggctcgggctcaggcaccagggagtaggtggcctccggcggcaggaaggcgagcttggcagcgatgcggccggggcagggcgggcagcagaagaggcagcagagctcactcaacgacagcccgttcatggcgggcgccgcctgggcccctcgtgccgaattcgccacccaggcctcgctccgt

SEQ ID NO: 323584 - DNA, 950 bp, Homo Sapiens
tggtgggagggggtgccactctccgcagccaccacctctcgatgctgacctgggttgcactggcatctcattgggcgtggggactccgagagtccaaaattgggtggagacatttggggacacagctgcctgaattcctcatggccaagggggtgggcaagggctgcagggaggaatagtgtccgctgtcctggccagtgcaccaggaacggttttctaaccctggcaggaaggtgtgaagcattcaggatgtgggggccacacagttcccagtgtgcacctaggggtgaccaggaggaggagaggcgccagggcctcccttacccccgccccaggggcactccgtaggcaggatccctgcagatcctagctaggaaacgccagtgaacggcagcgcagggaacggggcggggccgctggcttcgcccaccgccacggtgttgggggctgggggtggccctcgggactggtgtggagcctgagcctgacccactgacttggctgagtggggagactggagggtcgcatccggagctgggcccggggacgcccgctggtgggaagggtgcgcgagcgtcggaggccgcggctgaccctgctccggcgccgccaggtacggcatcagcccggacagcatcatcctgtacgggcagagcatcggcacggtgcccaccgtggacctggcctcgcgctacgagtgtgccgcggtggtgctgcactcgccgctcacctcgggcatgcgcgtcgccttccccgacaccaagaagacctactgcttcgacgccttccctaacatcgagaaggtgtccaagatcacgtctcccgtgctcatcatccacggcacggaggacgaggtgatcgacttctcgcacgggctggcgctctacgagcgcaccgccaaggcggtggagccgctgtgggtggagggcgccgggcacaacgacatcgag

SEQ ID NO: 323585 - DNA, 775 bp, Homo Sapiens
  misc_feature (17)..(17): n is a, c, g, or t
  misc_feature (75)..(75): n is a, c, g, or t
  misc_feature (111)..(111): n is a, c, g, or t
  misc_feature (161)..(161): n is a, c, g, or t
  misc_feature (270)..(270): n is a, c, g, or t
taaaattttaaatcttnaatttccgttttcacgtattttcttcttgcttccaaaaggaaaggagtgcgtactctngttgcctgtacatcgtccacagcccctgggtcgggnggtggtccctgggccgcccggggggtccacatgcagcccctgggtggggnctggcgcggggtgaggtccgggggccgccttattgctgaggtccggccggttggggcgccgctagcgcttggctgggcagctcctgggagatgaagcgacgcaggctcncatggtactggctgtagatctcgatgtcgttgtgcccggcgccctccacccacagcggctccaccgccttggggcagcgctcgtagagcgccagcccgtgcgagaagtcgatcacctcgtcctccgtgccgtggatgatgagcacgggagacgtgatcttggacaccttctcgatgttagggaaggcgtcgaagcagtaggtcttcttggtgtcggggaaggcgacgcgcatgcccgaggtgagcggcgagtgcagcaccaccgcggcacactcgtagcgcgaggccaggtccacggtgggcaccgtgccgatgctctgcccgtacaggatgatgctgtccgggctgatgccgtacctggtgcgcagggcctgccaggcggcgtcgatgtcggcatagaggttcctctcggaaggcctgcccgagctggcaccgtagccggagtagtcgtaggagaagatgttgcagtggaggcgggagcccaggccaatgtagaagctgctcat

SEQ ID NO: 323586 - DNA, 1281 bp, Homo Sapiens
  misc_feature (469)..(469): n is a, c, g, or t
  misc_feature (1163)..(1205): n is a, c, g, or t
aagcaggctggtccggtcggaatcccgggatatcgtcgacccacgcgttcgcgtctggctgaagctggagaggcggtgctgctgctgcgggaggggcttctgcgccgcgtgcgttgcctgcagctggggtccccaggtcctggccccgtggccgccggccccgggcccgcctccgtctctggccttgccgcggggtccggccgcgactgcgtgctgctgcaagaggactttctggcgcacaggggccgaccccacgtctacctgcagacgcatccagctcaacaaccccacggagcgcgtggccgcgctgcagactgtggggcccactgccggcccagcccccaaggccttcaccagtaccctggagaaggtcggagaccatcagttcctcctctactcaggccggtccccgcctacgcccacgtggttggtgcacctggtggtggtggccgccaagaagctggtgaanccgcctccaagtggctcccaagacgcagctggatgagacggtgctgtgggtggtgcacgtctctggccccattaacccccaggtgctcaaaagcaaagcagccaagggagctcaaggcgctgcaggacttggcacggaaggaaatgctggagctcttggacatgccagcgggggagctgctttcaagaccaccagctcctctgggctcagctcttcagcccaggagtggaaatgaagaagatcactgacacccacacgccgttctggcctcaccgtgaacctgacgctctattacatgctctcctgctcgccagccccactgctcagcccctccctgagccacagggagcgagaccagatggagtcgacgctcaactatgaagatcactgcttcagcgggcacgccaccatgcacgccgagaacctgtggccggggcggttgtcctccgtccagcagatcctggagctctctgacctgtggaggctgaccctccaagaagcgtggctgcaaggggctggtgaaggtgggtgcccccccgcatcctggcaggggaagggggccaagccttccggggcgccgccctcctccgccgaaaccccccttccgtccaggggccacccccggcacccgctgtacctccaccctatgccttccccccgccaacacccgatccctacaccacgcctttcctgnnnnnnnnnnnnnnnnnnnnnnnnnnnnnnnnnnnnnnnnnnntctctcccggaggccagtccgcccgcagctccccctctttccgctccccctcccactatattgccccttccctcct

SEQ ID NO: 323587 - DNA, 665 bp, Homo Sapiens
gagactgcatagggctcggcgtgggatgggggggcgcgcggtagccccgagggtcctccctccccagcacccagtgtggagggaccaggatctgacagccatgagagcgacaaaggagctttaggtgcatggagaactctgcatttcactgagttctcaggggcccatccactttaaaaacagatgtacgtatttacacacaaggtcagataggagctaggacagacagggctctagaaagtgaggtggggcgttcgccctcaagccagccccaggacagggcagagtgagggctccgacttcgaggaatggacctgatgttcatgccggtgtgcttatcactacgggcgccctccacggggcccccactgggagccaaggtgctgagccgagcgatgctcccgggggacgggacccggccgtcccactccccaggaggacagcagaaattcattacgagacagtttcgggggcggggggtgcagaagaggtgaggggcccaggttaagttcccaagataactgattaaaaaccaaaaaatttgatctaagtttaaggagagaaagcagccaaaggctccctcttggaagcggagttctggagagacggcgtccgcggcgaggcctctccggccggacccacctgacaggccttctgaattcttt

SEQ ID NO: 323588 - DNA, 435 bp, Homo Sapiens
ttgacagaagtaaaaatatttattttatcttaaaaatctggtcccacaaaaaggccaacacttttttcagttcacggtcttgacctttcaaagaagaaatctttcaactgagaggtgagttaataaaaggaatgtcagaggtgctttcagatttcttataaaccagtaaaccaagcaaccctggacttctagtttactgagctccttcttctagccattcacagttcctgaaggagaaaagaagttgtttgcagataaggcactttagaaaccaccaaagagaaaacccaagtctgccaggagctgcactgtgaacatgtgagccgagagggccaccagcagacagagtgccaactccccacagcttccatggacaacagcatccaccttcctggcccaacactgttccgtctgggctttccagcacccgccttt

SEQ ID NO: 323589 - DNA, 640 bp, Homo Sapiens
agggagggtattttcttaattttattattaaaataatccaatggaatatgggccatttttccccagtactcatcaaaaaatctaggccccggaaaagagattattcagtgcttttcgaagaagtcaaaaaatccttaaaaccagagtaggcagggtacagcaaataaaatgcagacactttaacataagaaacaaaatctccaaaattgttctcctacctacccaatctgccatattccactttttccaccaatttcaggagtttccgccacatggtttggctccaatgagccagtccttgcagcatccacagacacgaattggatctgtgtttttatatcaacagataagttcaattacttcatgatattcttttatgcacaggtaaagaactgatattgataatccaggaatttggttttatttttacacatgaactgtgaacatagaactgcatgccctagaagaaatgacagctggtgagaaaataggtttctgtgcgttatctggagccaagagtgctaggtgcagaaggatcagtagatgatacagtggccaccttggtacagttgccagtgagctatcaggaatcacaagtagatttgaggaaagcttcacctcgtgccgaattcgccaccca

SEQ ID NO: 323590 - DNA, 951 bp, Homo Sapiens
  misc_feature (214)..(266): n is a, c, g, or t
  misc_feature (748)..(748): n is a, c, g, or t
  misc_feature (770)..(770): n is a, c, g, or t
  misc_feature (815)..(815): n is a, c, g, or t
  misc_feature (827)..(827): n is a, c, g, or t
ggcctgggtggcgggaagatcttccatggcagtggtgtgggggacccctttgggccacgctgttacaaaggggacatcatgggctgtggaatcatgttcccccgggactacattttggacagtgagggggacagtgatgacagttgtgacacagtgatcctgtctccgactgcccgggccgtccggaacgtgcggaatgtcatgtacctgcacnnnnnnnnnnnnnnnnnnnnnnnnnnnnnnnnnnnnnnnnnnnnnnnnnnnnngatagagccggagcatgagggcaggaaggtggtggttttcttcactcggaatggcaagatcattgggaagaaggatgctgttgttccttctggaggcttcttccccaccattggaatgctgagctgcggggagaaagtcaaagtagatctgcaccccttgagtggctagggcctcccctccagacctgctccttctccctgctcaccctctgctgggccaggcacccagttcctgacttcccagaggcttcgtttacccagcaggcccctggaggtgtgtagtcactctgcccccactggctcaggcccctgtcacgcttctctgtgcccacgtttctgacctggtgctgccactgttgtcagtccctgggcctgaggtccctggttggacaggaatggacccaaagaatggtgttgggaatggtgggtggtcccactcgctttggtcagtggggcttctgggtccccctttccctcccggncctgtggtgggtgggaaaggcntgaacaccctatctcagctgctattcgggcatgatgctttgtaanagggtagagtanacagcccccctccctactcaccatggtatttctccttggaattcccccttcctggtttccttccccgggtggggggaacccagttggctctggcctaacccctggcagggccagggggacccct

SEQ ID NO: 323591 - DNA, 1305 bp, Homo Sapiens
  misc_feature (890)..(936): n is a, c, g, or t
  misc_feature (1148)..(1204): n is a, c, g, or t
taaaggaaaaccaggttggccggtggcccacatcctctttgaaatagatgtaccagtgactaggagcttatcatctggactgaaacagcagtcagtcattggaaacatggtgggaagacccgaggctgaaaaaaagtggtttattaaattgtcggatgtccccataattttaatgaatcgtcccctcccacgagaggcaaggacattcccatcataggaaaaagtcacgcaagaagtgtctgtgcccgagtcatgagcctgtttatagtggaacttaggatgaacagtcaaatttcggtcccagatctgtatgcttccattctggcaggcagctgctatgaggtttccatctctactatatgtgcacgtagtgggaatgacttttttgccttgcatcgtccgtggtttaaacacacttttttgcttctttggattttcaacttcccacgtcctcacagtcgcatcatttgagcaagtcataaattctccctttattttgggatgccatgagccagtatgaagcattgctgtatgacccttggtgttggccatgtccacaatatactggtctccttttatacattccattacttcaaaaccatctctgtcaatcaccttggcctgagagcttccagatacaacaagaatcatgtctcctgtgttactatactgtaatgacttgatctgatggcactcacagggctgaagggatcgaaatgccttaaaagaagcatccattccagcaaaatcccaaaacttaacatcatagtcatatcctcctgtcaccaaacgggcacctgagggatccagacccaaagcagacactgttttagtgccatgcttcagcgttatctcatgcgagtcaggaatcttgtgaacaggattttccnnnnnnnnnnnnnnnnnnnnnnnnnnnnnnnnnnnnnnnnnnnnnnnattaagaggtggaggtaaaggaccgaggatatcttcctccataaaattaactggttttcctaccattttagggggtaaaggagggccaattaactcatcatcagaagagtcagaactctgttcactttcactgctgctcgtatccctggaagatgatttggagcaatctctgaccacatttgatcttgaggatgttggctcaatatcttcannnnnnnnnnnnnnnnnnnnnnnnnnnnnnnnnnnnnnnnnnnnnnnnnnnnnnnnnagtgttttgcgacttctttccacagctgtccttcgagtttgttcaaacattgcttccaagtcaaatgtgcgagcttttttaccgaaccccgtgaagccccc

SEQ ID NO: 323592 - DNA, 684 bp, Homo Sapiens
  misc_feature (66)..(66): n is a, c, g, or t
ttgaagttattggtgtttattagctcaccaggccacaaaagcaaatcccagcagcagctccttccntggtggcccatctgtctacaggccttgagcagctgcctagagtcaggcctccagagggtcagtgggttcgagctggcacagagctgagccactttctgctgtcagagttgtgttccctgtttccttgagatcctgactggaagaaggggctgcggatgtcaggatccaggccagggggtgtgcactggtctagtgcatagtggtttctcggcttcctacggaccatcttcttgtccagctttgggcagagcaggatgcagggcacctgggcataggggctctgcaggttgggagcatagttctgctgcttcagccggctcaggatactgaggacctttcgttctggaacttctgagctctcttcttgctgggggttgtagggaagcttctgcaaccgcagccggcctacggccgcttccatctcctgggccttgcaggtgccttccttcagctttttctggtagtagtttgtgatttcctctaagactgcctctggtaaggccagcatctctaccagcagggacaggatctcaaagagtagagtgtgggggttgtggggagccatgtccgacagggcgttccctcgtgccgaattcgccacccaggcctcgctacctt

SEQ ID NO: 323593 - DNA, 783 bp, Homo Sapiens
gatacctatagcctttctgccttgtaatatggttacttccaaataactcttcttttgaatggtaaactgccttcctaagggatgagactgtattttgaattacttctcttcaccatgtctccctcttggctaacgcacagaaaacgttcaacaaaacatgtgctgaatttctgtgaccagctgacactctttttcaatcttctatagtaaatctttgacgctttatggagacagcgttaatctagcagctcacctgctagattacccacccccagcacacctctgcactgagattaacgaaaccatctaggtctgaaagttatcatcaccttatgactcatcccacttggtttgagttcggcaaatgaatcaataccctgaactgactgctgttcacaaagctcttcagaactctcagtgatcgggttgagaatcatctctcagaagtaggccggaaaccccgctcccctttccccttttcttcaacttctcatcagtaatgctcccacgctctcactcccaccttggagaactcaagctgccaaattccttgctgcgtttacctagtggcgatggaggcacatccagccttctctagttcgcggccccgacgtgcagcctacgaagcaccccttccgggtggcatccccaccctgagagttctttaacccgttagcctggccctagcctcaccaccccctgcacccctcctgttctcctcggtcccacgatgtccccaacactgggttagttcaaggcctcgtgccgaattcgccacccagc

SEQ ID NO: 323594 - DNA, 983 bp, Homo Sapiens
ttgaagttaaatagtgaatactctttttattcagaagaatgcatttttaatagaatttcatgcgccagtaaatcagtacagtgaggagttacaggggtggggaacctctcttcaggaaacatctcaccctggcagagctctcaactcccagaatcccctttacccagctcaggtgattagagaccaaggaacagcagatggggctgacttgcagggtaactggttggatttataggtctctgagagcaagagagaggagaggaaagctcttgtaaaggaggagattattatattggaacgggcagttccacagagattctctgagaggttgatgaaggagaattggcaggggtgccctggttctccttcttggttacactcttcaagggcaatggtctggtctcttccgtctgtctctgagcctctggttcgcagtcgaggccacttcttccactctatggctagcactacccccaaggctacaacaaccaccacgattaggctacttcggacaatgttccctacagtgcactcctgagcaacaggccctgctgcccccaccagctccaggggatcactaggctctgaccagatatcagggtaggcctggaggcggtagctgcagctgtagtttccaatgccttttccttctacgttgttgatgacaaagtctccatcctctgaaaactgctgaggtgcttcttctccatcatgttctagaacaaattcaacacctggcaggggtcctcggcactgaagggtgatgtccttccctaacttgaacatggtgctgggccaggctgacagagagggtttagggggcttatcagtcacccagatctccagggagtcactgtgatttgaagctgcaaagggagtagagtccaaataataaacacagctatagcctcgtgccgaattcgccacacggccgcggtgaggtggggtgtaagttgcttttacgggttttgggaatgtgatga

SEQ ID NO: 323595 - DNA, 639 bp, Homo Sapiens
  misc_feature (587)..(587): n is a, c, g, or t
gatccaccagtaatgacggggcattccccatcaccaatatatctggtactagcatggggcgttacagctgctgctaccaccctgactggaccagttctatcaagatacaacctagcaacaccctggaactcctagtcacaggcttactccccaaacccagcctattagcccagcctggtcccatggtggcccctggcgaaaatatgactcttcagtgtcaaggggaactgccagactcaacatttgtcctgttgaaggagggggctcaggagctttagagcaacagaggccaagtgggtacagggctgacttctggatgccagcagtgagaggtgaagactctgggatctatagctgtgtttattatttggactttactccctttgcagcttcaaatcacagtgactccctgggagatctgggtgactgataagccccctaaacccctctctgtcagcctgggcccagcaccatgttcaagtttaaggggaaggacatcacccttcagtgccgaggacccctgccaggtgttgaatttgttctagaacatgatggagaagaagcacctcagcagttttcagaggatngagactttgtcatcaacaacgtagaaggaaaaggcattggaaactacagctt

SEQ ID NO: 323596 - DNA, 1261 bp, Homo Sapiens
aaagtgcaaatggcttttattgagggcctactgtgtgctgggcaacaggtctgcaagggtcctgctttacctccctgtactttgcaccggccagggaggagggtgctggggagacccaaacatcaagctgggggagggtgctgaggtggaggtagaagggggcagaggggcccctcagctgagtccttagggagggaagggatcctggggtctgcccagcttgaaacagaagctgggggccacaaggctctgaatcaggccaggcagggtacaggggcctgggagtcctgctcctttgctgtgagacctttagggaatgggatccatctctgagtggtttctcccgatgaaagacaggtccagagggcagagtggccatgcccaaggtggtggccaggtctgacaggatctgcagtccctgccaacaacctcctcctctgctctctgggcagtagtggcctgctcctggacgctgctttgcagtcatcacctggacctagagctcatctcggggctggggttggagggtgtgcccgttgctgccagtcaggtccaggcgggggttgcgcagggtcttttgggagccgctccagctgatgaggcggccgctgtcatcatcccatggagaggatgtctccgtgtcactgagccactcggcgtccccggcatagtgggtaggggcagcgagcaggggctgggcggagaaggccaccaggtcccgtggccagaagtgtgccttgtactgctcgttggggtgctggtcgaacatgatgggcaggaactcgtccacgggcagcatgcggcgcagaggctgtgaggccagcagcttgcgggcacccgccagacgcagggcataggccagcgtccagtaggagtacccagccaccaccaggcccggcagcccctccacggccgtctccttctcagggttcacctgcttccgtccgaggtagatcaggtcccaagacagtttctctgcctccacatcctccatcagccgctccagccgccccctgaagttgctctcaaagcgcacgtcatcctcaaacaccaggacccgggccaggcccctggcaaccacctcttcccagatggagtaatggctgaggaagcagcccacctcgcccttggtcagagtgcggcccgagtaagggtcctggtagcccgggagcaggtctacgccgaggttcctgatggcactgctgttgagcatccagccatccacagcgtccaccctcgtgccgaattcgccacccaggcc

SEQ ID NO: 323597 - DNA, 1243 bp, Homo Sapiens
  misc_feature (335)..(335): n is a, c, g, or t
  misc_feature (387)..(396): n is a, c, g, or t
  misc_feature (516)..(549): n is a, c, g, or t
  misc_feature (582)..(657): n is a, c, g, or t
  misc_feature (1024)..(1024): n is a, c, g, or t
  misc_feature (1125)..(1125): n is a, c, g, or t
ggcctgggtggcgaattcggcacgaggggagcttaagtgaagaggtacgccttgttcggtggaaatcagccgtagccatgagtttctgccggggctagccctagagtacggagcaggcggacttttcggttccccgccccgccaggtggcggggcctactaggcctccgggcatccccggtctcaagtaggcctcatctgccggcaagggcgcccgaaacgcgggaggcgccatgtcgctggttgcttacgccagcagcgatgagagcgagccggatgaggctgagcccgagccggaggaagaggaggcggtggctcctacatctgggcccgctnttagggggcttgtccatttcactccgtgggaccgagggtgcggccttgccgnnnnnnnnnnacacgactacacgcacagcactctccccctcactcgatccgcaacccgctcccttccctcctcccttccaccgacccttagttcctctttcgcagtccgccttacgccttagtccctgtnnnnnnnnnnnnnnnnnnnnnnnnnnnnnnnnnntacctatatcctcccgccctccctttacccgtnnnnnnnnnnnnnnnnnnnnnnnnnnnnnnnnnnnnnnnnnnnnnnnnnnnnnnnnnnnnnnnnnnnnnnnnnnnngttgcccgatcgccgcttttccccatttcttcccgcccaccctccccggttccccctccctccgcgccgcgttttcccggcattgaactcgaccaagcgtcgcgattcggcaacctctcttctcgaacctccagacatttacgcactattctacaccgttctcatcgtgtcgactaccgtctcccgccgctcgctctacttctcccgctatcaccacgctccttacacgataaactattgagcggatatccacgctcaccagtttccacgctgacaccgatgcgctcacgctcatgtctccccaatctaaccttaccccgccctcacaactatgccgcgccacactcataaccctcgctcactcatnacgactccgaccctcccctccgatctccccgcatctatcccaccgtccaggctcctccgaataccccgcgctaccgtctgttacccctgaccccgattatntaccccactattacgcgtcgcttacccgcccctattcctccacccctctccccgccgctgctggcctgttagccgcccccagacaatcctccattgctcctatcctccccccctcgct

SEQ ID NO: 323598 - DNA, 1048 bp, Homo Sapiens
  misc_feature (79)..(87): n is a, c, g, or t
  misc_feature (194)..(194): n is a, c, g, or t
  misc_feature (219)..(219): n is a, c, g, or t
ccgggttactcccagcttatgaaagggcgggggtcccttttccaaacccccacccggggtcaacagggagttcccgggnnnnnnnnntttcccctgacccaggttttttgttttccaggtagcggaggggcgctggcaggctgctggccccccaccattttcccaagcccggggcacatggccccggctccctncggcagccacacatcccaggggtgngtgctccacgtactctgtccccatgctattttcagggccggcgcacacagacgccatgcacgaaggccaggtgcgtgtgggagacctggctcatgaggctggctgtctcgtagaaggccagggcgatgtcatggtgactagggtccagcactttgagcaccactcgtagctcctgcccacggtccctgccaggcacgagggggtcctcgtcatccatcttgccctcctcagggtccccgctgccctccactcgcaggcggccctcatacacgttggtccttgtgccctggcccaagtgggacagctgggtgatctccttctggtcaacccggtggaagctgagctggctgaggttgagtgtcctggggctggcccgagccccccgcatgatgatgagattggaggtttctcctggttggggcaggcaacagcgacgcagagagaagcagtcatccccggccctcagcaagcagccctgcaaggcagccccaagttcccgaacgctggggaaggaccggccccagccctccagcacgaaggccccgtcctgctgctcaatggggaactttcggagccgcaagctctgcatgccgtctggtgcctggctacgctgggccactgtgaggatcaggcggtaggggtggctggtgctccagtgaatgaggtacaggccgtcctcgggccgcagcttggcctgcacaaatggctccagcaggggtccgtggatcccatcccggatgctcatcaccagccgtgggggagccacctcgtggcacaggtagtggctggagtcggccgtcaggccctcgtgccgaattcgccacccagc

SEQ ID NO: 323599 - DNA, 929 bp, Homo Sapiens
  misc_feature (55)..(55): n is a, c, g, or t
agggttgctcccacttccagaagggcatttagccacacgggctgccatggcggantacaggcccagagccacaatatgtccccttttaggtttttgcagcacacgggcggggcagcttgcgcgtcacagagggggctggtcaggatggcatcgagcacatgagagccagcgggactttgggcaagggacagaagctgtggtcccgtcaaggcacccagacttcgaagtacaagaccaggagtggagaagtgcagcagatgctggagcagtagagacccaaggactgtcacatcccccaaggctctggctgcggccattgccacctggtgctctgcaggcactgccccctcctcctccgtcagtccatagtacacctcataagccatcaaagtggcaaagagaggcacacaggccacttgccgggatgagggctctgcacagtggaatgcctccaacaagagctgtaggaccttggcttggtaggccccaactctgcgacaggcccccaccagggcaatgactacccctgggtggccctgggccaatacagcttccaagacagggctcagctcctcaaacacaggggacagcagctcaggggtagtgactgcatccagtaagcgctgcaaagggaagttggcaatgggatgtgcagccagggtctgcagctgcccctgcaagtgctcctcaaagaggctctggagtcttgggggctccaacaccagcaggacctgctccaggagtctggaactcgtctgatctcggagaaatagcagtaggggactgccatctactgaggaaccgcgagtactcaggtagccaatcacagcattgcagaggtgagcgcaaaactggggaagtttgcggtgtaaaacctgtaaagccacttgaagacagaagctggcctcgtgccgaattcgccacccagg

SEQ ID NO: 323600 - DNA, 1602 bp, Homo Sapiens
  misc_feature (160)..(160): n is a, c, g, or t
tgtttgggacggcgggccgccgtgtgtgtgttgggaggggacccgttaccctcgggaatgcgattctgggcggcccagtaatccttcctcagggatgggcctagggcggtcggccggagttcaggcgggatttccacgccctcgggctttggcggcctcncttccttgcggccagggggtgccaggtcaggactcccttcccgccaacagcgggaaggatgggaggtcactccctttcttgggggggcagaatcctgggcccatgctgggccttggtctcggtccctatgagccgggatttccttgtgcagtttttcaatgagtgccaactggttgccagcatccagcttcgtagggatggcatttagggcatcccagctctcctccagaaccacagggctggagtcattgaagaggcggatcaggcccgaggaccaggctcccgcaggtggctggtgtagtcagcctttgagcgggaacagtagatgttgaggaatgatggcagcagcttgcctcatgcccacctcagggctgcgggtggcctccagcagatcctcgatgatgatccggtgccctgtgtcatcctctacggagaggatcacagcctgacaattggccatctccagctgctcatctggggtcccaagcttttccttcagggccagcatgaccgctgggaggatcacgccaagatgacgggtgagggcatcaccagccactgacgaaaggaaagccagcacccgggtgttgacaggtggcgttgtcagcttgggcacaaggtagggcagcaccacacgactcttaatagccatgacttgcttcagaccatccaaggcaaactctgacacctcctcgtcatccagctgctttagtaaaaatgggagaatgtcctccagagcctggtggccgatggtggaatgcagctgctcgaaagtcttggctgccgcctctctgacctcctccagtgggtcacacaaagccttccttgccgtgggcacgagggattcagagaaatacagcacggcatcccggctggtggacttcatgatctcacttaggccaatgcacacaccctgcctctcatcgctcttctgagacctcaggccttcctcaaggatggggatgatctcggggaggattttctcccctaacttccgcacaagatctcccaatgttctcgctgcaatcgttctcttatctgcacacgtgctggccaggaaacccagcaggagcccaaagagagtgggtaggatctcacgcaaggtgcggggggtattggagacaacaatcttccagacatgcagggacgcctgccgcaccaccagctgggtgtctgagcggcccatgtacagccctgccaacacccggttccgccgctctacccccagggcagtgatgatcgccttgttggactgggcagttccaaagttatcatcctcagaggcagtttctgtggtcatcttcccagtgactcctgagatgtgaaacaggagatccccaaggagctgaacagagctgaacctgattctccaaaggtcatcaaagaggccttgctctagctggggcagcagcaggcctcgtgccgaattcgccacccaggcc

SEQ ID NO: 323601 - DNA, 886 bp, Homo Sapiens
gggctgttaagctgcattagtaaagatgctccaggagtgtggtccagccagcgctctttccagctgtaaatattagcgatggtgccatcttttgctgtagactaaactgcaacttctaaattccatgtggcattcccctaccctgaagttatgctttccttctgtgctctgtgctggccagaggtgcctcttgaatcagattaatgtggtttttcaggaaaggacttaggtgaactgaggtttttaccacaggcagtgaatgaccttggttcaccaaatttgcctctgttttgaggggcttggtccagagtgacttgttaatttacctctaacttccttgtgtgttgatgggtaagtacactcaaacactgaatacaggtgtgtgatgggtagatttccccgcccttctactaatagtgagtgtgaaggcaagcttgatgcaaaacctcctgacctttcctaccctgaagagccctttgacttctaggaagaaaggtcaaaaatgttatcttcagttgtgttaatcccagttttagtgcagcttaggaggctgctagttaggaagatggcagtggctgtaggctgggttgccagaaaagatggtggcctagtcttattattcagatggagaacttagaaaacctgaagagtacccaaattggattgtattttaatggacaatggctgtattttttccatgttagaaggatcctaatgaaagcacctgttatttttaagtttctaagggtctagttgttcagaatccccaaggatatttccctaacctcactcagtcacattgtaggagccagtgtagctatggaattatcttaggaactcaagcttctaaaactatccatgtagtcaaatctaggggaaaagcaaa

SEQ ID NO: 323602 - DNA, 708 bp, Homo Sapiens
cctgaccaggcacaagcaggggtcttcaggccctcccacacaggactcccccacctagcaaccacagaagcctttcctccgtggctccctttggaggccacgtggtagggatgtgacgtgtgtccatcctgcccttgggaaccagaacacagggctggcagctccctggagggtggatctgtggcaccttggggaaggggctccccgatgccatctcacaggagcaagcacttgagaaggtgggctcagcaagtgccacacagcccagggccagatgcggggagctcagactcccagatcccatcctccagggagggcacagagccaccactgctcagacaacccaggccctgactgctcagggctccagaagcactggagtggccctgcctgcctgctacaccccggcctcagctcctttccttccacacccagtcccaggcacccgccaaggctgcagagtggggggccgacgtcaccctggggcctagggccagagaggccaggtttcagcagtgcaccctggccccagcacacccacagcagctgggagaaccagcacaggctccaagggatgggtgccaggcgtggccctgacaggaagggatgtggggcaggcaggggcgccggcagctctgtctgggctgctgggagctgcaactgaggggtctagggtcggggctgacgctggggccatcgccacccagc

SEQ ID NO: 323603 - DNA, 516 bp, Homo Sapiens
  misc_feature (35)..(35): n is a, c, g, or t
  misc_feature (494)..(494): n is a, c, g, or t
  misc_feature (504)..(504): n is a, c, g, or t
tcttcccccagcaacttggctcagagtctttgctngggagactcttttcctagtaagtcatccaattcgttcagtcccagtaaccgggcctggggcacctccagctccagccgataggacaggttcctcagggtgcacacgcagttctccaccgtctgaaacccagcatggcgtataattaaaaacaactcggcacattagagcaaaacacttctgtactgaacactacagacaggaaataaatgggaaatatgaaagaactactttttatttatgagaacttgaaacaatctgaagagagaattatgattctagagtgtttgtgggaatacccagatgacaggatgcagagcccttctcagtcctgctgaggatttgactttcatggccgaccgaaatgcttgagggttccggcccagtgtttctctttcaggggttgttgccctggcagaccctcgtggccgatttttggggctcgaggggccaaatttccnttagtgagtncgttttaatttc

SEQ ID NO: 323604 - DNA, 1020 bp, Homo Sapiens
tcttcttcccccagcaacttggctcagagtctttgctgggagactcttttcctagtaagtcatccaattcgttcagtcccagtaaccgggcctggggacctccagctccagccgatagacaggttcctcagggtgcacacgcagttctccaccgtcttgctgtcgtaatcggatgtgttcacacacgtgtggatcacatacaacagtgagtctaccagcccctcgcaggaccgcatttgcttccgagcttcttcccccgcagagctgaggttccttaggcaacctgttgtgttacgcagaactagtgaagtctgaaatttaattttatgatcatcatcaaaagaagagttattccatccagaatgtggaacaatcacagtgtttgttaaggttgagagagcatctcgaatgattgtcatttttacagcatcacatgaggataaattccaaagaactcctgttacaagctcccttacttctgcatcagtagattttctcaacagtcggcaacaaggcaggtatcccaccaacattcttcattgctattttattttcatctgtagacttgccaaaaacgaggtttcgaagggcaccacaagcattcttctgaacttccaaaactctgtggtccagaaggtcaaccagatgcttgattccccctaacctacacacctccatcttcactttgttgtcaccaaagcacaggtgctgcaggtaggccgctgcatttgcctgaacagatgggaactggtgctgaagcatgtgaatgacctcaggcaactcaggatcacgccaggcaaactccctggggtccttctgaatgctgtctattgatggggatcttgtggtgccatcatcagccggcactgcatgctgaagcctgttataattgcactcttgcactcggtattgtataggcctgtagggctccgcgtaggtagctgttgtgttcagagcataattatttctttggtatgtaagggtacttcgttggctggatgtcctttgtagatttccaaa

SEQ ID NO: 323605 - DNA, 1099 bp, Homo Sapiens
  misc_feature (1015)..(1023): n is a, c, g, or t
  misc_feature (1061)..(1061): n is a, c, g, or t
ggggcgcccgttgcaagatggcggcggccatgctgggccccggggctgtgtgtgcgcagcgggcggcggcgcggcccggaaggctggcgcggcgacggcgttagcccggccctcggcccctctttgcggccgctccctccgcctattccctccttgctcgagatggatctgcccgtgggccccggcgcggcggggcccagcaacgtcccggccttcctgaccaagctgtggaccctcgtgagcgacccggacaccgacgcgctcatctgctggagcccgagcgggaacagcttccacgtgttcgaccagggccagtttgccaaggaggtgctgcccaagtacttcaagcacaacaacatggccagcttcgtgcggcagctcaacatgtatggcttccggaaagtggtccacatcgagcagggcggcctggtcaagccagagagagacgacacggagttccagcacccatgcttcctgcgtggccaggagcagctccttgagaacatcaagaggaaagtgaccagtgtgtccaccctgaagagtgaagacataaagatccgccaggacagcgtcaccaagctgctgacggacgtgcagctgatgaaggggaagcaggagtggatggactccaagctcctggccaatgaagcatgagaatgaggctctgtggcgggaggtggccagccttcggcagaagcatgcccagcaacagaaagtcgtcaacaagctcattcagttcctgatctcactggtgcagtcaaaccggatcctgggggtgaagagaaagatccccctgatgctgaacgacagtggctcagcacattccatgcccaagtataggccggcagttctccctggagcacgtccacggctccggccccccactcggcccccttcccaggccaagggcagttccagcctctacgcccctggatggtgggggccagctctgggacccttcttctcccaacaatcccgaagcgggttccctgcccaccccaatgggcctcccccnnnnnnnnnaccttaaagaaagaggggcccctttgctccgggaaccncccttggtggcgggcgccacagggggggaagcccccca

SEQ ID NO: 323606 - DNA, 1243 bp, Homo Sapiens
ttttttcggccacttgtgatttcctccaaatgaaaaggaatctgcaggctaacaagctgatcctcatcagccaagctggttcatatgcacactgttcatgtgaggtgcccagggtccagtccacaccgtttgagggccattattttccgtggagctggaaaccatctttatcagtgagttccaagaagggtctgcagcatgagggccattaaatatgggtcctccagcaccatcagggataggtgctactggaggaatcattgcattcccatacacagaaaaaggcatacccccaactttaggaaagtccatgtagcctgcaggaacatgctgatggaatgtaccagaaggagttacaattcctgtactatctcgctccattgcttgatgttgtgaaaatactcctgggtcagacatcggtctgtggatcataggatttcccatcccagggttacaccagtctactttgtcttgattgccaccaatcccttcaaaggaccagatgccactatgtcctactgatgtagacacattgctcccaataacagatggagctgacgttccagtttgcctgatacgtgcagaacgttcagtcccaatagggactggaactttcctgtcctgagacacattgctgggcttttctgaccctaacggtactgatgatggggccaggagatggtgcacgaactcccgaggatactgactgtgcagaagaatcatttgatgctgatgaacacggagtcaacaaactaagcggggaaaaatgttgtctgttaaagttagcagctgcgggtgctcctccaaggggtgccccaggtccgtacatctgacctcctgaaatgtttgaagcaaagtttcccaaatgtgttgaagaaggtgttacagaaccatatggcgagtccatattgacaatacctgagggacttggagcaggtctctgtaatggtggtctaaaacctggagctttggaagtatcagactgatgtaaaggatctgaatttggcaatatgaggattttcctgatagcatagattctggtgttgactgagatgaaacacagatcctccccagaaggcatgagcagaagtagggctgttttcaacatgtgctaaagggcccaatggtaagggggcactgaaattgggagcataggcttatttgctggatgtactgattccgacgcgtggtccgacgcgtgggtcgacgatatcccgaacttccggaccgtaccagcctgctt

SEQ ID NO: 323607 - DNA, 750 bp, Homo Sapiens
  misc_feature (158)..(158): n is a, c, g, or t
ctggggaaaatagtttaatgtatcgctcagaaaaaaaatagtttatatttttccatgtgaaacagtgctttacgaggtccaacgccaccaagcgactttcattctgtcccatactgccgaaagtgaatctaaggcaggacggacgtccaggatggtgnaactggtagtccttgttgacttcacccacccatcataataatcaatcacatatctaacttctgtcccgcaacggtttatgatccaatcgtgcctatcaaaaggcaactcataccccatccaggaacgaattcgtgcccttggtgaatactcttttgctttccctccaaaccggatcaatgatggaccacaaggacactctgcagcatgaagggcttcccacttcaaaatctccttccaagcctgctcgttattctgattgtgaattctaatgatattatacatatccttctgactgatatcctcatccttccacttccaccctttctttaacattgcattccagaacatctgctcagaagggtaaacccactttttctctgaatctgctctcggaatggatgactcttctctgacagtagacaatgcaaatggctgatctggagctggtgtttgatttggtggtggcatcagatttgaaggatctaggttctccttattctcagccgcagtgcccctaatgggacactccacgtactcataggcgcgttcctggtgcctcgtgccgaattcgccacccaggcctcgctacct

SEQ ID NO: 323608 - DNA, 1145 bp, Homo Sapiens
  misc_feature (1060)..(1084): n is a, c, g, or t
ttctggggaaaatagtttaatgtatcgctcagaaaaaaatagtttatatttttccatctgaaacagtgctttacgaggtccaacgccaccaagcgactttcattctgtcccatactgccgaaagtgaatctaaggcaggacggacgtcacaggatggtgaactggtagtccttgttgacttcaccaccatcataataatcaatcacatatctaacttctgtcccgcaacggtttatgatccaatcgtgcctatcaaaaggcaactcataccccatccaggaacgaattcgtgcccttggtgaatactcttttgctttccctccaaaccggatcaatgatggaccacaaggacactctgcagcatgaagggcttcccacttcaaaatctccttccaagcctgctcgttattctgattgtgaattctaatgatattatacatatccttctgactgatatcctcatccttccacttccaccctttctttaacattgcattccagaacatctgctcagaagggtaaacccactttttctctgaatctgctctcggaatggatgactcttctctgacagtagacaatgcaaatggctgatctggagctggtgtttgatttggtggtggcatcagatttgaaggatctagggttctccttattctcagccgcagtgcccctaatgggacactccacgtactcataggcgcgttcctggtgggcaggcacagagtatgttttcttctcacaggttgggccagatggctctgtattcactggacagcctttcattttcccttcatgcatcgggcatcctgaaggtggggacgctgaagcatttgaggcctgaactgcaacagcaggagcagatggagacaaacccatggctggaaacagtgttgactgtaaacaattttaaatttccacctgctccagcccgtggtccccagaccaaaccggccgcggccagcctgcccttctgcacctaagccctcccccgggctgttccgggaggccggtaccgccttcagtcgccaacccgaacccagagcagcagtgacttcannnnnnnnnnnnnnnnnnnnnnnnnttcctctcactcggtcaccgctgtggctgcggtcaccgccggcgttctcacgcaccccccc

SEQ ID NO: 323609 - DNA, 1008 bp, Homo Sapiens
  misc_feature (48)..(58): n is a, c, g, or t
aaaagggctccgggaaaccccccggatgtgttttggccaaaatttttnnnnnnnnnnnggccacagcggggcgggaagcttcagggagaaacccttcccagtttttctggcccctttcccccattgggtccatgcgggttccatgtcctagggccatcccagcagacattctttggagttcccctccgggggactgttggcaggtgccttgccttctggggctggcatacacgtgggtggggcatagacggtgcccgttgctgttggactggtggcagctgtggtgtgcagggccaggaggccaggtgggagggtaggaggagggagcctggcgcagaccatttagggcctcgttatgacgctgggcagccaaggtgttgttgtcattgggggcaggtgggcagccctgattttcccagcgatgtggggtggtggctggagggctacctgatgcatggttggcattgaagttgccaggtgagctgcccagcttgtcatgggcgtaggtgaagatctctcgatgggcccgggccacctgggatatcacatcctccactgtgggctcagggcttggggatctgggaggcgtcagctgttgtggaaactgggagaaggcccaccaggggtgaggggcccgagaccaggggtgtggcgaggggcccatggggcctggggtggggtgctgggtgggtgaagtctccagcgggcactggctgctcaactggttgttggccaggttcatggcactctgcatctcagcaagcatccgctgcttctctcgtttggggatgcgcccaaaacgcacagcgtctcgagacatgcccacagagagacacttcttgaagcgacattgctggcagcggttgcgattgatgcggacgatggagcaattctcattcttcagacaccttttgtactggatgttctgctggatgctccgacggaaaaagcccttgcagccctcgcaggcgtgcacaccgtagcctcgtgtcgaattcgccacccagc

SEQ ID NO: 323610 - DNA, 1179 bp, Homo Sapiens
  misc_feature (41)..(41): n is a, c, g, or t
  misc_feature (575)..(634): n is a, c, g, or t
  misc_feature (1123)..(1123): n is a, c, g, or t
ctcgcgtcgcgggcgcagcccttgctctctctcggaccgtngcgtgcgccgctcacgcctttcgccgagcttctgactttgcgccacggtcgtctgcccgtatgttacgcggcgtccgtctcgctacttggccttgctctcgccgtagcttccgtgtcgtgggcgttgtgcgccgagcccgcgtactccgccagaccggcgcacccaattcgttgccagttccggtgctcgctaccttctcccctcccagccgcgacgaccgcctccttccgcgtcctctctcgcctccagtctctgctgttccgcgcgcgcccatctcgcggctggcatccggccgcgggcgcactctctccttcgttccaccccgccttaggcgggcgcgccaccggcagccctgtcagccgccactcgtcgatagcgcctttacacgcgctctgcgccgcccgccgtgctgccctctacggccctggcccacctctagtgggcacccgcggctccggcgcacgcgatcagccctccctcctcgatcgccgcccccctattcctcgctcccccttcttgaggtcgcgctcctnnnnnnnnnnnnnnnnnnnnnnnnnnnnnnnnnnnnnnnnnnnnnnnnnnnnnnnnnnnncgctcaggcgtcgcaccttccccacgcacggcccgggatctcctgcgccgggacggctcgccgggcctcaccgctccatgcagcccccgggtggggggctcgcacgcacctccctctcttaccacggtgcttcccgctcttcgagtcaccgtgcgcggccccccctcacctaccctctcgagccgcacctccccgactcgcccagggcgagggacaacccctcccatttagcccagcccaagtccccacaacaagacatctccctcccctccccctagctcccatctccctcaaccccaaaggactcagcagtagccattctctaaaggagctgggggagtggatccttggggaagggagggcggctctttcagaactcaatcttgcaggcagggaaggactcatcctgcatcaccacggtgctgctgctagccaggaccaggacattcagttgttgctgctgctcatgagtttgttggtaccactcancgagtccacctccgtgtcatcctcgtgccgaattcgccacccaggcctcgctccgt

SEQ ID NO: 323611 - DNA, 1065 bp, Homo Sapiens
  misc_feature (599)..(660): n is a, c, g, or t
  misc_feature (681)..(726): n is a, c, g, or t
  misc_feature (764)..(780): n is a, c, g, or t
  misc_feature (913)..(940): n is a, c, g, or t
  misc_feature (998)..(1023): n is a, c, g, or t
aagtagcgaggcctgggtggcgaattcggcacgaggcccaggccccgccgaggcggccaggaggtgagatggcagctgggcaaaatgggcacgaagagtgggtgggcagcgcatacctgtttgtggagtcctcgctggacaaggtggtcctgtcggatgcctacgcgcacccccagcagaaggtggcagtgtacagggctctgcaggctgccttggcagagagcggcgggagcccggacgtgctgcagatgctgaagatccaccgcagcgacccgcagctgatcgtgcagctgcgattctgcgggcggcagccctgtggccgcttcctccgcgcctaccgcgagggggcgctgcgcgccgcgctgcagaggagcctggcggccgcgctcgcccagcactcggtgccgctgcaactggagctgcgcgccggcgccgagcggctggacgctttgctggcggacgaggagcgctgtttgagttgcatcctagcccagcagcccgaccggctccgggatgaagaactggctgatctggaggatgctctgcgaaatctgaagtgcggctcgggggcccgggggggccaacgcgacgtttctctnnnnnnnnnnnnnnnnnnnnnnnnnnnnnnnnnnnnnnnnnnnnnnnnnnnnnnnnnnnnnnattggaccaaacttttctcgnnnnnnnnnnnnnnnnnnnnnnnnnnnnnnnnnnnnnnnnnnnnnngccgtccaccatccccctttatgacccgccacgtccgnnnnnnnnnnnnnnnnnggcactccccacgcctcgcaccgctcccttccggttactcctattgttcccaatgacaccccgcacccctccgcccccccgtcacccactcgccactcattgctctgcacccgaccctcttctccggcgtcgnnnnnnnnnnnnnnnnnnnnnnnnnnnntcacgcctttctgttgagtcactatatccgccgccgccgccactcgcaatagaccgtnnnnnnnnnnnnnnnnnnnnnnnnnntgctacccatctcccgcctgggctttctttttgcctcccccc

SEQ ID NO: 323612 - DNA, 1061 bp, Homo Sapiens
  misc_feature (198)..(322): n is a, c, g, or t
  misc_feature (367)..(590): n is a, c, g, or t
gggggcgaaatttactaggcgcgcgggcgtgggggcgtaagaaacacgtggcagggcttaacctgacgggcggaggatgggcgaatcaggggtgtggggtgttatgggcggtgtgggtgatagggtgatagacgcgtaaggtgccggggggacggctggcgcgcgcgtcatctcccaaactggaagaaaggtgggtgnnnnnnnnnnnnnnnnnnnnnnnnnnnnnnnnnnnnnnnnnnnnnnnnnnnnnnnnnnnnnnnnnnnnnnnnnnnnnnnnnnnnnnnnnnnnnnnnnnnnnnnnnnnnnnnnnnnnnnnnnnnnnggacgggtggccaggatcgagagggtgcgggggggcggaaaaaannnnnnnnnnnnnnnnnnnnnnnnnnnnnnnnnnnnnnnnnnnnnnnnnnnnnnnnnnnnnnnnnnnnnnnnnnnnnnnnnnnnnnnnnnnnnnnnnnnnnnnnnnnnnnnnnnnnnnnnnnnnnnnnnnnnnnnnnnnnnnnnnnnnnnnnnnnnnnnnnnnnnnnnnnnnnnnnnnnnnnnnnnnnnnnnnnnnnnnnnnnnnnnnnnnnnnnnnnnnnnnngccaggttccccggagaggcggtgtatgcggggtgggggcacagaggaggctttggggtggtgtggatgcctcagggtgtaagacagtcagaacggtcccagggaggtcttgtctgtaacgatgtgacagatgaggagcgtgcaggtcagagcacaatggctcgcccgcgttgctcagctctattacagtacagtgtgcatgaacccttcctccatggcctccatggcgaagcccgagagcaaggcagacgtgcggctggaagctttgagcttggcccggctgaggtagaggcggcgccagctgagcgcccgcagcgagtgctgactggcccccatgaggtccaggtagccgcggtgcacgaactcccggtacgtggccgagcctgcagggctctcgccctcagggttcagcggggcctgctcgcccgcgtccccctcgtgccgaattcgccacccaggcctcgctacctt

SEQ ID NO: 323613 - DNA, 760 bp, Homo Sapiens
ctcttgtagaagaaaaaaaggaaattagccctacataattacttcatatttcaggtcagttttattgacctcggttggcaaagtaagtggggctcatccggatttctaaagatatttaaggatactttcagttataagtaggatgactatccatccaggtttgaacctgctgttcatggttaatttattaatagcatgtctcacagttcattctcagaaatgcttggatatggccgataaattgaaacgtcatcctagttaaaagtaacgtttttaactggctggagaaaggtgacttggggttctaggaagggacagaggaacaaacattctgttggctcagcacgcccagcctgtgttgggctgggcaccttagaggacctgtttcaggactgcgtgactggcgttttgctgggagtagcccaggtgttttaaccacttcctgaagaacaaggttcggtaaaaagaggctggggcgtaggcgtgggttcctgtccctgccatatgctgtcttcctgatcttcggaagtcacttcaagcacctgatcatcagtttccttatctgtaaaactggagtagtaatgtttccctccaaacgccgtcgtatttaattcatttaacagcagccactattattccattatacagacgaataaatagacgttatgagagggcaaagtgcgctgatcagggcctcgtgccgaattcgccaccctggcgtgtggtcatttgctttctttttgcggcgggttcgattcaa

SEQ ID NO: 323614 - DNA, 1008 bp, Homo Sapiens
  misc_feature (549)..(557): n is a, c, g, or t
cttgcgggggggcacgtcggctaggccgtctctttctgtcgcggttcggtagcgcagccccccagcgcggcgccaacttggtgcacgggttcggggggggccttatgggtagttctgcctgacggataagccgagagaagaccccggtgtgcacagagcgtgcagcctagaaaggcgagggtctcagggcggcccgttactccggaggaacaggggccttgtgccggttgccacggccagcgtgggttagggcgtgcgggcgggagtgtagtccggcggggggattccacagctttaggtaaatggcctctcccgcagaacggggtgtgtagaccaccaagatcacccaaagtgcaacttgccactgggtcaagtttcccatggagacaatttgagggaggggccctgggaaaagttctgaggcctcgcagaaagcgtgcagatgtgcactatcaattttggggccccctcatctgaggaaaaccatctccagtcccttcagtacacttctgatacattcaattcatataagtggttggctgaatgtgnnnnnnnnnctaccactccttctgaaatgttcaaggacatccatacatccgtcacaactgtggcaagggtagctacacgaatcagccttggaaaatgcagatgcaatatttcacattcgccttttacaagctagcaaatgttacataaataaagccgaaaataatatgaccctcccttcctccaatcaataaatacctatggttacaatcaacttactctaaatcataagatgttactactagtcttcaagaaggaaaaaataagtccttgagaagcattaggtgcctatcatagctacctacctcgctgcctccttcccggaggcacctctgttcctatacagaacaaactggaaatgctacagacgctctgcctcatgcacttccagtttcacctggggtagctcttctgactcaggccatgcctcgtgccgaattcgccacccaggcctcgctcctt

SEQ ID NO: 323615 - DNA, 967 bp, Homo Sapiens
  misc_feature (176)..(190): n is a, c, g, or t
taaccggaaagaaaaccgaggtttcctttagaggaaaaaaaggaagggccgggggttcccgggggtccaccccccgtgggatttccagccactttgggagggcccgagggattggagggttccctggaggccccaggagtttcaagggaggccccccgtttttttgttatggcccnnnnnnnnnnnnnnntttggtagaaaaatgggaagagattgggggagggggggaaagagggctgccctgggttccaggttgtgccttctgtgtgaagaagacacccagcgggcttgccagtggggagtgcggagtaaaggcctgcgggaggagatgtccgctctcaggggctcggaagcccctcagcctcttgcctccccaacgggagacatgtaggaggccgagcaagctgggtgcccttgagagacaggcccaggcagggctgtggccacagcagccctgggggctccccagcgaggtggaggcagaagttccaggagcctgggagccacccagggcaaggagtgaccctggaagccatccagcctcctggaaagtggaagtggtttaaaaacacagtgggcttttccggttgctagtaacacatagaattacagagttcacgttttagtcccagacgggagactgaggctcgagactgaggaaggcatctgccgtccggggttggagctcctgaggaccaacacctgctcagcggctcggcccctggtctccctgagatgctcaggccggagagaagcgggatgatggttccagagcgtcctcctccaagtctccgaggccccagcggcggttcgggcaccgggagacccgcggggctctcagtggcacatccgggcggtcatttctttcagtggctccagctccttggtgtcgatgaggccgaactccttgacgaaatagtagaagtgcttgtagcaggtgttcacgtgggcctcggcctcgtgccga

SEQ ID NO: 323616 - DNA, 1132 bp, Homo Sapiens
  misc_feature (22)..(22): n is a, c, g, or t
  misc_feature (162)..(162): n is a, c, g, or t
  misc_feature (189)..(255): n is a, c, g, or t
gcggctattttcctctttcttncgaggaaagcggggctccgagaacagattgtgggccctgtgcgctctcttgatgtctttttctccgcgccccgcgcctatacccggccgagctacctggtgccgctccgcccggagagtttccgtcgcttgtttgtcttnctttccgtgtcttctttcgtgttttgnnnnnnnnnnnnnnnnnnnnnnnnnnnnnnnnnnnnnnnnnnnnnnnnnnnnnnnnnnnnnnnnnnnaaggaggggttagggtagcttggagctgtcccagctgtagctctgtctcccagaagtgaggtctgcaggggaacagggtctgggggtcctcctgcctgggagagggaaggctgagtgtataaaaaggtggaagcctctagaaatgagaaggctgggtgtgtgggactcatgctggtgccttcccagacgaaggagagggcccagaggaggcagcttcctggagcagagacggcagcaggagcgcccgtgcccggcatcacctcctcttcagcacggatatgcaggacttcttgaggggcccgatctgcaagtgggcgtccacactctccaggaagaaggcaggcttgagtctgtgggtgaagagccccgcaaagtgactgtccaggcggctctggaaggggtcaatgggggaggccgggatgccaccccggcggggccgggaggccttcagcctccgcaggaggctcatcttgccgtcccgtacagcatagaaggccaaggcacggtcagcgtattccaggcagaccccaaccgtgggcgagaaggggtggggcaggggagcctccagcccatgaaaccagacggagaagctgcgtccattccactgcaggcagcaggagtgggcgttgcggcccagccggccgcggtcgtagggctcttgtggggagaagtcttcggccatgacccccatgctgacccagccctcgataatctccacctcccagtagtaggtgcctcggtccagggcaccctcgcccagcacctgctcacaatgggtgaagcgggtgggcgacaaggggtagttgataggacacagcaccctcttgacacctttggttccaaacagctgcaggaacttgtctgctgtgtcgctgtc

SEQ ID NO: 323617 - DNA, 813 bp, Homo Sapiens
tacgttttatcaactgccaagatcctttattttttccaggccccttcctgcccactccacatcggggcagctccagcataagggagatgacatgatgaaggggctaagagtagggcctggccagcatccactgagggcccaaccagggaacagttgctagccgctctcttccatgcagctggagcactagcaaggccttccagaggctcccagggcgacctccacatcactcccgcttgtctctgccctccagggtgctccgggcctcctctccctgtgtaccctagaggtgtgagggccacagtcctcctcaggtgaacctccctccccaagcccagggccctagcacaggctgcagttggacggcttcgagctgcggctctgggcctgctgccgctggtattctgcctcactggctgacagtgcttgtgctaaagctaggtcttcttcctcctgacaacttggaacctggggtttggtttctgccagggacatttccagggcccgctgcagagcttcatcctcactcaggccattctgcaaagcaatcactggaggggctgtccaggacggagatcgggttgtggctctgctgggagaggtacaggaaggcatggtttgacttgggctggggacagtgcttgtagaagccacagcttgtgctctggagatggcagcaagtcctgcccggctggttgggtgcccctccccagagcaatcatggtccagtggatgccggtgcttgatgcagaagtttcggctacagcgttcacaggtcagtttcatcctcgtgccgaattcgccacccaggcc

SEQ ID NO: 323618 - DNA, 382 bp, Homo Sapiens
  misc_feature (13)..(13): n is a, c, g, or t
  misc_feature (36)..(36): n is a, c, g, or t
  misc_feature (53)..(53): n is a, c, g, or t
  misc_feature (105)..(105): n is a, c, g, or t
  misc_feature (163)..(163): n is a, c, g, or t
  misc_feature (255)..(255): n is a, c, g, or t
  misc_feature (268)..(268): n is a, c, g, or t
  misc_feature (272)..(273): n is a, c, g, or t
  misc_feature (279)..(279): n is a, c, g, or t
gcaaatttgcaanatctgatctgtgtgtgttgggcnctcaatcgggcctgtancactgtctgaggaattatctcaatcttcatagcaacactacaaggtgggtantagtattgtccccgttttatagaggaaatgaaggctccatgggttaaataacttgtcnaagatcatatagtccatcttaattttgagaccaagttgccagcgattatcttgcattgtgtcagagtggtcctacctacctgcctccagacnaagcccttgctcntacnntgcgcnctctttcataagagggtaaggtaccttggaacctggggtttggtttctgccagggacatttccagggcccgctgcagagcttcatcctcaatcaggccattct

SEQ ID NO: 323619 - DNA, 1216 bp, Homo Sapiens
  misc_feature (66)..(66): n is a, c, g, or t
  misc_feature (109)..(109): n is a, c, g, or t
  misc_feature (185)..(185): n is a, c, g, or t
  misc_feature (349)..(412): n is a, c, g, or t
  misc_feature (624)..(664): n is a, c, g, or t
  misc_feature (1074)..(1084): n is a, c, g, or t
tcagactgacaccaagaacagccagtaggttcttctccccatgcactctgctcccttgcgcggtanccccaccactccatgaagcctgcccagtctccttccttccctncttggtgagtcgcgcatctccgtggttatcccgctgtctcctctccaagaacaagcagagcccgggccactggctntggcccaaggcagggaagaaggatgtgtgtgtccaggaaggaaaaaaaggtggatcagtgattttacttgaaaacaagctccatcccttttctatatttataagaagagaagatcttgagtgaagcagcacgcgacccaggtgtgtgtgaattgaatggagacnnnnnnnnnnnnnnnnnnnnnnnnnnnnnnnnnnnnnnnnnnnnnnnnnnnnnnnnnnnnnnnnactgttcattttactttcttggtaacaaaaactaaaataaggaatagaaaagctgtttttcaggctgacagtccaattaagggtagccaagaccttgcatggtagagtaggaatcatagtgtcagtgaggtcccgtgagtctttgtgagtccttgtgtcatcgttcgggcactgtttttttatgcaagggcaaaaatctttgtatctggggnnnnnnnnnnnnnnnnnnnnnnnnnnnnnnnnnnnnnnnnngatattgagggtcttcctagtgttacttaaattaagatcaaggtaagaaacattgtacaaaaaaattacaaaagtgctatttgtttccctaaaaaccagtgatttctattaaaaaggtgtcaaaaactggaacaccacccccaatatcacacaacaaactccaagccttcttatggtcggggtgcggaaaaaagaggaaaatgaaatgggaccatggtccattagcctgttttcctgaccccaacttttctttgtacaaaggtgggaaatatcttgcccggtttctccccatatagggagtccgaaataaattttcgaataagcccagggttaaccctgcctttaaatgaaatcggcctggccgtacccccgggaaaatttaacacccggccctaaatggagcgggggcnnnnnnnnnnnggggatccccaacaggatctttttcctggagaatccctttttttatcttgggaaagaaaaacctcggttggctttggcaaaaacaataaataaaccaccctctctcaccaggggcggagtattctgtcttcg

SEQ ID NO: 323620 - DNA, 1198 bp, Homo Sapiens
  misc_feature (1157)..(1157): n is a, c, g, or t
ctgaaatagcaaataaaagtgaatgttttaataaagattccactatatttacacatttatttttctgataaaaaattacaaatttaaaaattggaaactatggacaagtataaagaaaagcttaaattccccatatgcctgtcttagcattgtgatatacttatttttatcccccagacatatttatataaatttatttatgcaagcaaacatccattctgtatacacggtttattctgccaagctttactgtctcttaaaccctttctaaatatcattacatatccctaaaaacctatggtttcttttttaacagacacacagcagtgctccaccagatggatatacagcaattcaatcacgttcctctggacggccactggcttccagtgccgggaggaacactcaggtgggaggctctggcagtgactggggtgggcagcctgatgccaacctctaaggccctggcagccacacctccctgccagctggcaggcaagcctgggctactattttaatttactctttgcttgtctggtagggaaaacagccatgtattttaattcgcattttaactactaacaacattataatttttcatgtatttattggtaattttatttattttttgcggtttgcctgttcacatgattgggctgcaattccatctggctagtcatctctttctaattgattccaagacctgacagcacgtgatttctctaattacttgtttgcttttacaatcgtgtttttgctgatttctgccacatagactgccagattctatctagcccagggtccattccatccattgttgctgctcatttctccacctaagatggtgcacacaggcccccatggatgtctgtcgctgacgctgattccatgcagaattaagttttcacgtatggcgtgagagaacaagggctaatcaactgctccagaataatttgctgacttggccctcactccctcctaatcgtaatgccacctttttcacatacgaaaatttttgttccttgcattctaccctgctctgcccatctgtcttgttatagcaccatactgctttaattactccaatgctacaacagattgtcctatctgggtgcacaggtaccctcatttatccaaccgtcgtatgggatctcccnagggccttggcccacctgcagaccctcgtgccgaattcgcc

SEQ ID NO: 323621 - DNA, 1132 bp, Homo Sapiens
  misc_feature (13)..(13): n is a, c, g, or t
  misc_feature (32)..(32): n is a, c, g, or t
  misc_feature (47)..(47): n is a, c, g, or t
  misc_feature (69)..(69): n is a, c, g, or t
  misc_feature (74)..(74): n is a, c, g, or t
  misc_feature (93)..(93): n is a, c, g, or t
cgccaagctcaancttctgaaacccaggctcnaacatccccaggganggggtcaacaaaaactgaatgnaaggncctggcacctcgctccccnacacggccccactctcccctgctctgtggaatgttaatcttgcaagcgttggggggaaatcaataattgaacaaccagctcccacaccagtgctgtcccaggccccgaagaggctatgtctgtgcagaagaagtatgtctcgggagctcttctggaaggactggaagattcctaccctcatcaaggctggcatttgcccctgcaaccttaggtgttggattttgtggtcatccagaatatatcccagccagttcacagtgctggagctattacagaacaccagaacagttcctgagggaccagtcctttctgctctgtcacgatgctgagggatgtgcaccagctcggccaccttatctgctcccttcagtctcagaaatgtctgtttcacatgaggcatgatacagtggagcttggagctggtgatggtggtgacagcatctgggctggcgactttattcagcaactggcctacaccttcgggaaatgtggctcctaccagcactaactgagctttgggattgaaggggtcttccaagtcagctgggccttctgctatgtggctcttctctaagatgtagtccaccagttccaggaagctttcatccagcagtgtgtctgcctcatccaacaccaagaaggagagttgctccagactgatcagtcgacttttcagggccttccacagagcccctggagtggccacaagcacatctgctgaaggctgtctggacagctgcagcctgatcctacgcatgccgtggcctccctccaggtcccgcaccagcaggcccaaggagcggcccaagggttgggccacagcccgcacctgttgggccaattctcgggaaggaacaaggaccaggcctcggggcgcggggataggaagggagtccaggcttggctggcccaagagccgttgaagcagcggcaggaggtagctgagagtcttgccactgccggtttctgcggcgcaaacgacatggcggccgcgaagtagtgaggggatggtgctagcctcgtgccgaattcgccaccc

SEQ ID NO: 323622 - DNA, 1057 bp, Homo Sapiens
  misc_feature (275)..(275): n is a, c, g, or t
  misc_feature (338)..(380): n is a, c, g, or t
  misc_feature (384)..(386): n is a, c, g, or t
  misc_feature (389)..(389): n is a, c, g, or t
  misc_feature (391)..(398): n is a, c, g, or t
  misc_feature (400)..(400): n is a, c, g, or t
ctctggcggtgagttcgtcgagactctcgatagcagtgccgatagttccttgtgtcatgaagtaatcacatgatgacagggggaatatttgcttctgctcctgagtaccaggaaaagacgcctaagagcaccccagccgggaaattgttgaaaaaaaccctcgggtttcccgcgcgggccttttttattttgggggagaattccaaccgctttagtacggacccaagggtttttcatagaaaccaggtatgagcccagtctcccttccctcgggnggcccccggcccaaacggaagggtttgaaaagcttctggggggccggggggggccggccaggnnnnnnnnnnnnnnnnnnnnnnnnnnnnnnnnnnnnnnnnnnntttnnnttntnnnnnnnntnttcccaaggacaagagtgtctttactggagttgggactggggcctctataggggcttctggtttctgggctgtaggtttgtgaggtgtgggatcttaagtcaaaggtgggggactagggcagggtatcagaaggtgatgtcatcctcgtacagggacagcagcagcaggacggtccagccgcccagcaggcccacgttgtgcagcaggaagaggagccagggccgcgggtcccgtactttcaacatcgccgggagcatgtcgcagagtgctacgtagaggaacaggccggtggccactgccaggatccaggcctcgctctcctcgctgactccaaccgcgagtgccacgtagagaccagcgaaggccgtgagcgcggaggccaggttcagcagcagtgcttggcgcacggacagccccgcgtgcagcaaggcggcgaagtcccccagctcgtgtggcaactcgtggcagaacacggccagcgaggtggccagcccggtcttccaggaggacgcgaaggcggcgcccacggccagcccgtcggcgaagttgtgcacggcgtcgcccagagtgatcatatagggcagtagcctcaactctgggctcaagtctcctgggctcagggttcagcagctccgggctctcctccgccacctccc

SEQ ID NO: 323623 - DNA, 1245 bp, Homo Sapiens
tgggaaacttcggggaggtccaatccttcacccaagcaacgagctctggctaccaggctccaggcacagcctgccttctatgggcttcgtttattatgttttataggtttgtgttttctcccttttgggctttgctctttctctgcattaatcttcagctgctgaagagtcagaggtggaggcaggagtggtctggctcctggggctgggtgtcagaggtgagagggcagggcaagcaggccaagtgagctccttgaaagcatccttacccaggcatttagagaaaatcattttcatcattggagtgggaagaggacaagagaggacagcaatcagaggccaacgctaagtgcttctgaccctctccctcacagccggttactagctgtttggacagatttgcccattcagccccaggacaactgggggggatggcagggggtctgctggcaatatcaccaggtttctcttggaaacatggtctggctgctccaagagccctaaaggacaccatcatcacagatgatgattctggaatctcttctaccctcaataaaataatccctcaatgccaaatttccataattaacgaaatcatgaaacaaaacagcatgtttcttaccgaaacttaaagctggactaggaacagtagctttgaaatagtctccctttaccctccctagcaaataacaggacccagagcgtcctttccactgctgtctgtgctgactacgcggactccaactaaaggaatccatcgaattctgtcccgactgtgcttccatccccaccttggaaaggttcctctgctgtgagaaaaacagtttagtgcaaactcctttcctaaatggggtaactggtcccagagctgctttctattccccagcacgcccatcccacttgccttgacgctttctaaggctggtgtgatttctgggaaaattcaacgatttgccccatctgccccattctctaaaatgaaaagtctgagttgaaagggacacatcctaagctgttgagatttatagggtaaggcaagagctcttgagactcagggaaagtgaggaaaatgggtgtgtggctctttcacgtggactctctgatatttaactcggtcgtaactctgagggagcttttgctcatgccgatcccattaaaaggcttctctccagtgtgaattctctgatggcgaacaagagccgagctgtacctgaaggctttcccacactcactacattcataggg

SEQ ID NO: 323624 - DNA, 640 bp, Homo Sapiens
ttgttttagtagcgcagttttattttctgtagtaacaaacatttaagaaccagataaaacatgaggccctcccaggaaagtagcaactgtgggaattcctgccctagggaaggatggacgcactgcctacaaggagacgcaaagtgggacctcgctccatttgcccaggccaggcttagcgggaaacggggggcccaaagcgctgcatggtccgcaccaccagggaaagctggtcaagaaagttgatgacggaaattcggagcaggcgacagtcttcagctttccagcggacgaccaggatcctgccactcactgtgagatccttcccaaccaccctttggtggggctcggcatctggtgccagggacccatgggcgatttccgcctccaagggggtcgggaaaggcacgctgagggtgaatatgtgcggccgcattcgtgaccccctggtcgcagacgcggcgtctctgcccggacctggccgtgcgctgggggagctccaccggccggagctgcggctgtgtccacgcccccgcggcagctgtggccaccccggccatccccgccgtcagcgcctccgcctgcgtctgcatccgcgtcccgcatgaccgccgccgcctcgtgccgaattcgccaccca

SEQ ID NO: 323625 - DNA, 1683 bp, Homo Sapiens
  misc_feature (1195)..(1229): n is a, c, g, or t
  misc_feature (1457)..(1457): n is a, c, g, or t
agaacaagttctggggcaaatccctggagattgtgcctgtgggaacagtcaacgtcagcctgccgcgaggtttggggaccactttgagtggaacaaggtgacatcctgcattcacaatgtcctgagtggtcagcgctggatcgagcactatggggaggtgctcatccgaaacacacaggacagctcctgccactgcaagatcaccttctgcaaggccaagtactggagttccaatgtccacgaggtgcagggcgctgtgctcagtcggagtggccgtgtcctccaccgactctttgggaagtggcacgaggggctgtaccggggacccacgccaggtggccagtgcatctggaaacccaactcaatgccccccgaccatgagcgaaacttcggcttcacccagtttgccttggagctgaatgagctgacagcagagctgaaacggtcgctgccttccaccgacacgagactccggccagaccagaggtacctggaggaggggaacatacaggccgctgaggcccagaagagaaggatcgagcagctgcagcgagacaggcgcaaagtcatgggaggaaaacaacatcgtacaccaggctcgcttcttcaggcggcagacagatagcagcgggaaagagtggtgggtgaccaactatacctactggagggctgcgtgctcgagccaggctacgggaacatggatggggccgtgctctggtagctctgtgcccgggtgcaggaggctctggttcctcactcctcctgcctccaccccctaccatggacacatgggtgaggccgggctccccgcctcactgcccttgagaccaaaggggcagccctggccctccctcccctctgctggccagagggtctgcatctcagcccacccccaaccccaccgggttggggtggagaagcagaaactggggcttccccccgggtccttgccccccgacaacccagcatgtaaagacccttcccggtttcaccgttcccgaatgcctggccccgtctgggggtacctcggcggaagcacctccggctccccaagaacgcgtgctcccgcatctcccgcgggccctgcccgtgcgaacacggcggcaacttccccgcggcgccctcccgccagggtttagtggtggggcccccgtacggcacgtaggttcccccccacatcgccgggcacccccannnnnnnnnnnnnnnnnnnnnnnnnnnnnnnnnnntaattcggcgtgtgctgttatcacgctccgcatgtcgcggcgaatgtcgcactcacgcggccgcgcgatatagaggaatggctcgaccgccacacctggaacgagcatgtcaatgacgagcgacgcgcgaaatgccagccgacccccgcccgccgcaaccgacggactcaggcggaagcggccgcgcgcatggacgcccgccacgcgactgtgagacctctcaccgcnacgctcgctctctcgcagccagcatgtcacgacctgtcgccacggctcgctcactcggtaggctacgccatccgctgcactctactcgcgcgaattacaccgggtatctacgcgcaatagggactcacgtcgccggcggcaccgacggcccgtccactctcgctatgctccacgtactcctcaccgacaccctcgtagggactctcccatccgctcacgtacttca

SEQ ID NO: 323626 - DNA, 940 bp, Homo Sapiens
gataggaattcccggatcaggtccgaaattatccctccccagggtagggcctcctggtcgttcggagaaaaaggcaggttggctgccaactgggggccctggggctgttcctcctttttaatgtgatctagaaaccctgctgaggatcatcaaggcctggcccatcatccttgctgctgcccaggtcttcagcatgggcttcaagcacagccagtcccagctggaagatggctttgatgccatcatagaagaagcagtctaccacatttcaccgcactctctagaggcatgatgctgaggaacagggtcaggaaccacgagagagagacggacgccagggctgagaggtcgttcatgtgctctgccagctctgggagatgacccttgatgagctcctcgaagacagactggtcaacttgtgccccgatcactcggtggttgaagtaatcgggcagcatccgctcacacacagcaaccaacagccagaaggcttcctcctccttggtgtacagcagcagcacggaggtcaggatgttcatggactggcagtatccaatcttggggttccggtgggcataggccgtcaagactctcctcaaagcagcaattcccgtttcgttctggaaggcggggtgctctggcagggagcggtgcaggtctcgttctatctcctcggttaccaggcagcatttccccagggactcctccaccagattcccgtagtaaccagggtgtgaggcaagatccgtcaccgcatctgagaagagaagccagagtctccctcgcaaagattcagggatgcccatggctacgagcttccgaatcttctctgtgcgaaacatacacacggttctgccgtattccacaaagtggtcattccacaggcttatttttatctgttctctggacattccctcgtgccgaattcgccacccaggcc

SEQ ID NO: 323627 - DNA, 1373 bp, Homo Sapiens
  misc_feature (108)..(108): n is a, c, g, or t
  misc_feature (341)..(341): n is a, c, g, or t
ggttttaggccaggggggggaaatgccccagccccagacctgggaggggaggaatccagggaaggaggagatcctgggaattgcaatagcagcaggcagaggcctttnggtccctattgtttcctgggctgctatgaatgacttgcttttaatgactcccaaggttctggatctctccagttcaaatttcaaattattgacaaaacaatctgattggccaggttggcttcaggtgcatatgctaggactaagctttggccagtatgactcacatggtaacagacagggctgctggggcccctgtctgtcaccagaaagggagtcacaccggctgctacccntagagggagctatcctaatcaatcataggcaaggtcaaaaaaataattatggaattattttccatttgtgattctttacgccaccattacactccacttgaccagctaactgagaaccaactgagtacagagaacttagaggattagctctgaagagtcctgaagataaggggtagggagggaaatgggttgagtttagaaagaagggcctgggtcccaatcccacaccctctcttgacacctagccctagctccactctgggccagcaggtccccagagttaagggtgcaagttctttcatagagcccagttttcctcccccgcggtgggtcatgggccccaaaggggaatctcctgtgggtaggccccgcggaaagactatccggtcatgcaggcggttggtttgaccttgccagaactccatcacctgagggtacaggacatagccaccccaggattttggcttgggcacctcttgatcctggtagagctgttccagttcctcatttttctttctcagatactcccgatcagggatcacagaactctggtggctgaccacagccccaatctggctgctcttggggcgggagtggaagtagcactcagcctcctcctcaggcagtttcttcacagggccttccacacgcacctgacggttaagtggctcccagtagaagacaagggaagcaaagggattagagtccagctcttttccttttcgactctcgaagttagtgaagaagcggaagccatctttcccgaagcccttcagcagcaacatgcgagcagagggttttccatctctggtgcaggtagccagacacatggcattggcttcccctatgtcaggacactgaacagcctcctcaaaccaggcagcaaactgtttcactgggtcaagggaggtcagatgagtctcctcaaatgccctggacttctaccccggggaaggaaggatttgccagtcgcccaaccaagctaacaggtcctaagtcctcggagccaatgagtttccaggatcggagccc

SEQ ID NO: 323628 - DNA, 896 bp, Homo Sapiens
  misc_feature (787)..(810): n is a, c, g, or t
ggggggactcggcttgttgttgtcggtgacttccccctccccttcaccacttcccctccccgccgccgctgcagtggccgctccctgggccgtaggaaatgagcgataacgatgacatcgaggtggagagcgacgaagagcaaccgaggtttcaatctgcggctgacaaacgggctcatcataatgcactggaacgaaaacgtagggaccacatcaaagacagctttcacagtttgcgggactcagtcccatcactccaaggagagaaggcatcccgggcccaaatcctagacaaagccacagaatatatccagtatatgcgaaggaaaaaccacacacaccagcaagatattgacgacctcaagcggcagaatgctcttctggagcagcaagtccgtgcactggagaaggcgaggtcaagtgcccaactgcagaccaactacccctcctcagacaacagcctctacaccaacgccaagggcagcaccatctctgccttcgatgggggctccggactccagcctcggagtctgagcctgaagagcccccaagcaggaagaagctccggatggagggccagctaagcccctcggggccaggcccaacaataaaaactgtcctgtcctccctcggcttcatcctcccttttcagttcggtgggaaaagcccccccaaaccattttaaaagaatcccttaattgttcccccttcctcccctttgtttttttaaaattcttaattctttaccccaaaaaaccttcctggggacaaaaaggattctccggcnnnnnnnnnnnnnnnnnnnnnnnnacgggtaaactttctttttgaaggacattccccctctccggggaatttcccgtggtcccccccacacgtgagatttttctatcacc

SEQ ID NO: 323629 - DNA, 959 bp, Homo Sapiens
  misc_feature (211)..(211): n is a, c, g, or t
ggtggggccagtctcttattttccatttcattttcccccggcctgctcatttctgggggttccagggccccaagttcagcagcagggagttataaataaataaaattccaaaagcgggccgggagtgccctggccagccttcccgggggctatggctcagtgctcagtgagtgacagctgcaggatcccctgtaagtcctctccctcctgntgcccgcgccgctcccggtcctcttgttccggtgaagacaactccagggccaggcgcagctgctcttcaaagctgggtggaccgggggctgggggtgtcctgggagggggatcctgggcccccctgggctctgtggacagctgcaggcttttcctggagggcccgcctccagctgaagctgttcctcataaaccgtggcctggggaggagggcgggcaccgggccgggtgttggtcagggcttcccagacggtcacctgctccgcctcagtgcccgcttcaagcaggctctgctggatggcgaactgcaggaggtcatcgtcctcgtcccggaggggctcgttgcgctccatgcccagcacgctgtacccgttgggcacttcaaacacggtggggtccacctcgcacgggaaagggttccctgatgcggcgacagcagagctgggggccggcacccacacggagctcaggggctcatcacagccacacaggttgctgaaggtgatgcgggcattgagcacgtggaaaaggggaatctcaattttgacggggaagccaggtggaaggcgcagagtgatgaagtcgcgcagcttggcaaagtgagcgttgctgatggccattaggtcgatgatgggggtcacctggtcacccagggagagcgggtgctcttcactcagccacagtgttgccttgaacctctgtactttgctggacatctcgatggggcggccaatgttccgtgactccag

SEQ ID NO: 323630 - DNA, 377 bp, Homo Sapiens
  misc_feature (335)..(335): n is a, c, g, or t
  misc_feature (344)..(344): n is a, c, g, or t
  misc_feature (353)..(353): n is a, c, g, or t
  misc_feature (367)..(367): n is a, c, g, or t
ttgctgcgacagtctctttatttccatctcacgtctcccctgcctgctcattcctggggctccaggccaatgcttcagcagcagagagtttataaataaataaattacaaaagcgggcagggagtggcctggcagccctcccgggttattggctcagtgctcagtgagtgacagctgcaggatccgctgtaagtcctcctcctcctgctgcccgcgccgttcccgctcctcctgctcccgtgaagacaactccaggggccaggcgcagtgcttcttcaaagctgggtgggaccgggggctgggggtttcctggggaggggatcctggggcccctngggttcttntgggaaaancttgcaggcttttncttgggaagg

SEQ ID NO: 323631 - DNA, 410 bp, Homo Sapiens
  misc_feature (166)..(166): n is a, c, g, or t
  misc_feature (324)..(324): n is a, c, g, or t
  misc_feature (372)..(372): n is a, c, g, or t
tggagtcacggaacattggccgccccatcgagatgtccagcaaagtacagaggttcaaggcaacactgtggctgagtgaagagcacccgctctccctgggtgaccagttgacccccatcatcgacctaatggccatcagcaacgctcactttgccaagctgcggancttcatcactctgcgccttccacctgggcttccccgtcaaaattgagattccccttttccacgtgctcaatgcccgcattcaccttcaggcaacctgtgtgggctgttgatgaggcccctgaggttccgtgttgggtgccgggcccccagcttttgtntttcggccgcattcagggggaacccttttcccgttggcgagggtgggnaccccaccttgtttttgaagttgcccaacggttaacag

SEQ ID NO: 323632 - DNA, 421 bp, Homo Sapiens
  misc_feature (47)..(47): n is a, c, g, or t
  misc_feature (84)..(84): n is a, c, g, or t
  misc_feature (293)..(293): n is a, c, g, or t
caatccgttccctccgttcccggaaggggctccgtttgccgcttccnatgccccaacaacgcctgttacccgttgggcaacttncaaaacaacggtggggtcccacctcgccacgggaaaagggttccctgatgcggcgaacagcagagctgggggccggcaccccacacggagctcaggggctcatcacagcccacacaggttgctgaaggtgatgcgggcattgagcacgtggaaaaggggaatctcaattttgacggggaagccaggtggaaggcgcagagtgatgaagntgcgcagcttggcaaagtgagcgttgctgatggccattaggtcgatgatgggggtcaactggtcacccagggagagcgggtgctcttcacctcagccacagtgttgccttgaacctctgtactttgct

SEQ ID NO: 323633 - DNA, 906 bp, Homo Sapiens
  misc_feature (44)..(44): n is a, c, g, or t
  misc_feature (48)..(48): n is a, c, g, or t
gggggaggttaccagggtaaacactgccctgattggggccctcntagntgggcctccttcctgcatgggcaaagtgaaccccaacttgaccatctcccacctttttttaaaaaataaattattccttaccctccccccttacccaaattcccaaaatgataatcccccaaccactgactgggagaagtgattccggcagcagccttgctgcccagtgtcccaccacctgcatgctgggcctgctgggcacagccaggagcctgctggccctctggcatcaaggacccatgctgaatgaggctgagtgctggtctctgagactggctgctgagcaggcacagctctggctgctccaccaaggccttgctgcccctggggcccttggcaccgtccttctctgggtctgaagactcctgtgtaggtggtgctggctgctgctcctggtggtgcctgggcctctatggccatgtgctgggcccactcagatgccactgcttagatcagtgatgacgcgagctttcaccagcttccgcagaaactctttctctcgctggatattgtgcgtccaggactctttgatggctgccatgcgaacggtctcatagtagtgcaggggtgcgttgggtgtgctcatgtcatagccaaatcctgcgactgccacctcgtcacagccgtgtagtgccatggtcactgccacactgccaagggtagggatgttcccccggcccatgaggccattgttgaagggcaggccaatgagggtgaaggcggcctcctggatgaaatatgggttgaggattcgaatctcagggggctccttgggcactcgagtggccacagatttccagaagccatccgatgcactcactctctccttgtcctcgtgccgaattcgccacccaggcc

SEQ ID NO: 323634 - DNA, 886 bp, Homo Sapiens
gatatttttggcgttttattaaaaatggaaaaagttgttttagtgagcactcatggtgctttctcccctcctcccccaggcagaccccaaaagtgtcagggaaaggcaggccccctggaggggtgcggtggggctgaagcaggggctgctatggctaccagaggtgagctggtgatgtgagctgagttgtcacatgacactctccaccacgacgaccttgctgctctcggacactggggtcagggtggtcaggcccctgacatctgcgtcctgagctcggtactccaagtggtggaggccccagatgggctgggtcaggtgctgccagcgctcagccatggtgcccttggccctgaggaggcagcccaggaggtgcagcggcacgcacagcatggaggacagggcgaaggcccagcccatggcctcaccccaccacgggtacacgtaggtgttgttgtagaccagcggctcgtagtacacaacgttgaagatgaagatgcccattgcagaccagcggggtgaagaaggaccagcaccatttcatccaggggcaaggttggtacccgatcatacaggcaatgtcgtccatgaagcggtcagctccgtacacccaggccaccaccacgcactcccaaaaggcctgccagagcagggtggtgccgctggccgagtagtagtcaaacagctggaagacgtacatcccgccatcagtcaccatggagagatcgatgacaaagcagagggcacaacagagggccacagagatctccctttggaaacggaagtagtaggaggccgggaggaggtcgaggaggccggtgatgaagccctccacacctacaaactggctgtcgagaccaagccctcgtgccgaattcgccaccca

SEQ ID NO: 323635 - DNA, 896 bp, Homo Sapiens
  misc_feature (100)..(100): n is a, c, g, or t
  misc_feature (123)..(123): n is a, c, g, or t
  misc_feature (300)..(339): n is a, c, g, or t
  misc_feature (755)..(816): n is a, c, g, or t
aagcaaaaatgatagaaaatttattttgcacatttgagtgtagggtcctaaaaatgggtacctgctacccaagtgatgagctactgcctttgtttgttanctgctctttcctccctcagcctntagccttctccctttcatccagcggtgctagagacctggtgttgatatccacattcataggctctgagtgatctggcatttttaagatggcaaagcacttttgcatcctgtgggctgttgtctgtagttctggcatattgcatgcctgaaggcagagctagcactgctacctccaannnnnnnnnnnnnnnnnnnnnnnnnnnnnnnnnnnnnnnnggttacacagcaaattagaaggagtgtaggactaagacctaggcttcccaactcccggtccaactcctgggtgggtcaggggtgcaggtagattgcagaggatctgggatttggggaagattcctggaatttaggcttgtgcaagaggtcattccaggcttcccagcttaggggagcaggccctgtcctccacctgcaaggacaagaatcagagacatctgtgcagaagggatgctcagcggatgacctccctgagaacaggaactactcatcctgggctggcatccaaagcagccacttttgcagtggaatcttggaataacaatatcactccacactgggccttgccctcactttgcaaaatactctcatgtcctctcagagcctcctgaatgctctttgaggcaggcctggcnnnnnnnnnnnnnnnnnnnnnnnnnnnnnnnnnnnnnnnnnnnnnnnnnnnnnnnnnnnnnntttgcatggaaatagggagttgaatgaaagctcaggctttcgaggacagagtgagcctcgtgccgaattcgccacccagg

SEQ ID NO: 323636 - DNA, 1100 bp, Homo Sapiens
  misc_feature (856)..(856): n is a, c, g, or t
gacattcaacttgaggctcctgttagttaagctatcttctttcacttgaagcaggtttgagaggcctaggccagaatttaaattccttttatgaatagatttccctttcttcctgaccccaaggtcagaggagactatatattccatggctgcctctaagactaggaataggaatatctgaaaacagcatttctaagggtggtaaccacaggtcgattttaatacgagtcctttttcttgtagaggtaagtataatcttcctgacaaggtagtcctcttttcacggcacagacaatgggctttctgtttatgaggggtgagaagtgatgtttgttactatgttctccagcaagtaaacattcctctgctcacctcccaacaagactaacagtctttttagaagtaaatatattcaagacaaacgagaaaatcctggctacccaagtcgagtatatacaggaatacaaatcggtaaaccagcagctgtttctcaggttgtgactcactgagcaccacttgtcctggaggctggatgatggaggacatctggttataggtactgtagcagggataggtgcccacgggaggataggaactacagcagatcgctgttttcagaccggggaggagtatctcattgtgaaaccgactctagagtggttctatttggtcttcagtgttttagcctcattagttcatatttggcatgcagcttgtggtgagtactgttctaggactggccaaaaatgggcaaaatgtatcactccaaacactactgattcagcattgttttcatgtcttaaaattgccacctgcactttgtttctgcactattatgtagtgcattttaacttanattttttccagcaacatgttacttatttaagatacattactgatatttcattataattagttcaccttccctgtgaaaacagagaattgtaaaatgttgtggaaaatgatacatatgtgggatgctaatgaaatcatagtattttggtgtagcttctctgaagaccttagaagacctgcaagctttggtttaataaggtgtttggggcccttatcaagccccttcttgatcccgaattcaataa

SEQ ID NO: 323637 - DNA, 971 bp, Homo Sapiens
  misc_feature (308)..(308): n is a, c, g, or t
  misc_feature (329)..(329): n is a, c, g, or t
gttgtccatccgagccgaagcaggtatgtcaaaatttttttccaggaattgccgggcgcttggggggctttttcagggtggcccggagttccacctttgtgaaattacttggggttttgggaaataaatagtttttagggtgcggccagccagctgaagaaagtgcaccccggacggactttccttgatgctgccccagtgtctggtccataattataccaggtgtcaggggagcccagggcctgcagaattcgagggcaaggccgtgaggggacacagcagaaaggcctcttctcctggcccttacnttccatcaatgccctgtcctntaatctccaagagtcacagtccccagtgggacctgtttgcccagctctcaatcctacattaaaggagccgagagacttgaccaggggactctgcttcatcgcccccacaaaggcaacctattctaggcctgaggttcccagaatcccaccccatttactttggccccctaaaaccagcagcaaaacaagagctgaggccattcctacacagcaccccatcccctaccccttgcccctccatgccagacttagctcagaaaccatcaagctggggaactgccctctgctgctaactgagcaagctggtagtcctgatgggagggactctggaagcccaggcaccaaagacaatgggggaactccgggtggcagcagtcgtggtggcaggggggggtccacaggccactggatgcccacattaagcctgtcaaacctttgaagaacaagtttggggatttgggcagcctttgctatgtgacatttaggaagaaaaataccagcttttgaattactgcagacgactgggggcctaggcagtatgcattctatacattcataaggattcctgtacccccaggagccccagttgggatggtctgagtttactgaggccctagcctcgtgccgaattcgccacccagg

SEQ ID NO: 323638 - DNA, 560 bp, Homo Sapiens
gctgggaaccagggctgggggaaaagctgtgggctctaggtcccctcctgcctgcatcctccataccttgcagttgatccctggtggcacttcttgaatcagcagtcccagggactccactggaactctcagcctcatagttgtatgtgtacttccggaggtgcttgaatcgggtcgcatcttctaacttggggagaaatacgtcagccacatagcaagaaatagctctccccaaggacagccaattctgggcagagaggggcagtggcatagagaattaaaaatggtaattcaactcaaattattttttaattgactttatacttaattttcctttatagatttgacttctccattatgtttttgctgaggctaatgtttaaattggctggcatgtcttgaatatctcatctgaggcacagggaagggagtgacaagtgtcaagtaatggggctcagaaaatctgcatgagagaccctctggcaaattaagagatgacaacattacgcaaatagtactatctctaatgcttttttagcttgaacacgccgtaattccgt

SEQ ID NO: 323639 - DNA, 975 bp, Homo Sapiens
  misc_feature (158)..(182): n is a, c, g, or t
ggccctatgcttggtcttgcccacaggcgtggggcccgggcgggcagcgtttttccttccgtggagtggagacaggtccggccgcccccagttggactggggggggtcccgggcttggtgccccacccggcgtgccaaagtgtgcaggcccctttttnnnnnnnnnnnnnnnnnnnnnnnnnctttgggtccgcggtcttttctttgccccccccgagctgcctttcttcctctggaggatcatctcatagaggcgctcaaggccctgctgcaggcccagaccgtccacagcgctgcagctttgcacatgagtgagagtggcggctgctagctctcggactgccagcttcttctccacctcagcagcgctcagtgccccgggctggtcctgcttgttggccagcaccagcactggcacgccctggttgtccgaggcccggctgattcggtgcaactccaccttggcttcctccagccgctcagcctccgcagcgtccaccacaaacactagaccgtctgtccggcgggtataagagcgccacagtggtcgcagcttctcctgccccccgacgtcccacacttggaaggtgatgccacgcgatcccccgaggggcacccggatcttctcggtgttgaagcctttggtggggacactctggacaaactccttgaacttgaggcggtaaaggagggaggtctttccagcagagtccagcccaatgaccacgacatgcagggcttggaagtggggcaagaaggaggaggcagtgggcgccatctcagtcaagtggttccccatagtgagctaaggcgcctagtagaggcagggaggccttgaaattgaaggttccagggagcacagctgggttatctctcgtgagccgcgctctcctcgagcctttcccggtgaaacaccgcaggcgccccgcgagacccccgcagacacccaccgcgcctccaaccgctgcctctccc

SEQ ID NO: 323640 - DNA, 1041 bp, Homo Sapiens
  misc_feature (43)..(43): n is a, c, g, or t
tgggcccccagaggttccatcttttgtgaggaaataaaggggnccccgggggagtcaccaagcgaagtgttcccccccggttatccccccaagggggaaggctctggggcggggagagactcgggaagttctgcgctaagaaggggtgttggaaccctgggtgtttggggggaaaagttcattcctccatccttcggagaacccccttcaaaccaggaaagcccccctgggcatattcccggtatgagctggaggggcatgctcccgggaggaggagtcagtcccaggccattggggcattgcctgcttacggagtgcagaaccaggacaatggcattgacgagggctgggtgagcaggccccaacgtatcaagcatattgggatcagcgaagacagagaagaggtccttgtcctggagaaccccaagagcaatagggtcactgctgaggcctggggtggccacaatgatctgatccagagactccttattgctgagcatcttaaagaccgcctccctgtaagaggagctgctgtgcagggcagtgtgcaacacccggaactctctcatggcagccactttgtccacaggttccggtttctgatcaggttcaggccaggactttcgcagaacatggacagtggacccaggttgaatgccatagaagtcaagtgtctggtcatcttttagcttccgaccacagtagatcagatcaatcagctcagggtctggaacagactcctggagtttaccagcaataagctgcttcagaaatgaaatactatagccccctagcgagtattctcccagttctgtctctggcaaccgaagaatagactttggagtaagtggctggtcagccagcttcaccgccaggtgccagtctgagagagacatcctctctctttcgcgctctctctttctcccgctccagtgggaccagctacttggctgacacacatcgagcccgcgctgcccagggccccagcgccctcacccgtcccgcggaaggaaccctcgtgccgaattcgccacccaggcc

SEQ ID NO: 323641 - DNA, 1005 bp, Homo Sapiens
  misc_feature (14)..(14): n is a, c, g, or t
ggtgagcgggtatncggggggcgggagaagattgagcgggcggggtgaaagcgatgagattacgtgtggagtaaggtaaagggaagtgaggaagaagaagcgtgagtccgtccgggtcgtacactaacggaaaagggtcgtacgaagggtagagggcggtgggaagggacaggtacaggtcatactccggggagcgtgtgtgggatatacacattcgccgggtagccgttaggtgggagggatcggaacataaggtggtccgaaggatggttgggcaagtgtggggcgcgcggcgggatatgtccgtttgcgcccgacctaagcggtgagatacccggggaactgaacgtggaaatgcgttccaaaagtcgaggaaagcccgggcggtacggaagttatggcctccgtagtccgcgtgggagagggggggtcaacgtgtcagtttaccacgacgttgcagggattcaggcaccagtcctagtcagcagggagcaggaaggggggccagcaccactcgggcggttcttctggatcaaagggtgttgggtccagctgcagcaggtgttgtaggagcgctgggtgctgctgctgatggtgctgaaggaccacttgggagctgcggatggaagttcggctggaatccctggtgccgactcccccatccggctccggagaggcctgggctccatcctcatcgttctccaggttctggtagcgcagccgggactgcttgtcctcgtcagccacctcgaaccgggcccgacgctcgaagtgcagcggcccaaagcgcgcgaccccgctggactcgggcccagggcccccgtcctccagggacagctcgaaggcatcatcaatgctgaactggggccgggcggcgctcatggccccggcccgctcaggcgccgtgcgccgccgccatctgcgccctcgtgcggaattcgccacccaggctcgctacgtaggcgggttgccatggggagaagcaattcgggcggggaacgggag

SEQ ID NO: 323642 - DNA, 977 bp, Homo Sapiens
  misc_feature (379)..(575): n is a, c, g, or t
  misc_feature (659)..(659): n is a, c, g, or t
tgagtacatgttcagttagggtttattttggtatctgtcatagaaaacccccaaaaccagcagcttacacaaggtagaagttgagattggttctccccttctctctcccatttaaataagtttgtgctgatatctggctctgccatcatcagggaaccaggctcctgtcatccctaaaggacggcactcgtctgtacacgtggcagtatggctgccagggctccagccatcacacccacattccaggaaataggaagggggaagaaagggtgtatttgtcttttaagaatccttctagaagtgtcatgtaacatttccacatacatttcactggccagaccttaactataagggcagctgggaagtgttgtattttaannnnnnnnnnnnnnnnnnnnnnnnnnnnnnnnnnnnnnnnnnnnnnnnnnnnnnnnnnnnnnnnnnnnnnnnnnnnnnnnnnnnnnnnnnnnnnnnnnnnnnnnnnnnnnnnnnnnnnnnnnnnnnnnnnnnnnnnnnnnnnnnnnnnnnnnnnnnnnnnnnnnnnnnnnnnnnnnnnnnnnnnnnnnnnnnnnnnnagtcccggcacaaaagtcgcttctgtcctccatgaagcctgcacactctggtgtggctcctgtcgcaatctggacctctctccnagttctagagtgttgtctgcttttgtgttaattcctccgtcagcagtgggaggagaaccatgtcactcgtatcttgtctctctggtgcctagcagagtctgggcacaccgtggcactcaaacataccccctgaatgagtaagggccaaccttgaaatacctgggagctgtcatcgaataccacggtgtcatttgtcccatcccgtcacagatgtgaaactgcaggcctggcatagataagtcgactcccgttggttacctagctgaggccactctaggagctgaggccgaaaatcaggagaaaaagaaatccgagtaa

SEQ ID NO: 323643 - DNA, 1413 bp, Homo Sapiens
  misc_feature (842)..(852): n is a, c, g, or t
acttgacaagcttatctaagaagcagatttagagatcagatttctccatttgctctactaagaaagtacaccaattcaaatttaagaactattttttaatagataatacatgtacatggtacaaaattcaaaaggtacaaaaggtgtacattgaaaagtcattcccacccctcttcccagaggcaattcaggctgccgggctgctagatatcctcccagagacatcctaggcatatgcaggtggacatatgatatacacgtgtatacgtctgtgtgaaaacatatgcacacacatacatctacacactttctccattccaaacattaggataccatgggcttttttcctcacttaatcatgcatcttggggcccattctatggtagtacacacacacaggatccattgttttaaatttctacaaactattccattgtttaagctggccataatgtatttaaccattcccctgtattggtggcactctccaactttttgctattacaatgtttcaacaaaacctcttgtacacaagtaccttgtacgcaggtacaattcttagggagtagcattgctagttcaaagagcttatgcatttgcacttttgatagacaccgtccagctgtcccccatggagtgcctacatgtcacactcctgccaccaccgtatctagtgctgccacccacagccttgcactgtggtcccacttcttggttcacatggctgagacatttctgcccatcaagttacctttaggttcatgacacattttgagccaaaacataccttatctctaacattagtgtagttcttccctctctttttcccttcttagggaatnnnnnnnnnnntctgtaaaaggcaattcctttgaaagattcaaaacctctgacaccttgtttcatctcaaacttcaaggttacagtataacatactctgagagagaccctctaaagttgtgaaaactgttctcaaactaagcatcaagtagaggaaaggttcaatctaaattttcctaatagagatgcaaagttgcaatgtggaaaagccattttatccaaccggaatttcccagtcagtcatctaccttgagctagatgctggggagagtgtggtaagacaagcccttacttttgttgcgcagggccactggacatgggcaggcaatggggacggatgtaaggctggcgtggaacatccacggtattccctgtgttgtcaagtatgctgcagatcagcaccagattctccagttttgcacatttattgagaagagggaatactattatagcattaccttttacaatgcatcttcagcctgtaatagaaggaatgctctggacttcatgaaaaggatcaagagagggcctgggggattctgaagatgcacagaacaaggcactttccttggc

SEQ ID NO: 323644 - DNA, 1177 bp, Homo Sapiens
  misc_feature (46)..(46): n is a, c, g, or t
  misc_feature (87)..(87): n is a, c, g, or t
  misc_feature (612)..(673): n is a, c, g, or t
ccccttccccaaatgacctctaaaatagtccaaggggattaaaagnaatcccagcccccagaaagttttagatacaaaaaatagtancccaccccaactgaatttgactgcattaaaaaaacataattatttccaaatctactgtgcagctgaagtcttcagtgacgccaacggtcactgggattcgaagactcccgctcccgggagcgtcgggcccttttatgcctatgggatttatctcggctcctacttctacttctataactacgcccttcagaacgcccattataccagctagaatgtgcatctgagctccgccctctgtccctaatcctggtcttttcttctcttgcctccctcctgcttgaggacttgtgctcgtgcttgggtttctccttcttcagctccctctctaggtcctctgctccaccagagtaggccgtcctggatttggggagcttctgcccctccctgggctctgacttctgagctctctctgagttcttgctgctgtgcttcttagggccagtgtcatccttttcctttactgtcttgcgtctgggtgacgaagaggatggttgctctgcctgtacctcccggtcggctttctcnnnnnnnnnnnnnnnnnnnnnnnnnnnnnnnnnnnnnnnnnnnnnnnnnnnnnnnnnnnnnncatcttcagagctctcagacaaacttggtgagggggtacgagccccacagcccttctcctggagttgtctggtcacatcatctatttcttctgagtccttaggagcccgatagttagacacatgatccactcggatagttgttcctttgatcttgatcccattaaaattgtcgacggccagaattgtgctcctctggtcttcatagcagaggaaacagaatcctttggatttcccagttttcttgtcccgcacgagattaatgttaacaatctccccatattgtgagaacacacagatgatgtccccttcagtcagttcataaggaagccctcccaggaagatccaggcgctgtccttgtactcggagtgccaggacaccttatcggccaccccaagctggacctctcgttcattcagctcgttgatcagcttcaccttagttaaagggttcatctcctcgggttcgcgctcagcactcaggaatcagcgcccgggaaaagccc

SEQ ID NO: 323645 - DNA, 999 bp, Homo Sapiens
  misc_feature (262)..(299): n is a, c, g, or t
gaggcgtagattgtggctatatgagggaggaaggctcgcagatttctcgggggtatgggaataggcggggaatatcaatgggggcgaatgtgaggtttagaatgaaggtgggtataaaaggcgggaaatacggggcgagaggggcgataaggggggtcttagccgggaaggtgtggggcgctggttcgggtcgcgtggtttaccatggggcaagcaagcaatagagtgcgaatggggcgggttatagttgtggaagggtttnnnnnnnnnnnnnnnnnnnnnnnnnnnnnnnnnnnnnncctgtgggagttcgacaagggggggaccggggccctcgcgggtcagggggcaagcttggtgcccttaaaagcccacactcgctccacttgctcacagtttttcggggatgatgtatttgtccaatagcaagacaacccctaccatctcatcagtgaaaaacatcagtcctctatcaaggcaatctctccaatttgctcacacagtgtggatggaatgtcatctactttctgcatcctaggggggaaaaagaaaacggccaccttccttaaggactagatcacagaaatcgcacaaacgtgctggggagggggcaccccgaggtcctcgttcatcggggcccctcgggggacgggctggggtcgtcgccgaggtctgcggtcgccccgagagcgccccttgcgtgtgcaagtcctgggctatggggctccggtccacagccacggaggaggcacaaaaacgatgcctgtcgctcccgcctggctggcaggagcgacccccttgggagacttcgggccccagaggagcccgggcgcggttctaggcctttccagtctccccgccgtggctccgggtccttcccgcggggcgaggcccgggacagaggtcgggagcgcgaggcccccgggccgggctgcggcagccgcggctcaacggacgccgggcgcggtggggccgggggtgcctcgtcccgaattcgcc

SEQ ID NO: 323646 - DNA, 945 bp, Homo Sapiens
  misc_feature (143)..(143): n is a, c, g, or t
  misc_feature (219)..(219): n is a, c, g, or t
tttttttactttgcagttgtgtttttattgtagagacttaatttatttaaagaaagaagttgtctgtagtcctgtccctgtccttggagacatgagggggctgttctggtgtgaaggaaagtaggaggggacagaaaaacccncgtatcgattcagttccatcatccgctgcagtgacttgggaaaacagaatccagcatcccggtcctcccagcctcnaggatgaactggtgaggagttgttctttgtgctgtggccagcgtgaccagggtgggctcctggcaatggccactagaggtcaggagggggagctggcttagtggaaggtgttggggttcggtcggatcatcatcaccactttcttgagtgagtaagagcctcctcggaactcagcccagtagactccgtcctggtagcggctccggtaatggcccccgcggtaccagaccccgttgaggttggagtgggcacaggcgttataccaccagcctcccttctggtagtgggcacagtttcctgtgtagacatcatgatctctgtccagggtggtgaactgcttgccgttgtgccatgtaaaggagtcacccgcattgccatggtagcgccccagccgcagcttataatactcgctctcaggttccaggcggaaactggcgtattctgcaaagactttgcggccggaccagtcctccatggtcaccaggagtttgtagttgccttggttcgtcagccagtaaatgttctccaggcccagccagtattcgccatcaatgttcccaaacccttgcttgtacgtctcccagttcctgaagaagttaacagagccatccaggcgtctctggatgacggtccagcccccggggtcgtgtctctggtcgcaccacacctgcatgaggcggttgggttctccggcttcaccctcgtgccgaattcgccacccaggcc

SEQ ID NO: 323647 - DNA, 1039 bp, Homo Sapiens
ggcctgggtggcgaattcggcacgaggagaaaggcattttcttataaagccactctgtttccgtgcctggctgtgagctgggtcagccatgacaaagataagcttgtgtgttgtttttggttgtttttcctttcaagctcttcccctggcactgccaggccccaggctgtttggatcggttgtgtggaggccagtttacttgttttggctttcagcctttctgttcagcattgatgatagaagagtgggcctgtgtcctgcgtggccagtgatgggctatcagcatggcttggtggtggcaccatgcccaggtgccccttaggaggcacacaatgtttagaagccacacagtttgtgaggaaggtgaacattctaaggaaggagactggcagagattgtaggggactcgagaggggtctgggcacagaagggtctgcgtattgacattctcaaatattaatacaaatacctaacatgtggagtgcttactctctctaggccctgtcctaacagctttacatatattacttcctttgaacctcccaacaatcctgtcgaagacatggaattattatagtccgctttcgagcagccgcaaatcggggaagggacagggtacataggttcgcgccgagccccacgcacccaagtacgctcaagggcccgccgcggcgcgaacactgccgatcacgacagaacacccgggcgcggaaagcgggaggacccagggaaggtgggccatgcactagccaacgcatgcgggagctctagccggggggaagcgggagagccggaattccgccgccaggcccgagacgctgggcccccagcccagaggcaacacgcacgacaaccagggacaacgcgcggggccgcacgcccagccacacgcgacaggcccacgccctccgaaggaccgctaccccccccgcggacccaccggcggaccgccccccgcacacaagcccgacggcgcggccgtagccgaccgcacgtcctctatcaggaggatgcttagcgtgcccccactcatacgcag

SEQ ID NO: 323648 - DNA, 1002 bp, Homo Sapiens
  misc_feature (815)..(930): n is a, c, g, or t
  misc_feature (935)..(953): n is a, c, g, or t
gcctgatgtgagtatgagaagggagagtgtttcccacttttggggggaatttttgttctcttttggaagttcagaaaaatttttcaagggtctccttcaaggggcttgggaatcattcccaggacattcttttggccccccattatttttttctttccaagtcctttagaaattttcctggatttggcttcctggggcattggcccagccttttccccaagtcacagggtttggccagcagggaatggaatgggtaaaggtttatggatccaggcaagactctgcccagggccaagatgccttaacaataagccaccattgtgcaggtgaaggcccagcaggcagacctccagctgcaacctaggttacacctgagctctagaggtcaactcatggcagggagcaggaacctggtgcccgagccgaccctgctgagggcatgttgataatgggggacctaaggctggagtaggctgggcctacagcgcaaacgttcctccacaacctgaatcttcttcttactggctcccaattcagaggactcctgagcaaacctctctcctcatcattcactacactggcgagctacctctgttgtggggcaaaggaaggggcacagtcacacattaggagaacacagggctgtcctcaggctgacgaatgtccaatgggggacaacttgttggaagcctgacctggcctctctctgagatgaccagaatgggtcctgtccagccaggcagagcacagacaggctgccactagcctccctccagccctctcctcttcactcactggatcaactccaaatacannnnnnnnnnnnnnnnnnnnnnnnnnnnnnnnnnnnnnnnnnnnnnnnnnnnnnnnnnnnnnnnnnnnnnnnnnnnnnnnnnnnnnnnnnnnnnnnnnnnnnnnnnnnnnnnnnnnccttnnnnnnnnnnnnnnnnnnnttcgacagagtcttgctccgtccctcgtgccgaattcgccacccaggcc

SEQ ID NO: 323649 - DNA, 1074 bp, Homo Sapiens
  misc_feature (183)..(191): n is a, c, g, or t
  misc_feature (278)..(286): n is a, c, g, or t
  misc_feature (325)..(398): n is a, c, g, or t
  misc_feature (445)..(484): n is a, c, g, or t
  misc_feature (493)..(510): n is a, c, g, or t
  misc_feature (1059)..(1059): n is a, c, g, or t
gtggtaggtgggggtggttaaccagaagttttcctggaagggtgggtggccgttaaggttgtggggttccgctttgaagagaacccgcggtatttgggtattttggcgctttcgcgggggaggcccggtttcccttgtggaaaaaagaggttgggtaggctcttggatcccggccaaacaaannnnnnnnntggtaggcggggggttttttgtttggcaacgcagcccgattacttgcaggaaaaaaggattctcaaggaagatcctttgggtccccnnnnnnnnngcccgctcttagggcgggtaaatttcccgggtactgcannnnnnnnnnnnnnnnnnnnnnnnnnnnnnnnnnnnnnnnnnnnnnnnnnnnnnnnnnnnnnnnnnnnnnnnnnacccctttgtacaagaaagctgggtcaggaaacagctatgcccatgnnnnnnnnnnnnnnnnnnnnnnnnnnnnnnnnnnnnnnnngcctggagnnnnnnnnnnnnnnnnnngcatttaaatcttttaattcacttcatcctgtattttaaaataaatgttttccatatagattttccccttgggggggaaaagaattcagggtcttaggttccaggcagttcaaaaacagccacgcggttcttttttctccaccagaataccacaatagcagaacttaagaatcgggatatgaaaagggaggcgtggtcctggcagtggcccctggccggcaggaatacacagcaacacccaggcaggggcagcggctgcccccatgccagcctgcccatccctgtaatgacagcagggcaggagatgcagctgtggccctgggggcaggtgggctctgaggctgcaaacaccctgagtgccagtggtcccagagggggtgaggcctctatctgtacctttattccagccagcctcctggcacagggctgggcccacatcctggcctctgcatctggatcagggctggtgctggtcagcctggtcactctggccctcgtgccgaattcgccacccaggcctgggtggggaggggggtggcgcgcagtgcnccacagcgggggggg

SEQ ID NO: 323650 - DNA, 1213 bp, Homo Sapiens
  misc_feature (18)..(18): n is a, c, g, or t
  misc_feature (77)..(77): n is a, c, g, or t
  misc_feature (80)..(733): n is a, c, g, or t
  misc_feature (747)..(747): n is a, c, g, or t
  misc_feature (751)..(799): n is a, c, g, or t
  misc_feature (804)..(806): n is a, c, g, or t
  misc_feature (809)..(809): n is a, c, g, or t
  misc_feature (813)..(815): n is a, c, g, or t
  misc_feature (823)..(823): n is a, c, g, or t
  misc_feature (826)..(826): n is a, c, g, or t
  misc_feature (828)..(828): n is a, c, g, or t
  misc_feature (832)..(832): n is a, c, g, or t
  misc_feature (835)..(835): n is a, c, g, or t
  misc_feature (839)..(948): n is a, c, g, or t
  misc_feature (952)..(954): n is a, c, g, or t
  misc_feature (963)..(963): n is a, c, g, or t
  misc_feature (966)..(966): n is a, c, g, or t
  misc_feature (971)..(974): n is a, c, g, or t
  misc_feature (976)..(976): n is a, c, g, or t
  misc_feature (979)..(980): n is a, c, g, or t
  misc_feature (983)..(983): n is a, c, g, or t
  misc_feature (987)..(987): n is a, c, g, or t
  misc_feature (990)..(990): n is a, c, g, or t
  misc_feature (992)..(1018): n is a, c, g, or t
  misc_feature (1021)..(1022): n is a, c, g, or t
  misc_feature (1024)..(1029): n is a, c, g, or t
  misc_feature (1031)..(1031): n is a, c, g, or t
  misc_feature (1034)..(1039): n is a, c, g, or t
  misc_feature (1041)..(1051): n is a, c, g, or t
  misc_feature (1054)..(1059): n is a, c, g, or t
  misc_feature (1061)..(1069): n is a, c, g, or t
ccatatcaccctaataanactatacttacacttattcatacaaccacaatacataactacacatataatatatcacnacnnnnnnnnnnnnnnnnnnnnnnnnnnnnnnnnnnnnnnnnnnnnnnnnnnnnnnnnnnnnnnnnnnnnnnnnnnnnnnnnnnnnnnnnnnnnnnnnnnnnnnnnnnnnnnnnnnnnnnnnnnnnnnnnnnnnnnnnnnnnnnnnnnnnnnnnnnnnnnnnnnnnnnnnnnnnnnnnnnnnnnnnnnnnnnnnnnnnnnnnnnnnnnnnnnnnnnnnnnnnnnnnnnnnnnnnnnnnnnnnnnnnnnnnnnnnnnnnnnnnnnnnnnnnnnnnnnnnnnnnnnnnnnnnnnnnnnnnnnnnnnnnnnnnnnnnnnnnnnnnnnnnnnnnnnnnnnnnnnnnnnnnnnnnnnnnnnnnnnnnnnnnnnnnnnnnnnnnnnnnnnnnnnnnnnnnnnnnnnnnnnnnnnnnnnnnnnnnnnnnnnnnnnnnnnnnnnnnnnnnnnnnnnnnnnnnnnnnnnnnnnnnnnnnnnnnnnnnnnnnnnnnnnnnnnnnnnnnnnnnnnnnnnnnnnnnnnnnnnnnnnnnnnnnnnnnnnnnnnnnnnnnnnnnnnnnnnnnnnnnnnnnnnnnnnnnnnnnnnnnnnnnnnnnnnnnnnnnnnnnnnnnnnnnnnnnnnnnnnnnnnnnnnnnnnnnnnnnnnnnnnnnnnnnnnnnnncccccacaaacacncacnnnnnnnnnnnnnnnnnnnnnnnnnnnnnnnnnnnnnnnnnnnnnnnnnacaannnaanaaannnaataaaanaananaaanaantaannnnnnnnnnnnnnnnnnnnnnnnnnnnnnnnnnnnnnnnnnnnnnnnnnnnnnnnnnnnnnnnnnnnnnnnnnnnnnnnnnnnnnnnnnnnnnnnnnnnnnnnnnnnnncaannnaacaaatanaanaaaannnnanaannaanaaanaantnnnnnnnnnnnnnnnnnnnnnnnnnnnatnnannnnnnanacnnnnnnannnnnnnnnnnatnnnnnnannnnnnnnnacaccgccctctccgctcctgcagaccgggtcctggagggcggccgggcggtccacgggccggtgtcgcgccgccagagagaacgcggcaactcgcttcagccgactctggactcctgcctcgtgccgaattcgccacccaggc

SEQ ID NO: 323651 - DNA, 1168 bp, Homo Sapiens
attgttcaagcagaaaacaagctgcttttattacagtatgatgtcatgactcatttgtaacagatccagcctcagggacagccctgtaaggcagcaagtggggctggctccaaatgggtatgagtctcagaatctttggtaaggcagaactgaactgggctgagaggtggtcttaaggcctgggcaggctctattctctctggactggctgcagcctgcagtctaggagaggcccagtacagcctggagctcctgagccttgtcaacaggcagtgagcccagagctgcttgaaagctgtcggtgtgctgtttggccaggaacgtcaggagcagcaacagtgcggccttggtgtctggtgggatcttgttgtcagccagaatgaggctgcagatacgcagaagctcgggagccacatctataacctggtcagggctgctctggtacaggaagctgaagaggcgcccaatggtgacccactcctccaagtcctccttcagtggcagggcatgcagtagggcagccagcacctggggctctggtttcctggtgggactggcccttaacaggcgggcaagtgccccacagatgttgtcacggacacgatcatgtcgctcccgcgccaggaggggaaaaaggagccccagcagcttggggaagtgttcctgggcagggtggcccccatgctctgccagcacgcccatcccgaagatggcattgcttcgcacctcggggtctgcctcttgggcggtgctcaacagcacagggagcagccgagacacaaactgggctgaggcagcacccaggccctgaatagtctctgccaaggtccccactgcaaaggacttctctgccactgtgcagccctgttttgtcttgcccaccaataatggcaggaaaccggcaaagaatggggcaaaggagtctcccccagccgcggctgccagggcagggatggcctctccagcgtgctccagcaacatggcgtcgtattcagcctgatcatcatcttcctattcctcctcctcgtcagtatcatgacaggctgtcttcctctgcagcacagccttgagcacgccacagagctcagcgaggcgcccagggggcttcagtgtgagggtcccacagctgcggagcacccctgtcagggcctccagccctcgtccgaat

SEQ ID NO: 323652 - DNA, 387 bp, Homo Sapiens
ccaaccagaacacttctgagcgtggaagaggatgctgttaattactcaagaccaaaaggcataaaaggagacatatgtccacccaagtgataaggcagtttgggaaactacatttcccagtatgccctgccccttgaaagttaaaaatcttaactggcacagagcaccctgggacacctgtggttagcaccatttaagaagtaaaaggtatagggttgggttctgacgtgaaggctttccccttccatgggacacttaaccagacacaggacacaacacctgaggtgaaatttcaatgggtattaagtctggggtagagcttctctctccccaaatctagcttccaaagatgtggagctggtggagcttcctcctcgtccgatcgcc

SEQ ID NO: 323653 - DNA, 796 bp, Homo Sapiens
  misc_feature (43)..(67): n is a, c, g, or t
agaaagcttcctcgaggggccgagggcggccgaccatgttttnnnnnnnnnnnnnnnnnnnnnnnnntctgcaaagtcacactttaattcactctctggggaggtctggagggttcctgggcagcagacctgggtcctgggaaggaggcatgttggggtgggcactagttggaggggtggaaaggcaccacattggtgcccctgcatgtcgtggatgcagcgcacggactgtacctgagggtgacgggccccaaagtcgctgctgtccttgtagtctcccttctccagcaggtactgcagcccacggtagccagggtactagtagccaacccacgtgccactccgcacccacacagatgacaccttctcctggtagccatgggcgtggaagctgggtacatcgtcatctatgatttccatcttcttcccggtgaagttggggttttcatagaggatgatcttgtgctcttggctgtccactttgatgggcctcaggctgctgagtctgtcctctggctgctggtccaccagtcccagtgggcgtactcgcccttctcaaacacaaactgctcgcccttgcagttggcctgttcatagctcacccagcgtgtagaaaaaaatgccccggagaagctgagctgcacgcagctcccgcctaagcagtcagggccatagacgtgagctgttttctccccaggacggggctccaaatggtccccaagccgccgcggtgccccctgaagcgggtcctgaaggaaccggacccgctttccttcttctcattctggactccccc

SEQ ID NO: 323654 - DNA, 773 bp, Homo Sapiens
ggatgctggtactaagacatttattatatcataaaaagtccactgttgttctgtttttccatatgtacatgctcctgtgggcagtcccccacccagcccccacctgcctaccctccatggtgccagtcaactctccaaactgaccaactaattagtaaaagaggaagaactggaggaggtggcccagggctaatgggagtgggaaacaaagtgcagagtggttgggcttagttttcaatgcctgaccgtgggcaggcactgcagggccggcacacggatgcctccccagagctgccgggctggaggcagaggctgcagatgacagctgagttcactctcaggctgaacccccaggaatggagcgcagaggaggaaaaaggtcccacagctgattgggggtcttagctggggctatcaacattctctttttcaggtccccatccaagtggcagcaacagcagctctgacttggcctgaagagcttgtggcccgcaggacagccagaagtggggtcaaggaaagcctggtgggaagcactggtcctgatctctgagtgacctgccttagttgacctcagaggtgggtatgggatctgtggggcggggtgtggccaggaggggcactggtgaggtggcctcgatgagcgcagggttgaggatgatgggcagagtcataggtggcacgcccacctgcagtggggaggccaagggctgcaggatcagtgggggctgagccaagggtggaggcccgcctcgtgccgaattcgccaccca

SEQ ID NO: 323655 - DNA, 985 bp, Homo Sapiens
ttaggttaggaaagcccacaaagggttttctgggaatcaattattaggtttcgatggtaagtggctagaaaaaattttccaattaccagggacttaagccaaaggggagagactatttttttcccctgaaaagtacaaagggtgtcagatcacggactgaccaggaatgttttacagtaccaggccccctggactcctttttaaccttgttgatttttttatgcaatggcttcttttcccaagggtcatctggggttctaggatgactgctccagtttccagtcatcatgtatacattccagccagcaggaagaaagaggaggtgaagggcaggatatctccatttaaggacttgtcatttttgcttatatcctattaactagaacagtcactaagacaaatctaactaggaaagtgagtattctgggtagtcatgtacttttgttaaatggagaattctattacagaaaggggaaaggatactgatggacaacttgcagtctctgccacattcctgagttaaacttatgtaactaggcagaggtaaagctagccaaccactgtcttccactatagggaggggcaagctgcttatcactgaacagactcacctcaagggtcaatcgcttgcaggaggggaacacagaaggggctgagccacacatgctgggttccttctcatttccacaactgatgttcgacttttctacggggcagtacagagaactgtcaaaaggcaggaaagcagtacatgatttggcaccacagtaacaaggtttccttagtttcccatgatctagcctttctttgtcttcactgactgttagattaagatatcttcctgaataatcataagagagttcttcttctggcacaatatctttggctgcaaaaagtgccaacttaggtaccattgagtcaattcggacaggaatcatcaaaaggtttgcctcgtgccgaattcgccacccaggcctcgctcctt

SEQ ID NO: 323656 - DNA, 920 bp, Homo Sapiens
  misc_feature (387)..(387): n is a, c, g, or t
ggagcagtgctgaagccaaagccgcctactggtttgtagttaacctagagaaggctgaaaaattaatcctacctttaaagggatttgaggtaggctggattccatcgccacaggactttagttagaattaaattcctgctcgtaatttatatccatgtttaggcttttcataagatgaaacatgccacagtgaacacactcgtgtacatatcaagagaagaaggaaaggcacaggtggagaacagtaaaaggtgggcagatgtctttgaagaaatgctcaatgtctgatgctaagtgggagaaggcagagaacaaaggatgtggcataatggtcttaacattatccaaagacttgaagctccatgtctgtaagtcaaatgttacacnaaaaaaaatgcaaatggtgtttcattggaattaccaagtgcttagaacttgctggctttcccataggtggtaaaggggtctgagctcacaccgagttgtgcttggcttgcttgtgcagctccaggcacccggtgggcactctggtggtgtttgtggtgaactgaattgaatccattgttgggcttaagttactgaaattggaacaccctttgtccttctcggcgggggcttcctggtctgtgctttacttggcttttttccttcccgtcttagcctcacccccttgtcaaccagaattgagttgctatagcttgatgcagggacccagtgaagtttctccgttaaagattgggagtcgtcgaaatgttttagattcttttaggaaaggaattattttccccccttttacaggggaataacttctccacaaaagtggccatatgggcaaaattaccccaaaaaaacaggaattgcaatggaccccctttacataaggggaacatttgaaactgttaaaaggaagtgctccttcc

SEQ ID NO: 323657 - DNA, 1144 bp, Homo Sapiens
ccgggtgggaaacgtgcggttgggtgtgaggtaagttgagagcagtgtgtagccgcccctggggtggtcccacacgggggcgggcttgcggaagaggggcctgttgggttctactggtttcccgggaggcgtggaagggccgcgcgaagaggtttccgggggttgatggcaagcgttttccggggcccccgtgtgggaaaagccgttaaagttgcccaggggggcggtctgtgtgggccccgggccacgtggtttaaagcggggtggaaaatcggtgttagtaaagggttggcccgggggggcccgggtggctgtattggagtgaagggttcccaagtgcgccgcaatgtgtcccggggggaggcccgtggttcttgcccccaaagccggcggtgggaaaaaggccgtgtcccctttgtttccaagtgtgttgttccaacggggggccttggctgtagaaagtttttgttcaaagacggcaatgtgtagaaacgggtgttggaaaggggggttccccagacatggggccaagtcactcggcccaccttgtaccctgaagaccccgctccccgggggctggacggggcaggagtttgcagcgctgatggttcccgtgggggagggcagagggctgatgaggtgggccatggtgtctggaatgttgactggtcaggggcgagatgtgtggctgtacggccttcactggagactcagacgcctcctgcttctctctcttctcggctgggacaggggcagtgaacgttatcttgatgtttgtgctcgggaacctgaatgtgcacacgcgcggcagctgcagcggcggcgccccgcgcctctggaacacgccgtccacgaataccccgttcttgcccaagcagcgcaggtagaagtcgccgccggcgtcgggcctgggctgcgcgggcggcagctccggagcggccccgccatggccgccgccgcccgggggcgtgaagatctcgaggtggcgccgggagatgaagctcgagtggcccatgctcacgtccaccgagccctgcgacgagttgcggccgatggtcaccgagcgcttcttcatcagatactcgaactcgcggccctccaggcgcgccctcgtgccgaattcgccacccaggcctcgctcttt

SEQ ID NO: 323658 - DNA, 463 bp, Homo Sapiens
  misc_feature (329)..(329): n is a, c, g, or t
  misc_feature (428)..(428): n is a, c, g, or t
taacatttctgtatttgttatccctgtaattaaagccagttgctgaagcacagtaggatgcgtgcactgtgatagactaataggaacaactttttctcttccacagcgctgcaaactcctgcccctccagcccccggggagcggggtcttcagggtacaaggtgggccgagtgatgccatctgacctcaatttaatggctgacaactcacagcctgaaaatgaaaaggaagcttcaggtggagacagcccgaaggtaaaggctttgtagccttgaaggcagcccctgggggaccagtgtgtaggccacagggccctcagtgtcacctgncctgtcacttcgcctgcctgtccagtgacagccctgccagggcatcggtggggatgtgggcttgattctggtgttgctgctgtgttcttggtattgggngcttttgcaagtgtactcgtttagtcattcaacgc

SEQ ID NO: 323659 - DNA, 1030 bp, Homo Sapiens
aggggggcttggttgcaagcccctgaaccaggggggccagaagttccaaagggggatgaaaggatgccgggtagttccccaaagtgcccctagggagtcccccagaagctgggggggtgtggcctttcttgggacaaggaggaagccagggaggatccaacccccagccatggagggggagtgggcagtctcccccaatttggcccctctaggtcagttccacgttgttggcacggtcaagcactcgggagccacgggcactacccccaaagctggaaacggctctcatagagagtggggcagaggtgccagcgattggcccggtagatgcccaggtaggtgtagacatcaggcttgtaggtgagcaggcacttaatgcccgctgcacggatggctgaatccgcctccagtacacccaagcggtccgtgaagtcgtccgtgtaaccacagatgacctggcgcccaccctccttggcacgtgggctcaccttggccacctgaagccggccttcaaccacggcccgggcaatgccagcccaggcgtggtccagcttgaagcccggtgccagatgcataagccacttgcccgagagcacgtggtgggtgatggcgagctggcgcagggtacccggtgtgatgggccgcccactggtctgcagagcttcccaggctgcctgcaggccctgcacgtccccggagttggggctgtagccctgcccatacactgcaatccagcccacaggctctgagttgggtgaaccggggtccccatagcgggtaacttgggatggtgggtacttggccagccaggcatccagctcagtggcaggcgttgtgcgggcatcaaacactagccaggggtccatgtcagctgccatggcctctgcagccaggtgctcggcggtgaagccatcctcacggccacctggagagccctcctcttccagctcctcacctggttccatcctccggccttcgctgcgttcgacgccggcccagccccgggcccggctccgctcctgccgtggct

SEQ ID NO: 323660 - DNA, 1001 bp, Homo Sapiens
tgttacatatgtcgaccacgcgctccgagtttgagatgggaaggaaacaaatgtgagcgctactggcctttgtatggagaagaccccataacgtttgcaccatttaaaatttcttgtgaggatgaacaagcaagaacagactacttcatcaggacactcttacttgaatttcaaagatgaatctcgtaggctgtatcagtttcattatgtgaactggccagaccactgcatgttccgttcatcatttgattctattctggacatgataagcttaactgaggaacatatcaagaacatgaacgatgttcctatttgtattcattgcagtgcaggctgtggaagaacaggtgccatttgtgccatagattatacgtggaatttactaaaagctgggaaaataccagaggaatttaatgtatttaatttaatacaagaaatgagaacacaaaggcattctgcagtacaaacaaaggagcaatatgaacttgttcatagagctattgcccaactgtttgaaaaacagctacaactatatgaaattcatggagctcagaaaattgctgatgggagtgaatgaaattaacactgaaaacatggtcagctccatagagcctgataaacaagattctcctcctccaaaacccccaagggacccgcaagttgccttggtgaaaggggatggctaaaagaagaaatactgcaggcaccggaacctccttcaggggccaccccttttggacaccttctcccccccttcgcttttcaacaggcaactactgggggggcagggccaatgatagataccctcccaaagcccgggggggcatatgggtttcatccgaaacaactttcagcaaaacccccaccgaaaactttagtgaaattcccccgaactttccggggaaaaatgggatcccccccttgggcccgataagatcaacaatttgggacccaaattttagcttttggggataaaagaagggcccccccctcccggaggg

SEQ ID NO: 323661 - DNA, 1089 bp, Homo Sapiens
ggaaagcagatagctcttgggataccgcttataggtttgcaccaaagcaaaccaaaacggagggttagtgaggtgtcttggcactatttagataaagtccaggatgcaaacccgtggactgggtgtccttccatcttcaccaaaacccccaacccaggtaaagctgatcattccaaaggcaggtgggatggccccatgcgtttcatcccccgatctgcacaggggaagtgggaccccaaaagggggagatgtgcgagtatcatagatgtagagatcattgccagatggtgtctctagctctggtcagagtttctccaccaaacagcacagcaaagggcccgaccacagaacatgagtgatgccgtagtccatggggccccttctgggacccctgcccactgctcacaagccttgcaagctgttccatcaaatgaggagcaacaggtggttcctccttggggagaaagaaaggacttaattttcccatgactccaatgcccagctacttctggttcagctaagttgcaacctccaaagagcaatagctgatgacctggatggggtccaggagtttggagcagggccgcacagtgacctgagcgtgaggctgtgtggcagccttcttgcttgtagcaataggtgcgggcgctggggtccagccttaatgtgtagatgcttccatagcgtcgctgagtgtggataccgccctcccggccagccacctgcagctctcggtcagagattcgggtgcaggtgtgactactgaggccggcgggggggcagtcaccaggggtccctgtccacgcctcccacacaccgcgctctgtgtccagtgcggtcactgtggccaagcggcgagacccgtcccagccgcccaccacgcagagccaacgcccgtccacgggtgccgcgtcgtggtgactgcgcggggggctgccccgggctcccaatcgtacggcctggcccctagctgggtcgaaaaccaccgtatcgctgctgggctctctcgctcctcctgctaggagaccacctcaagtcccggctttctctccgcctcgtgccgaattcgccacccaggcctcgctactt

SEQ ID NO: 323662 - DNA, 1170 bp, Homo Sapiens
  misc_feature (184)..(196): n is a, c, g, or t
  misc_feature (198)..(213): n is a, c, g, or t
  misc_feature (215)..(217): n is a, c, g, or t
  misc_feature (219)..(225): n is a, c, g, or t
  misc_feature (228)..(230): n is a, c, g, or t
  misc_feature (232)..(249): n is a, c, g, or t
  misc_feature (251)..(258): n is a, c, g, or t
  misc_feature (260)..(260): n is a, c, g, or t
  misc_feature (262)..(282): n is a, c, g, or t
  misc_feature (284)..(541): n is a, c, g, or t
  misc_feature (550)..(550): n is a, c, g, or t
  misc_feature (553)..(758): n is a, c, g, or t
  misc_feature (798)..(807): n is a, c, g, or t
  misc_feature (822)..(822): n is a, c, g, or t
  misc_feature (826)..(826): n is a, c, g, or t
  misc_feature (851)..(852): n is a, c, g, or t
  misc_feature (873)..(921): n is a, c, g, or t
  misc_feature (953)..(961): n is a, c, g, or t
  misc_feature (1046)..(1079): n is a, c, g, or t
  misc_feature (1085)..(1085): n is a, c, g, or t
  misc_feature (1094)..(1094): n is a, c, g, or t
gagcgaggcctgggtggcgaattcggcacgaggacggctgctatcctggaaacagcaagtgctgaagctcctccggacattcccgcgcaaagccgcactagagatgcagaactaccggcagcagaaaggctgggcattcggctccaactcgctccccatagcttgctctgtggggatgggagtnnnnnnnnnnnnncnnnnnnnnnnnnnnnngnnncnnnnnnnccnnncnnnnnnnnnnnnnnnnnncnnnnnnnncncnnnnnnnnnnnnnnnnnnnnncnnnnnnnnnnnnnnnnnnnnnnnnnnnnnnnnnnnnnnnnnnnnnnnnnnnnnnnnnnnnnnnnnnnnnnnnnnnnnnnnnnnnnnnnnnnnnnnnnnnnnnnnnnnnnnnnnnnnnnnnnnnnnnnnnnnnnnnnnnnnnnnnnnnnnnnnnnnnnnnnnnnnnnnnnnnnnnnnnnnnnnnnnnnnnnnnnnnnnnnnnnnnnnnnnnnnnnnnnnnnnnnnnnnnnnnnnnnnnnnnnnnnnnnnnnnnnnnnnnccagcagcngcnnnnnnnnnnnnnnnnnnnnnnnnnnnnnnnnnnnnnnnnnnnnnnnnnnnnnnnnnnnnnnnnnnnnnnnnnnnnnnnnnnnnnnnnnnnnnnnnnnnnnnnnnnnnnnnnnnnnnnnnnnnnnnnnnnnnnnnnnnnnnnnnnnnnnnnnnnnnnnnnnnnnnnnnnnnnnnnnnnnnnnnnnnnnnnnnnnnnnnnnnnnnnnggcacaaaaatacgtcgccccagtcgccggctcgggacannnnnnnnnngggacccgccccagnggangggagcacccccaccacacctctcnnaatattcgccgcggcacgagnnnnnnnnnnnnnnnnnnnnnnnnnnnnnnnnnnnnnnnnnnnnnnnnngacctgcacacccactccacgcaatgcgacgnnnnnnnnngatccgaccagccggcgattactacccaccccaccccggccatggtcgccgcgcctcacactccttatccccgccttcccgggannnnnnnnnnnnnnnnnnnnnnnnnnnnnnnnnntaagcntcgagcatntctttcaaccaccccggccccgcccgatgccgcccgccacataaattaccctgaccaccgtattccgccccgccct

SEQ ID NO: 323663 - DNA, 1132 bp, Homo Sapiens
  misc_feature (25)..(25): n is a, c, g, or t
  misc_feature (69)..(69): n is a, c, g, or t
  misc_feature (1063)..(1086): n is a, c, g, or t
aaaaaaaccccgtccaatccttcangaaatggtaatactcggcagcccttgaatcttgcggcaaaagcncctgcgggatgctgtcgtaagaaaggggaactggcccatacagcatggtgaaagagcaccacgcccagggcccacatgtcactgggcttgccacggtacggccggccgctgagcacgtcgggactgatgtaggcagggctccctctctggtccttcagcaggtccccctcgctcaccagatgcttcccgaggcagaagttggtgatggttatccgatgtgtcctcttgttgagcaccatgttccccagcttcaggtctctgtgcccgatatttttctggttgcagggcctccacccacgcggaccacgtcgtagaagattaccacagtctccctctcgctgagcctcttctccttgatgacgtagtgctgcaggttgatgaggtcagcggtcttatcgctgaagtcatgagcacagaggcagtccaggacgaggcagatgcgcttcttcatcttcttaaccatccggctggattctgtgtcctcaacgatttcacaggtgcggtcctggaagaggccgtggtggtgcaccacgccatcctgcgtgtgcaggagagacagcagtgagtactcggtgtgcagcagcatcttgccctgccgctcttcctggctctctatgccttggtcccccctctcctccagggtcaggatcttcagctgatagaagtcatccgtgccatctttcctcgccaaacactgcactatgcttggcaccggtgagttgcccagacggggaccaaggatgaatggtccagctctctttgcattatttccagaaatcccacttcctagagccttggccctggccgacgtttccccagctcctctgtctgatgctctccgcttcattctcagctcttcgccgggtggtcagagctattcgcccatagtccgtagcccagagccggggctgctcggctctccctcccggggggccggggccgggctggaggcgtgcgagcctctcaccgccgcctcccagcgcagccacccgannnnnnnnnnnnnnnnnnnnnnnntccctccatggctgcggcgccgccctcgtgccgagatcgccaccca

SEQ ID NO: 323664 - DNA, 1246 bp, Homo Sapiens
  misc_feature (30)..(30): n is a, c, g, or t
  misc_feature (119)..(120): n is a, c, g, or t
  misc_feature (138)..(138): n is a, c, g, or t
  misc_feature (254)..(254): n is a, c, g, or t
  misc_feature (560)..(569): n is a, c, g, or t
tgcgccagggataccgcagacggcagattntatgagtggggagagcattctgtctgcatgttatctatcagcaaaaggacggtgcacgctgcaggttggtgtggagggaccctccgccnngcgcaggcatcgagcgtnagaggggggtctcttgtaccggtcgccagcgcaacagtgtgctctctcacccgggcgcgcaccgtcacagagcagctcatgtgagccaccaacgttcgtatggggcttcttcgcgngaagcgcggcgggcagtggtataatcccgcgggggtgcgggacgaggtgctaaggagggtaaaaggggggcacgcatacatggaggtaggggggccccgacaggtttttaactttccgcctcaagcaggtctgtgggggaagagatgtttaacgaggggggagatattggaggcggggatttacctgcgttgtgagaggtagggcccataggggtttatgcggggagctgtgggtggtgcgaaatccccccccatgccccgcaggggggggtacccccatctgtgcacccactaggtggcccattnnnnnnnnnnaaaaagggggctttcgttcatcggggctagggcaacggtcctcgcaaggggggctcgggagggccaggccggggtaatggaaggctttgggcctcttcccccagtggggactcgggtgtggaggcccgggcccaagttcgcgttcgggccaagattggctgtgccccagggttccccggccccgctggggaaaaactcgagggcacgcagcccaggggctgggaggcaaggggatttgcttcccctggaggggggcgtcgtctgggaaggccgcaggtcctcgctggtcccggagagtatggtggtcaggccaggggtgggtccggggccagattggcagctgtgtggggctggggaggagccctgctgcatccctccagcccctccacgttcccacactggcggtgtggctgcctgctcagggcctggctcctccgacatggaggaggagggggctgcagctagcacagccggggacaacacctccttgtcggtctcactggagctgggctctgcagtggccagcatgtccgggatgggccctgagggtttctcctcctggtggaaggaagaggcggagagaacccttctgggctctgggtcaacccagtcggcccccatcctaaggaatcaccagcaggagaggataggggaatacgtaagggtggactaagctc

SEQ ID NO: 323665 - DNA, 1036 bp, Homo Sapiens
tttctttatttgcactgggaaataacatctttggtctactatttctagcatctgagatccaggtcagttgtgattaatttttctctgtattatgcaatgtattttcctgcttttcatgcctctctactggatgctagacattgtacattttaccttcttgggcactgaatatttttgtagtcccagaggtacttttgagctttgtcctaggatgcagtgtgatcctttcaggtcctgctgtatagctgtgtcaggtggcagtgcccatctagggtttctcacttgtgttttctacccagtgcccccataaatcatgaggttttccagctagggtggtgggaacaggcccctaccctaggtcgtgtgtccagcaccactgttccttttaatcttctcacatggctctttctttggccgtgaggtgggttccttccacacatgcgctgatcagtagggctgtgctgcctagttgagggagctccctctggcccccgacttagatctgtgtgtctctctccagtactgtgaccgcgagttccggccaccttagtctccctggatccctggcattgttttcctactgcagggaggctggcaggctccacctgggttccccccgcatgcacactgcagctgggaccctcctcggagcatgagctggacaatcacagggctcccctcctgagtttgccctctcaagaatcactatccttcactccctggtatttggtggcttgcaaaccgttgtttcacatattttgtccattgtttgcttgtttcatgcaggagggaaaagtccagtacctgtttctccatcttagccatatgagactcttaaattattatttttttcctttcctagcaccagaaagtttgatgcaggcattggaagacttagattatctggcagcactggataatgatggaaatctttctgaatttggaatcatcatgtcagagtttcctcttgatccacaactctcgaagtctatcttagcgtcctgtgaatttgactgtgtagatgaagtgcgtacaa

SEQ ID NO: 323666 - DNA, 421 bp, Homo Sapiens
  misc_feature (368)..(368): n is a, c, g, or t
  misc_feature (383)..(383): n is a, c, g, or t
atttcttgagagggcaaactcaggaggggagccctgtgattgtccagctcatgctccgaggagggtcccagctgcagtgtgcatgcggggggaaccagggtggagcctgccagcctccctgcagtaggaaaacaatgccagggatccagggagactaaggtggccggaacttcgcggtcacagtactgggagagagacacacagatctaagttcgggggccagaggggagctccctcaactagggcagcacagccctacttgatcaagcgcatttgttttaagggaacccacctttagggccaggaggaaagagccattttgaggaaggtttaggaagggaacatttggttgctttaacacagggacnttaggggttaggggncttttttttcccacccacccttagctttgggaaacctc

SEQ ID NO: 323667 - DNA, 455 bp, Homo Sapiens
  misc_feature (84)..(84): n is a, c, g, or t
  misc_feature (332)..(332): n is a, c, g, or t
  misc_feature (425)..(425): n is a, c, g, or t
gttttcagcttgctatctttatttctttatttgcactgggaaataacatctttgtctactatttctagcatctgagatccaggncagttgtgattaatttttctctgtattatgcaatgtattttcctgcttttcatgcctctctactggatgctagacattgtacattttaccttcttgggcactgaatatttttgtagtcccagagggtacttttgagctttgtcctagggatgcagtgtgatcctttcagggtcctgctgtatagcctgtgtcagggtgggcaggtgcccatctagggggtttctcacttgtggttttctaccccaggngccccataaatcatgagggttttccaggctaggggtgggttggggacagggcccttaccctaggggccctgtgtcaggcaccacttgttcccntctaatcttctcacaagggctctttctctg

SEQ ID NO: 323668 - DNA, 1198 bp, Homo Sapiens
ttggaaggagcggctctactcggtgctgtgctgcaccgtcgtcctcggacctgcccaaggcctccgtgtaccagtgtactaatggtcacttgatgtgcgctggctgttttatccacctactagcagatgcccggctgaaggaggagcaggccacgtgccccaattgtcgttgtgagatcagtaagagcctctgctgccggaacctggccgtggagaaagccgtgagcgagctgccttcagagtgtggcttctgcctgcgccagtttccccgctccctcctggagaggcaccagaaagaggaatgccacggacaagggtaacccaagtgcaagtacaaacgcatcggcttgcccatggcccggccccttccatgagctgacggtgcacgaggctgcgtgcgcccacccgaccaagacaggcagtgagctgatggagatcctggatgggatggaccagagccaccgcaaggagatgcagctgtacaacagcatcttcagcctgctcagcttcgagaagattggctacacagaggtccagttccggccgtaccgcacagacgacttcatcacgcgcctgtactatgagacgcccaggttcacagtgctgaaccagacgtgggtcctgaaagctcgagtcaacgactcggagcgtaaccccaacctgtcctgcaagcgtacgctctccttccagctcctcctcaaggagcaaggccacggcaccgctggagtgctccttcctgctgctccagggcccctacgaacgacgtgaggatcacccccgtcatctaccactttggcttcaccaacgagaaccacgcagacggactacggtgcccctgccccctctttgactcccagggagggccaccaagctgcctggctgacagaaaaaatccaaccctgcgggctcgttacccggtccaagatataacaaggaagggcgggggcccccatgaatgtcccaaggagcccccggggccggcgtcccccccaaccgcttgccatgggacaaccgggcgggggccatggtttctccaccattaacccggatacctttcaaccaaaagcccggggagccccatcaaaactccgacgctcgcgttggctctggaacgggcagcaacccaaaggggaccacctttgccacctctttaccgcaatcgtaagccccacctattgccctttgtgtgccggagcga

SEQ ID NO: 323669 - DNA, 806 bp, Homo Sapiens
ctgaaattgttataatggaatataccatcatggccagcaaagaaaccccattttactataaggctgtatttttgggggacatgcccaaataaaaaaaattgttcataaagtaataatattactggtattaaaataaaaaagctaaatgaaatattttccttcccacatttaatgtgttagggttgagtttagtccccctcctcccgcaagaaatcagtctgagacttaagtgttgaatcaaacctatatttgtagtttctaaaatgctgatccacagaccactttcttgttacacgtgtaccaatgaaaacaaaaggcaaacagaatcactgccatccctatgaaaggaatggttccttttctaacattctttaaaaatatacattttacactccttgcacctcaacaaaggcagcaatgtaataaatacacggtttattttgtcctcctcacaccaggcgcctgtccacaaactacctgttgtaagccctctcttttttggatttctccagggctttgtccatggtcttctcgttctccccccggcacttgggacagtaccacttgcccttgggtttatgattgagccccacgcacgagaagtggaaccactcgatggggcactcgtcgttgtcgcagccggatcatctcccccataaggagacctggtttgcacagacagtacgtgggttcgttggggtcgatggggaggtcggcaggggacgcctctcgctccgccttggccttggagcgcttcttcttcttggaggtcttggccttccctcgtgccgaattcgccacccagc

SEQ ID NO: 323670 - DNA, 1085 bp, Homo Sapiens
  misc_feature (357)..(366): n is a, c, g, or t
  misc_feature (944)..(952): n is a, c, g, or t
tggaataaggcgtctgttctagagaggcctatgtttctccaagctttattctggaagtgttccacgttcttggtggaagaaccccatttttataaaaccccaggtcggccaatattactgtgtccttaccaagaagaaggtggggtggaaagccaatttgaagtcctttttaccttagggggactccggattcaaggacaagctaaaagaatgtccccgaaaggaaagataaaaataaaatgttaccaaaaatcccaatccattatgtaccctttatggagaaaagtacctttataatgttttacaaagaatcgtggtctcaagtttccactttgttttagtaataaagaactttcnnnnnnnnnnccactctaaacaacaccctcctgtatagaaagctctattttaataattaatgcaatgatacccttgttggaacaatccagccgctttgaaactctggtatttacttactagatgaacaagtttctctatggaggtgcctttaacttctcaagaaatgtgtaagttaagacggctccaaattacattttaagagagccttgtatttttagaggttctttttcatcggtcagaaaaacttacgttgacgattctgcaagaaaggttgctcgcaaaccatgcatcgcaaagctaccgaggcaaatttaaagaaccaatgaaaaagagtggaggctcgtctgaatctttaattggctatgggaatttcaatttattgcataaataatcttttagacctcaagatacacgtgacctagggacagtttacatcaatgggcaagacttaaaaatagacaccaagttcagcaagtatttgagcacctactaaaaattacacaactcccacaacaacgcattttgcgtttctaaagttgtaagcagcatgttcggacgcttgatgcaatttcccaagttgtttgggnnnnnnnnnaaaaaagtcttctcagtaaaaggtggggggaaggagggtattttgggggcaacaaaccaaactggtctgtcgcatgttaagtcaatttcacgttcacctactggtcaccacgaagccgaggaaagttttaaaa

SEQ ID NO: 323671 - DNA, 1169 bp, Homo Sapiens
  misc_feature (958)..(1007): n is a, c, g, or t
  misc_feature (1048)..(1119): n is a, c, g, or t
aaagttgcaagtttctatttttaatttttttgctttgataaatcaattgcttcacaaaaatcctttttaaagacaacaatccaagaaaacatattgttacagtattcacatttcaaagattgtcagtttcaaagaccgaatataactagaacgaaagattgctgagttctttctgtctctaagtgccaaggaatgggccttcacaaggggcagaaccccctctggacaccctgggagtttgtctcaatgaaaaagtgcccactgctacctcacacaggcaggagatgggatcactctcaggtcacacagacacaactcccagagccgttagccgtgagggtttcttttgcatgctcgataaacacttccactcatcttactatctgggaatcaaagcgcaaaggccaagctagtccctcggcaggagcgagctggaacccagcacagccagccctgccacctcctgctccacaggtgcagggcaggaataacagcaacatgctcaatttgggtctcaagacacattcaaaaggagccttcatagggaaaaactcaacaagaataaaactggaaccgaatctgatcatttaaaacgaaatcttagagggggtcacacttttacagattctctccactgtccaagggctggagaacaggtgttttaaggtgccaactgacctcaaacatgctgggcagtgattttgcaaactgaaacagcttgccatgtagaagctagttaaaagcacccattggagagaggttaaaggaaactcaggctatgtccataagcaccctttctctaagtgatctttatcctattcctctgaatttagtaagaatttaggaaagttgaagaaagttttcagctggagagaatgcacactgtaccattcagcatgggtgtttaactctcaggccagagcttcccagtgccaccaaggttcaggcagtgctctcnnnnnnnnnnnnnnnnnnnnnnnnnnnnnnnnnnnnnnnnnnnnnnnnnntattcacaggtgcaagcatagtgcactgcagcctcaaactnnnnnnnnnnnnnnnnnnnnnnnnnnnnnnnnnnnnnnnnnnnnnnnnnnnnnnnnnnnnnnnnnnnnnnnnaggggcagcactcttaaattcaatccactgcttagtgaatgtgatttcta

SEQ ID NO: 323672 - DNA, 905 bp, Homo Sapiens
gagcgaggcctgggtggcgaattcggcacgaggcaggactcgaatgcagaccctggctcaggggagagggtggggcgtctctggtaggacggcctcaccccacttgtcagaactactctggaggggggcaaaggtgtcaggaacagtttgagcagttctggctcagggtcactcatgaggttgctgttgtctgaaatcttagctaaggattggaggatgcacttctaagtgaggcctggctgtaggcaggaggcctcagtccttccccaggtgggccaacccacagggctgcttgagtgtcttcacaatatggcgctcggcttccccccagagcaagagattcaagggcccagggtaaaagccaacgtgttatttttatccctagcctcagaattcacacgccgttgcctccaccatgctctggtttgatacagcccagctctgattggaaggggctggggctgcccgtgctgactcttcaaaggcatcccatcctgcagatggtgttcacagggagagtttgtgggggccggcactccctcatctactggggctcattctggaagaaggtccagaagaattggagacccctgcccctcacccaaactttggaggtggcagggtgaacagcaggccaagttcaggtcccaagacaggccaaggccagtgcggtttcccttccactgcctcagtttacctgtatttcagaagacagtctaggaagagttgagcagagttccctctaaaagagtagggagctgataacaggccccagcccctcctctttctctatggcaaaaatcatttcccgttatccctgaaatggggggtgaattggaatggatggctgtaactggagggggccttctgggcctggcccagaggccccccacccatccgtaaaa

SEQ ID NO: 323673 - DNA, 1039 bp, Homo Sapiens
  misc_feature (242)..(296): n is a, c, g, or t
  misc_feature (338)..(387): n is a, c, g, or t
tcgggcaggtcggtgaaagcggtgcggaccccggcgggcgagtccgggggcactcgcacgcccgcgcccgggtgcccagccccggcgcccctgcagaacgagccattggtggcggtcccgatgccgttgtacgccgagcgccctcctcgctgctcagaaccagggcgtcctcgctcaagttcaccagaactttgtgccagcgatcccgcaccaaaacttccagcagcccgctccgctgcgcnnnnnnnnnnnnnnnnnnnnnnnnnnnnnnnnnnnnnnnnnnnnnnnnnnnnnnnatctttccggcattcttaaaatgccatgtgattggaaaaggnnnnnnnnnnnnnnnnnnnnnnnnnnnnnnnnnnnnnnnnnnnnnnnnnngcgaggagagtgcgtcccgcggggaggtggcggcacgcgggactccgctccgggagttcgcagacgcactcggcgggagttggcagctgcactcaggctggttccccctcgcctgatcctgaccggggtggagcaacctaaaagaagaaggagagaccgagacaggggaggggaaaaaagccagcagccagttgcaaaaccccaaagcaaggggagccgcggagcagctcagcgctggagagagtccgtgggaggaggcacgctggcggtgaagggcggggacccacaacccagcggccgctcacctgttccagccgccgcagcctcggcggtcacacgccacccgcccgcccagacctcccctcctctgtccccagagcgcacgacgccgcggggacagcttcccgagcgccttccccgtcccgcttctctccagcccaccgcagccccctttcttcccagctccccccactccgtggggcggccacactgcaccctttcgccggggtgcgtggggtcccgccctcggtggccctcactccggccctcccttagccggactttcccctttcatacccccggccccgcgataaatttggcccccctggggcgccttaaacaaacccccttttcggtaactgcgactccacgt

SEQ ID NO: 323674 - DNA, 964 bp, Homo Sapiens
tgggagcacgctgctgggtcactctatggccgctgctacctccgccacttcaacgagctggagcacgagctgcagtcccgcctcaaccgtggctacaagcccgcctccaagtacatgaattgcttcttgtcacctcttttgacactgctggccaagaatggagccttcttcgctggctccatcctgggctgtgcttattgccctcaccatttatgacgaagatgtgttgggctgtgggaacatgtgctggaccaccgtcacactcctgggggtcaccgtgaccgtgtgcaggtcctttatcccggaccagcacatggtgttctgccctgagcagctgctccgcgtgatcctcgctcacatccactacatgcctgaccactggcagggtaatgccctctttacgtctatccagtccttacaatctgagtctgagcccctgagccttatcgcaaatgtggtagctggctcatcctgccggggccctccactgcccagagacctgcagggctccaggcacagggctgaagtcgcctctgccctgcgctccttctccccgctgcaacccgggcaggcgcccacaggccgggctcacagcaccatgacaggctctggaggtggcatgccaggacaggccagctccgaggagcagcgtgtgcgaaggacagctgcagcagcctggtgctgtcagaatatgcatccacaagaccatgagcctgcatgccctctaatatgcacaagctccaccaagccacgcaggcaccaagctacaacctcgaaacggcatgctatcgcgcacccgcagcggacgacgtgccataaacacgttggcagaacacgcgccccctagaaacgaaacgcgcaacacaacagaagaggcaccgacggaccaacgaccagacccacaaaccccacacgccataccagtctaaccccactccacatggcacaaagcacacacacgacc

SEQ ID NO: 323675 - DNA, 1117 bp, Homo Sapiens
  misc_feature (90)..(117): n is a, c, g, or t
  misc_feature (148)..(148): n is a, c, g, or t
catagtagtgggggggctcagccggaacgtgggggtacggagaggggggtaacaaggggagtaaggcgcggtaataagggaggacgcaannnnnnnnnnnnnnnnnnnnnnnnnnnnaaagtatgaggtggcggcggaaacagggatnacaagcgtaacaggaaagagaggagcggggtaatagagcgggaaaaggcagagggtgaagcgacgcgattgcggggggagagtcggggcgataggagcgcgggatagggaggcgggagaagaggggtgaatgggaacagcgagtgggtggggaacccagcggttgcgaggcgctttggctgacggcgccgcgaaagtaggcccggggggtaatggcatgctggatggattgggcagggcctttgattatggggggattcagatttgacgtcgcggtgcggttagtacagtaccgtcagccaccgccacccagatggcgtcagctcggatggccccataccacaccctagcgacccacgggtgagtttgctgagtatgtgagattaactggtggctcagtggtcggctcctctagtggataattccattgaaagcccaatgctcttgatgccaaggagttggatactggccatagatgcccaccagcacctgcccctcttggctggggtaggcagaggagatctggccatcaagcttcccaaaatagaaatagcggtccttgctggtgtacatgaccataccccggaggaaagcttggaaggcgacaaagacttttgtgatgtattcgcctggctgcagggtgacttcctgggtattcccacctaaggctcccagtttcacgtcccaggagtctccaagtttcacctggacacttttcaccaggagaagacctacagacacccgcagccctgtgatttcatggtcgtagtcttcagtggtgctgaaatacttgcctcctccagggccatacatcttccctgcccaggtggggccccccaggagggcaagcgtgagcagcagcagcatggcctctggccggtgcatcccagcctcgtgccgaattcgccacgccaggcctcgatgggtttgtggatggaccgggcggggtgggcggggcgcggttccgtgc

SEQ ID NO: 323676 - DNA, 993 bp, Homo Sapiens
  misc_feature (71)..(71): n is a, c, g, or t
gtaccagagagcgttttcgcggccctctctgtaggcatcgggccgtgaacaccctttcttctcgcaactcntcaccccccctggtccgccatccagtgtccgagtcggccgttcaccggacggcccccactcgtcagggattgggcggcgagccttggccgttcaggtcggcgtgggatgatcccatgccgggccaagtcgtcttttaaatctgtgcaagaaagagttttttccaggcggcccctgctccaggcccgtccccttacccggttgttccagggcctccccatgccagctggggcgggcaatttgctgatccccagcccgcagttgttccatgtcattcacccccacacccagcatgttggctgcctggccttggtccttctggcctgaagagagctcgcgggcccgggcctttataaggctgcagtacaccagggccaggcgacaggtgtcctccacaaacttgacggtaatcatgaaggcctcctctgggtctggccagtccagctgccgggcagtgtggctgatctgggcaaagcaggtggatagatccaccgctgatgtgctgtgcttggtcagttcacccaggggcaccagctcatccatctgcacagcgcgctgcacccgcgccagggcctcgttgtacgtcttctgcagccaggaggggatggccggctggaaccagcggtggaaattatccagggccaggactccatccctctctgaggagctcatgcgcagctggcagagctccttgaggctgatgtagagctggaacagactctcgcccatctctggggacactacatcacccacaaccgtcgtgtggtcctgcacccgcttggccaccagccactgcagctcccggaaagccatggagaagaggtggatcttgagggtattgtggaagatcttgtcccatgtgcgctggcactggtgcaggtcgccaatcctcgtgccgaattcgccacccaggcctcgctcttt

SEQ ID NO: 323677 - DNA, 1320 bp, Homo Sapiens
  misc_feature (382)..(382): n is a, c, g, or t
ccttccccttttcccctttccccttttggaaacgtgtcaggaaccaaatagtttaagatgagcagttgaggggactgagagagtgatcgacacagaacctggcttcttcgtgcttcatcataagtcgtgctgccggccaggttacttaagcacccttttaacaaggaaaccttgtgggagatccagctggccgactcgagttcagaaacgggaccacagaggttacactctgggatcctggccatgaggttggatgcctcaccttactgaaaggagacactggacctaaatgggcgcagatggattttgttcctgcttggctaaatttctcaacaccacagtcagctaagtcacctactggccaccttcggaaaaacacggnggaggcacctacccagagggagaaggtagatttggagtaagccgccgtcgacataattcctctgatggtttttttaacaatggtcccctacgaactgcaggagattcttggcaccagccctccctgttccgccatgattctgtggactctggtgtctctaagggagcatatgctggaatcacagggaacccatctggttggcatagctcttcccgaggtcatgatggcatgagccaacgtagtggaggtggcacagggaaccatcgccattggaatggcagcttccactcccggaaagggtgtgcttttcaggaaaagccacctatggagattagggaagaaaagaaagaagacaaggtggaaaagttgcagtttgaagaggaggactttccttccttgaatccagaagctggcaaacagcatcagccatgcagacctattgggaccacttctggagtatggggaaaacccgcctagtgccaagcaaccctcccagatgctagttatcaaaaaagtttcccaaagagggatcctgcttgcttgccttctctgcttgcaattccccctccaccagggatctcccccttggcaaaatggggaaccaattttgtccattccggggggtttccaagtggtctaataaagaaacccgggtttccctaaagccctggtaccccaccttccctttcccaaagccctaaattggctttggaaaagagcttaacagggaattgggaacccccaaggtccggggaatccccttttccctctctaaacccggggaagagtttgccttttttaccacaatcccaaatctttcctggttaacccaaaaacccaggtgggtaactgtggcctataagtggggggcaccatttctggagattttctccccccaaggagaagagtccccttcccaagggaaacaacaccccctt

SEQ ID NO: 323678 - DNA, 941 bp, Homo Sapiens
gaatttttattttaaaacaaagaatcaaacaagcaataatggaaaatccatatggaaatattcacaatcttctcagtgagaaataggaaaacaacttccctgccttactgccaaactgaggagccagaagttgacgtgaagttggaaggccacctttccagctaaaccccactccatagctacgtgcatttttattcaaaggctccaggagcagagggaacagtgagaactaagacccaaaatactgtcactggcaagggtttggctaaagggtctgagatgtgtaagcaccaagaagggaaagggagactgagcaacatatgaaaaaggggctgtaggaacaaacacagagaaaataagtcaacaataacgtacttccacccagagcaaagtgacagtgcacatacattcatcctctcaagtgtgggctacactgcacattgactcatactgtctaaacctggtttattggaaagattcaagtcccctgagggcattcggcataggaccacagtgacatggtaacagacatacgcaagcgtgccgtgagcctaaagcaacaacacactttagataataatcgctcagaaaaaaatcctctcccagagctgaggttacaaattccaagtttgctataaacattctttggggaattcctttaaaggtatgagttaaaatacaacagaaaatcaacacctaaaatctcctaaagaacaaagtggaaaaataatgaatctctaccaagaaccaattattttaggtttcttatttggatggctctcccacgagataggtggcgggattacttcaaaagtaatgagactactacaagaaggagttatttcatccagtgaggggaacaggctttctagaaatcactttctcttccctggactccatccaaaattagaacccatccctcgtgccgaattcgccaccca

SEQ ID NO: 323679 - DNA, 778 bp, Homo Sapiens
ttttattgtttttggcatgtggatatccaattatcccactacgatttgttgaaagattctccttttgaggatttttttctgaacgattattatctaaagtgtgttgttgctttagggtcacagtatgcttgtgtgcatctgttaccatgtcactgtggtccttcgctgagtgcccttaggggactagaatctttccaataaaccacgtttgagatcgtatgagtcagcgtgcagtgtagcccacacttgagagtgtggatttatgtgcacagtcactttgctctgggtggaagtaggttatagttgacttactttctcggtgcttgttcctacagcccctcttttcatgtgttgctcaatctccctatcccttcttggtgcttgcacatctcagaccctttagccagaccctttagccaaacccttgccaataacagtatttttgttctcagttctgttccctctggttgtggagactttgaataaaaatgcacacacctattcagtgggatttagctggaaaaggtgaccttccaacctcacgtcaacttctggcctcctcaaacagtaggttggcagtaaggcaggaaagttgttttcccatttctcactgagcagattgtgaatatttccccatatggattttcctgttgttaatgttgctccgattctttgttttaaaataaaaattctgaatgtgaaaaaaagagactctcctttcttccattgaattgtttggacacctatgttgaaaatcattggctataattgtaagagt

SEQ ID NO: 323680 - DNA, 1154 bp, Homo Sapiens
ggttaaataactttaattacaccactgtaagtagattctgcctctgaccctcccacaggacacaaccggatgtgattcttgtcacttctattttaaacatgcatactgggaaaaacagaaacacaagagtgctatgggtacacgcgacgtgtgagaagaaaggaaccccctggagacacggacgcggtgtgcggtgacagccaggcctcactgacaacagggcagcgaatcgcagccgggacgcctctgaggcggaagcggtcttgggatttcctgtcacgctctcgatgcttctgcccactctggtttgtcacggggatgcttcattttgggacagtataaaaccgggtgatttaatgcatatcttgctcttcagcaaaatactattcaagtaggttttaacttaaatattttagaaagtaatctttacattattgaagattgttaaaaaatacagaatctgacaacttttcactcaatctgatgctctgaaactcttcccttctgttttatccataatttagaaggcaatccctggcctctataaaactctctgcaggattagcttcaagatccatctttcccccactggttcgagtttaaaaggctttcagaaccttttgccactgcattataaagagaacatgaaccccttcccattacttcctttagctacacatgctatgactgagagtgtgctggaagctaaacaagccccagctgatttctgccacataaaagggcgccgtgaagaatttccctgttgaaaccttaatgaagacgatgatcccaagtgaagctttatgaagagacggcacagcagagtgaaatgtttggcaatcaacagttaattagaattacatccttgatcagggatgatgctatctccgcgaactcagtcgttagaaaagttggtttctgctgtgacgaggctcacagtggccactcgaggaagtccagcctcgtcagcctccggtcccgggccccaggcccctccaggccctcagtagatatctgggcagtcggagaaattccgctcaaagtaatcccctgcatacaaccagtcgggggtcccagtgtaggggttattgcctgggtagaaccacctcgtctgccactctgcctcctccttggcccgctccctccgtgccctc

SEQ ID NO: 323681 - DNA, 1455 bp, Homo Sapiens
acttgattaaagcaggctgtactggtcggaatcctgggatatcgtcgaccacgcgtcggagaggccggtcctggtctggccgctgcggctgctagcccgaggtctccaagccgggctgcggctccatcctcggctcctgggcaccgtctgcgaggctccgccgaccagagtgagaaagccgcgggcggcgaccgccgcatcatgtcagccaaggacgagcgggccaggagatcctgaggggcttcaaactaaattggatgaaccttcgggatgctgagacagggaagatactctggcaaggaacagaagacctgtctgtccctggtgtggagcatgaagcccgtgttcccaagaaaatcctcaagtgcaaggcagtgtctcgagaacttaatttttcttcgacagaacaaatggaaaaattccgcctggaacaaaaagtttacttcaaaagggcaatgcctagaagaatggttcttcgagtttggctttgtgatccctaactccacaaatacctggcagtccttgatagaggcagcacccgagttcccagatgatgccagcaagcgtccttaactgggaacgttatcctagaaacaaagttttttgacgacgatcttcttgtaagcacatccagagtgagacttttctatgtttgaaagaagaatgtgtgtacatttcaagaatttgggttttttggagggaggaggaaactgtttacttttttcctccacacgtttgatttttgacacatacacccctaattccctcaacagcagaacctacctgcagccaccaggggaccagctctgtgtaggtaaccagatggctctttttcccaagccgccatcttccagctgaccagactaaactcccaaccccagatcagggcaggggacaggtctcaagtccttcccagcatacacacagggaacaaacacataccacaaaccggtaactgtacctgtcacccctccttgtctcctccttgggccctacaggctacccatctacctttggccccctggtttggaaaaattccgcgttcctgaccctggttaagtttttcctacatttctatttcatacattctcttacctttaactttgtaaaatacactgggatacctattacataatgccatttaacaattctcaattcaaacccattcccccacagtccttaaaaactggaaaacccccataattacaatttcgaagggactcctcatgtttggggtggcgggacaaaaagacgcgcaccggaaattggccacagggggtccattatcctggttctcccttgatccccacattttttcttctggaacacaagtgcggccaataaactctgcccgggtttttccgcctaacagcggaggggcccgtgtcttattctctctccacataagcgcgcagcgcgtctaaccgcgttccatattctatggacactcgcgcg

SEQ ID NO: 323682 - DNA, 928 bp, Homo Sapiens
  misc_feature (42)..(42): n is a, c, g, or t
ggaggataagacgggggggcgacggaaggcggtgagggccgncgggggccacgcaagtgtgggacggaagcccgcccgggatcgttccactctctagggggccaggcgaggggaatacggcgacaggggggaagaaggcggggggcaaaagcggtgccccactgcgtgggataaccagtggcccgaaggaaggcccgcgaatgcaggtggggcggtgctacgcaaaaccctcccttggtctgaggactttagggagtgggtggggcctgaacatcagctttggcctcctgacccaaagcatgaagcaggaccatgggccagagaggggagcaggcttcctgggggctggactcaagtcttctctgcctcagatggggtgggccctgactttgagggagctacagatgggtgagctgggggctccccaggcctcggggcattgggggcagccagaagaggaggggctatgggatggcctggagctggggcagttgccagaagctggtctcactcctagtagcccggacagaggagctaagagcgagtgctgtgtgcatagttggtgagggacacactcccggcctggcaggtccactttccgctgtcctcgtctcttgcgcaaaccttcagtttttgcgataaatccaaggaggccaggagagcagctccaggcacaacacctgctctggaggccctgccctgaccatggcatccttcgagcacgctttcctctgacccactgggctgcacctgttgatttctcaagcccccatccctgcccagccccactacatccctgctctgttttttttcaggacgcagctacctctgtggagcaggtttgggatgctcatcccttgacagtcttgggtggacctgtcgtctgtcctgttttcctcgtgccgaattcgccacccaggcctcgcta

SEQ ID NO: 323683 - DNA, 733 bp, Homo Sapiens
  misc_feature (33)..(33): n is a, c, g, or t
  misc_feature (113)..(113): n is a, c, g, or t
cccctgactgtggctgcctaccctaaagacggncttggggtagtgctgggtctggggtgtaagcaggactggcccctggggatgtcaagacttttgagtcagggactcatccnagcctgcgggtctctgcctcccaggacagtggcctcaggggcctgggccacggcaagaagtgagtgtgagaggctgtggtgcaggcctgctagctcacggctggtctgtgctgagcgggtgatgtagtcctgcttctgcttccgctccaaagtcagctgagcttgcagcaggaccacctctttctgcagttcagccacacacttggcatctgagttcttctgtcctctcccatcctgctgtgtgggtgaagaagccgtggccttgctgatctctagggaccctgcctgggccgcacgcatggcctccctcttcagcttcctccgttctcgctccacctgctccaaggtactccgcagctggacattgtggcgctgcagcctgctcctgtcaatctccagccgggccactgcttgctgcaggtgttcaagcctttgtctccatgactgcttctccattccatcaggactaggctcagcctccactcctgagacctctcccagctgcacagcctgctcccctctggaccccagttctgctgtgctggttgcacctgggctgtgtagccgctccttctccagagcccgtctggtgagctccagttcatcctgcagcctttgct

SEQ ID NO: 323684 - DNA, 1048 bp, Homo Sapiens
  misc_feature (233)..(241): n is a, c, g, or t
  misc_feature (301)..(361): n is a, c, g, or t
cccaccctcgcgccgccgaaagagtgccccccccgaaaccgctgtttcccacggggtgagggtggtttttccatagagccccgcaagcgtgttcccgcgggccaggcaaagagtgtcccgaagaggctccaccaaccgcgggtggtcggagaattggggtaggccccctccgggtggcttacttccaagaagcccaattcgcgttttggggaaggggccttccggggcggagnnnnnnnnnacctcaaacccggggtggggtaatttgtttcaccggggtgttctccctctattaaggctnnnnnnnnnnnnnnnnnnnnnnnnnnnnnnnnnnnnnnnnnnnnnnnnnnnnnnnnnnnnnttccagtgggtttttcccaggagagcccaggggcccgggctgtccaggcttcggggtgtcggcgcagaagcaaaatgcttaaaggctgttttctaagctaaatggggctcccccactgggagcaggcaaaggctggggttgccttggtggcagctgttgccatgacgagtgatgtcatggggaaggtagccactatagtcacaaagtggccagaagtgggtaggtgttttgtcatgtacccttaaccggtgcaagcgcagtttcgagttggtaccaaacgtctgggggcaagagctgcaggggatgcggccaatgcctgtgtgtcgggactggtgagcctctaaccggtaccgtctggtggtcgaaaagtcacagaaggggcactgatggggcttcaccccctcgtgcttgagccgccggtgctgctgcatgcaacggctctgtttacaggtgaagccacagtccccacactgtagatggggccggggcccacgggctggggctgcagtggggtgcctccgcttctggtggagccttaaggcagtggcagcaggagcagtgaatgggcagaggctgcagtgcagctctccagactcctcgagggggcagccccggatctggtgagtcctcagagcccgttcctgctggcagctaaagggaccctcgtgccgagtacgccacccaggc

SEQ ID NO: 323685 - DNA, 1147 bp, Homo Sapiens
  misc_feature (129)..(129): n is a, c, g, or t
  misc_feature (249)..(249): n is a, c, g, or t
  misc_feature (257)..(257): n is a, c, g, or t
  misc_feature (260)..(260): n is a, c, g, or t
attccaacctgcccttaaacagaattgcaaattggctccacaccccagggcccggcagttgaggtcagaccccctgccatttggcaggcatcgccttcaaccacgggtttcatttaaactctttacaancttaagagactttaataaaattgcttttgattctggagtggggtagcatccactttattttattctgtcagggaaactgtttagtctgcatgaattttatatggcaagggcttccttctncttcttcntcnctccatgccttcatcttcccccccaaaccactcccttaaacatcatttttaacaagggctcccaacttgaagaaatattcgtcaaagtctacacactaagtacctagaacctctcacagatctacttcactatctgcttcaagtctgtggacgttattcctttcctggtggggcagggaaggaaggagagcaattggcctctgctgggggtccccctaagtcttttctgcagtgtccaggaggacccggaaggagttgagggacccttctgaccagcttccttcacaaagcactcactagcctggcctaggtagttgctctcaaggaggtttgatggagctgttaggccaagggttatctgttcatattcttcccactcccaaggttgaattggggtaaaatcacaggcaagagctgataaagacatagaacttgaacgaaaaaagctattgagaggtgagcaatgccctcctcctttctcattttgtctgcttcaacatgaacgccaggattcagtgaaatattcaggaggcggccagtttagatgatccgatcaaccttgcttgctaggtggccttgggaagagtctgctgcattgtggacgggatggccgtgcgaagtgcagctggtaactggttatacactttagctaagatcaacagttttgaaggaagccaccagaggggctggtgtaatactcgatgactattcgtgtgtcggaatgagaaaagggttgtttgtttgtttccttgctttttaatggttcttagatgtggtcagcacgtacagcattccgttatcagaatacaagattcttgctgagacggatcccttaagctgacaggaaaattagcatagcttcctgctccttctctgtcctgcttccc

SEQ ID NO: 323686 - DNA, 1197 bp, Homo Sapiens
  misc_feature (47)..(63): n is a, c, g, or t
  misc_feature (449)..(449): n is a, c, g, or t
  misc_feature (1082)..(1082): n is a, c, g, or t
  misc_feature (1186)..(1186): n is a, c, g, or t
ggcctgggtggcgaattcggcacgaggaccctcctcctcctgccagnnnnnnnnnnnnnnnnnggttcatgtggcataatcatctttcaaaattaaccgaatgccccagaaaatgatgttaccactaaaatattttctccaagaaggcatactgtaacagaaaagataggtaagatatttttttcccaagaagtaagaattgattgtgctgaatgttcaaactctggaaactgttcacagtatgttgttcttagctgttatttatataaagtgaattattttctctctcaatcatgccatagtggagacttttgtttgtgagtaagtgacagagtaatatgaaataatgtgatatgtcagagtgacatgcagcatcctgagcctgtttttatgttctgtgtacagtggcatttgattgagattaaagcctgtcacagcctgctgctggngggtgtggggatatgccagagtcctgtgtttggttttagaagtttactgaatgtttcccacatggagaataatggatggcatgttagtttctttaagagtggtaaagttgtacatctgtcattgttgcatttcgaattgaacccctagatgcttgcctgtctgccttgggggaagcccccttgtgaaagccaaaaataccggcactccggaacgataacaaaacctttcccggccagggcacgtgggctcacgcccgccgatcccgggaactttggcgacgacccacgtcggctgacatacggacgctcgcgccatcggagccccacccctgccccggaaattggaacaccccctcccttacctacaaacaccttagtttcggctcgccaactgccgcgcgcaccatccattgctacctcgtccgcttctggacaccccacgcctccacataccaccttcgacccctaccaccgtgcaccagccacacgtgaccgagcgcgcgcccctcatgttgtctcgacgccgacgcgccaggtagccctgacagcttcctcgcgatcacatccagcgcgagactacgcggtagcacgcacctgtgtcgcgcgccgaccaacccccgactgctagcgacnatccactagcgcacgtcgctctcccatgtcaaccgcttagcctcccgatcgctcagcgtggagcgcgccccacgccgagaccagcgtactcacgcacggagaantgatcacacct

SEQ ID NO: 323687 - DNA, 1019 bp, Homo Sapiens
  misc_feature (121)..(146): n is a, c, g, or t
agaaaggtccaccgcaaggagccagcctgggggaaaatggagggccgtcacaggccctctccggggcgccttccaagagacccggccactggagtggggggttcttagggcccagggtgtnnnnnnnnnnnnnnnnnnnnnnnnnngttttgcggggggccatctggggactcggtttattccccccggaggttttggaaggcggggccttgaggcttgctgttttcttcccacttgggctgggggcacccccccctttttcaccatttgccagggggacccctttccagcccagccgtccctgggttccagttcctcactgacaggatgtcagtcttctccaagggtcagctcatctggggtgcagtgccttgtatgtcctaacacactgaacctgggggcaatcttcccccctcactgatgacctccttgtcctcctgggggctggaggggcacaaggctgagatccatcgctgcttctcactttccgtccgggcccgcagcaggaactggtgcttcatgtgctgcccgtggaggagctggaggaggaacacgtggccggggatgccctgcagcttcaggctcaggtcccgcacctgcagctcagccatcttggcatggacgaaaacggcaaacttccctagctccttccgccgagagagcagcaagcagtcattgaagaggtggaggtagactgccttgctggacagcttcagcttggcagggggtgctgcaggcagtggtgccagctctaccaactctccatgccgaaccagccagcgggcctgagagatcagcgggaaaatcttgccctcaaagtggatcttcttgctcaggtggatgagttcctctgtcctcttcatggactgtacactagcattgcactcctgcaccagctccttgagcgcattgaaggccttggtggccatgtcttcgtcttcagagccctgtgctgtccgcttcaggatgttctccaccaacatcttgaggcgcctcgtgccgaattcgccacccaggcc

SEQ ID NO: 323688 - DNA, 886 bp, Homo Sapiens
aggtagcgaggcctgggtggcgaattcggcacgagggacgtgctgtgttgtgatcacgtgggcagctccgggcgcggcgcttgttttggtttccttctaacttgcccacggcagcttcggggtgagcgactttcctgcaccagctgccgcgcctgctcacaccctgacctcgttttcgggctctctgagcccgcagttccgcaagcccctggggcgggctcctgccatgccgctagtccgctacaggaaggtggtcatcctcggataccgctgtgtagtccgaaaggacagaggatgtgaatgtggatggatgatttggatacaactgtcacactgctccccacagggaagacatctttggcacatcaatttgtggaaggcgagttctcggaaggctacgatcctacagtggagaatacttacagcaagatagtgactcttggcaaagatgagtttcacctacatctggtggacacagcagggcaggatgagtacagcattctgccctattcattcatcattggggtccatggttatgtgcttgtgtattctgtcacctctctgcatagcttccaagtcattgagagtctgtaccaaaagctacatgaaggccatgggaaaaacccgggtgccagtggttctagtggggaacaaggcagatctctctccagagagagaggtacaggcagttgaaggaaagaagctggcagagtccttgggtgcgacctttatggagtcatctgctcgagagaatcagctgactcaggcatcttcaccaaagtcatcccagaagatgcccgggtgggaaatttcctatgggcaagagcgtccctggcatctcatgtgaacccttgggtggggggtaactgccttgcttctgcccccg

SEQ ID NO: 323689 - DNA, 1098 bp, Homo Sapiens
  misc_feature (1065)..(1065): n is a, c, g, or t
cgagcaaagggcgcttttccgttttcgtgggtttaaaaagggcggatttttgttaaatagtgtgattggtacaaaaaaattatgggccccttaccccccgggaagggggagttaaggaattctttaacaagggggggccgggatccacccaatattaaaggctaaggggtctgcaaggagagtgttaagaacccattggtgtttcaaaggccaggcaaaacggaaacccctgttggtgaaagggatttggcgtgttggacactgccggactgcaggggcagggaaaggggctagggctccagggggctggggacatgcattgggttgctggggagggagccttggctaaatcccaagcaccaggcacctgtgagtttggtctgttgtcagctgggctccccaagtaaaacctgtagctttgcctcttctcccagctctcgtgcctccctgaagggtagtccagggagctggaatctaccccacctttcccccaaaagtggagatgtttgtgcagataaatctgcagcgttgttttgaggggaaaccaaggccatggccaattgctcctccattatcttctttgctatctgcttagggtatagatctcttcctcctggaatggaactccttgagcacagagagggacaatgaaggtagaagccttggctctggacacctcttttgggttacatgcggggaggggtgatgcccatgcagattgtccagcagtaagtctatacttcagttggtcagtaaagaggcctctgtaaggacacctcttcttcttgccagagcagtcaggtcaatctcaaagacaggaaaagagatggacgtgcagcaaggaagaataagaagggaggcagccccaaaggcagcctgaatgcatagaaacgaccaccacctcttctgccactgcctcactcctcccatcccacaggggcacttggcagagggcccaggcccagatgagggtcagcatggggaccactaccgtgaaaaggcaagacaaagatggtccagatcagccctcgtgttgaatcgccacgcaggcctcgcgcggggggngggttagggcgtgtgcgccgcggcgggcagggg

SEQ ID NO: 323690 - DNA, 559 bp, Homo Sapiens
ccgacagccctttttctttggatttaggcaaaaaacaaaaattaaattaaagacttgtttttcaaggctgagggttgaagcttggctcaaaaatgggttaacgtaggctatggtgaaaacctgttgtccactactggaggttttctgggctccttgatctagttgtaatggtcctctgtcccgcagccccatggggaaactggaagccggcccaggcggactgaatgctgaaagacaggctctggctgtcatgaggttttgggtttgccctctcaagctgccccaggagctggctggactgccatagatgaactggaaatggaattgtgaaaaaggctctgtgaatggggaggggtgcacactggatttgggccatgacttctttgaactgttgactgcagctgctagtgacaagcctggggccagagcttcttaggctggtgggtttctcagggaacacttccaaataattgaactagagctagatacaccctcccctccccaatttgcctataaggaggtcagattatttccctcgtccgaattcgccacccaggcc

SEQ ID NO: 323691 - DNA, 1043 bp, Homo Sapiens
  misc_feature (823)..(831): n is a, c, g, or t
aggaaggacagtttttcttcctccaagagtaccaatttgaccactcccactaacctcactcagcaaacaaaaccaggatgtagacctggtttggtaagggagttttaatgagttttgtttcctgaaattaacagtgattagttacaccaagcaggagaagatataatgtctcgctttcacatttgcaaaggaatactatgggctaaccgtcatcccctactgcgcatgccaacacaggcgtcggccctcctgataccctcaggctcttcacaaacgtggggcgttcatacaggcttgctcaggcttgtcccagaaggtccatttggttccccaaagcacactcaaggttttgtgtttgctttcattttctaagcccctgaatttgcaagtaaagaatcactgactaacagaattttgcacaatgactgttttctttccctcaatgaagatgcccaggtctgggtgtgaggagcacctgcctcacctgctgtccacgctggccttcagcatgcccactagctcttccctgctcgcttttgagaatgatctgtgctgggacacctcccttaactgatgaaggcactactggcaatgattactaacaaaaaggtgttgaaagagaacaccctaaaaatcgacgactgtagaattttctaagtgtaccacaatttggcacaacaaccagagtaacaaaacaattccaatttggaattttattggtacagttgtataaaattctgttaatcagtcatgcttcacaacgtcctaaaacccagaaaattctggaatttgtaggtaatactactcattcaataatttatcnnnnnnnnncaagtgcctattactgttttaaccagagcaaaggtcaagttttcttcttgttacattgaactattcctaagaataataataatacaatatgaaaaaccccagaatctgaataccctggatttcttaatgaacatggcatttaaaatctgtaatttcaaacatgaaccacaatgccgtatgatctaaaggctgctgaaccacagcgtggatcc

SEQ ID NO: 323692 - DNA, 1272 bp, Homo Sapiens
tcctccctgagctgctgacgagggtgaggggtgaagggtggggcctctggagagggcaggtcccggggaagctccggactcctagaggggcggccaggtgggggccctggtgaccaggacagactgtggtgttttttaacgtaaaggagatccgcggtgtgagggaccccctgggtcctgcacgccgcctggtggcaggccgggccatggtgggtgctcacgcccccggcatgtggccgccctcagtgggaggggctctgagaacgactttttaaaacgcagagaaaagctccattcttcccaggacctcagcgcagccctggcccaggaaggcaggagacatgaggccatggacggtccagaggtgtcgaaatgtcctggggacctgagcagcagccaccagggaagaggcagggagggagctgaggaccaggcttggttgtgagaatccctgagcccaggcggtagatgccaggaggtgtctggactggctgggccatgcctgggctgacctgtccagccagggagagggtgtgagggcagatctgggggtgcccagatggaaggaggcaggcatgggggacacccaaggccccctggccagcaccatgaactatgcaggacacctggaggggaagaactgtggggacctggaggcctccaacagactccttcctgcttcctggacaggactatggctgtgcagggatcccagagaagagttctgggctccctcaactccacccccacagccatcccccagctggggctggctgccaaccagacaggagcccggtgcctggaggtgtccatctctgacgggctcttcctcagcctggggctggtgagcttggtggagaacgcgctggtggtggccaccatcgccaagaaccggaacctgcactcacccatgtactgcttcatctgctgcctggccttgtcggacctgctggtgagcgggagcaacgtgctggagacggccgtcatcctcctgctggaggccggtgcactggtgggcccgggctgcggtgctgcaacagctgggacatggcctttgacctgaatcacctgcagcttccatggttgtccaggccttctggcttcctggggggccatcgcccgtggaaccgctaacatctcccatccttcttaacccactgtgggttaacaacagcaatccgtggaccccgtgccgccggggctccggagcgaccccgactaacggccccactctgaggtgcgccccacggtgtgtctattcacctcaccccg

SEQ ID NO: 323693 - DNA, 1319 bp, Homo Sapiens
  misc_feature (181)..(193): n is a, c, g, or t
  misc_feature (199)..(489): n is a, c, g, or t
gctgggtggcgaattccgcacgaggaaattttgtgtatttgagtgtttgtacattttattgtatgcatggaagaaatcctggtagaagataaaccaaaatatggttgtaagtataattaattaaagttggggaaatggaaaaattaaaacaggaaggaatacttatgaaatattttgtttnnnnnnnnnnnnngagggnnnnnnnnnnnnnnnnnnnnnnnnnnnnnnnnnnnnnnnnnnnnnnnnnnnnnnnnnnnnnnnnnnnnnnnnnnnnnnnnnnnnnnnnnnnnnnnnnnnnnnnnnnnnnnnnnnnnnnnnnnnnnnnnnnnnnnnnnnnnnnnnnnnnnnnnnnnnnnnnnnnnnnnnnnnnnnnnnnnnnnnnnnnnnnnnnnnnnnnnnnnnnnnnnnnnnnnnnnnnnnnnnnnnnnnnnnnnnnnnnnnnnnnnnnnnnnnnnnnnnnnnnnnnnnnnnnnnnnnnnnnnnnnnnnngagggggtgctgcccacatgttgcttttacagtacctgcaatttcaggggggaaaacccccaaaaaactaggaagtgcaagtatgtctcaattcaggaaagttcatagaaactttacaaattacaccagataaactggggaattaagttcaacaattgaaggtctgatatgtgttacttttattcaggtgttctgtggatatgaatataaatgagaaagttgaaacatagttcactaacaacattttgaaatgagattaaaatcactaacaacattttaaatgaggtgaattgtatgtgatgtggactaaactagatagctgtttaaaaacttgtttagagaaaatacaattatagttttagatgacctagtgttagtctagattaatctagtcccatcctctagggattggaagtccaagaggggaccattctaagaatggttgtgaaccccttatagaatctgatgaaagctgtggattttgttttcaggaaatctcacttgtccattttcacacggtttagcataaagtttagtctgtttagcctaaagcattgttgggcttacaggcctccagctcctgagaggtctgcttcccgcttgatccttttatctgtttacttggctctctggagcatgagagtaggtgaacatggagttttccaaagcagggggcctaacttacttattgagctaggcatgtaacaggaagaaagaagtaaagggcattgcaagctgaccaaaaagtaatactttaaagagaatatacttttcccaagttatttctattatttgtcttttttctcttttccagttaaaagtttgggcag

SEQ ID NO: 323694 - DNA, 312 bp, Homo Sapiens
  misc_feature (179)..(179): n is a, c, g, or t
  misc_feature (239)..(239): n is a, c, g, or t
cgcaccccgcccaaacttttaactggaaaagagaaaaaagacaaataatagaaataacttgggaaaagtatattctctttaaagtattactttttggtcagcttgcaatgccctttacttctttcttcctgttacatgcctagctcaataaggtaaggttagggccccctgctttgggnaaaactcccatggttcaccctactcttcatggctcccagaggagcccaaggtaaacaggnttaaagggatccaggcgggggaggcaggacctctcagggagctgggggggcctgttaggcccaacatggcttt

SEQ ID NO: 323695 - DNA, 1545 bp, Homo Sapiens
cctcaaaccagcaagagaaagccatggttgtccttccacccactggagggtaacattgaaaattggtgtcccaattttaaacgtcccagctgccatagggagaggcttcttgggagtggcctccaggctcttgacaaggccccacagaggccactgccccatcacggggggcacactgggcccgtgaggaggaagggcctcgctgcctccaggatgtccagtttggggtccagtgagcggccaagcccctccaacaccatgatggcaaacacaatggaggcaaagttgctctcaagctttaccttgtgagtcatcagcaacttaaagacactagagagaaggctggacacatgaagcttctccagggtgatggtgttcttcctggcctgggtcaccagcatggccatctcggttttgaacccctccacgtccctgcactcgctggcccgggcatgatgcaggatcagctcagccactctctggccctgccccatcaccacagccatgaaaactgcccggaaattcctcaggtcaggggcctgcagctccgccacaatgccagcatccagcagcaccagtcgcagcgggcagagggaagatggcacggccaccaccagagtgtcacagatgtccgcctgctgcagctgcgcctcctgacttggaggccaggccgttggccccctgaaccaggatgtttccagggtgaagttctgcatggacaaaggttatccacaaatatcatcttcaggagcatgttgatccccagcccgtgcaatcttccttttcaagtccacgggaattcctgcctgctggtaactggacacaggcacactctcttcatacgtttccacccaagacttctctggtgacaaaggggcgcagaggggtggggaacttgacggctttcacattccggaagttgaccctggaagtgttctagattctgagcttcgtaacgcaggtcaatctgttggaccatcagcttctcaaattcctccacaatctcaggcaagctaagccacttgatgcctggcaaaactcccaggactcggctgccaatcttcatcagcagcaggtccatatgcacctgagcgagcaggccagggtgcaacactttcactgccacggggatgaggttggtggcctcaggttggtggccagggacctgagcccgagacacccctgcatttgatccaaccaggtcagctttagggaggagcagcctttctagaaacgactggtctgcgagattttctggaggtttccggccatttccaaggtatccaaagagctctctcagcccaccgactgccccagtatgtgagaagggcggcagacaggaggccctgccaagtctctggacgctgtcagtctccaggaaggcagtgttggcgtatgctttgtacacctgggccacgcagcctgagcccacaggttcccggttctcaaaagagaggatgctcccccagtcatccccaaaagcctgccgaaggaagcgctcagtggagtccacgggtggggcgtcactcggaccctcgtccgaat

SEQ ID NO: 323696 - DNA, 623 bp, Homo Sapiens
ggatgaggcttttaatccggggtcagccaggtacagcattggggacatccccaggcccagggctggcgatgtgctgggaaggaacttaggtagagaggtgggaagtgaaagcatagggaggccatagccctccagaggggaattctaagacagacagttgaaggtgaggcctttgaaaaacaatgggaacatcacctcccaaagagggactgaggtggctggaggaaccagagccgcctctgcactctgcaccgagggtcgcgtgtggctgtcaggagagcagcgtaagcctgtggagcctctgctcgcttcctgctcagaaagccagaagagagctggggcaggccaccagggcaccagacactcaccaagcggccatcaggactgggatgagaggacagaggaaggacactctgtccccaaaccctcccgtgtcctgacggccctagaacttggaggtgtcaggacacaacacagactcaaggctcctggattgaaaatgtggagggcttgggccaggcgcggtggctcacacttgtagttccagcgttttgggaggcccacgtgggaagatcacttgagcccaggagttcaagcctcgtgcggaattcgccacccaggcc

SEQ ID NO: 323697 - DNA, 966 bp, Homo Sapiens
  misc_feature (47)..(101): n is a, c, g, or t
  misc_feature (103)..(103): n is a, c, g, or t
  misc_feature (358)..(415): n is a, c, g, or t
  misc_feature (464)..(502): n is a, c, g, or t
  misc_feature (511)..(528): n is a, c, g, or t
  misc_feature (594)..(604): n is a, c, g, or t
  misc_feature (743)..(806): n is a, c, g, or t
cggggcggggggacgaaggcaggagcacggacgaagagcgcgacccnnnnnnnnnnnnnnnnnnnnnnnnnnnnnnnnnnnnnnnnnnnnnnnnnnnnnnntntctgcggaacgcgaggattgagcagggaggggcagaggccgcgggcagggaccgacagtagccatggggagaggggacggggagctcttggaacagcaaaaagaagcgtccggcgtggggggagggttgtgatgggggcgagcggccagaggctcggcgggaagagcgattctcaacgggctcctttggatcaccaagaagaggcccgctcagtgggcgggtaagatccccaggttcggcagccggttcataagnnnnnnnnnnnnnnnnnnnnnnnnnnnnnnnnnnnnnnnnnnnnnnnnnnnnnnnnnnttaccactttgtacaagaaagctgggtcaggaaacagctatgaccatgnnnnnnnnnnnnnnnnnnnnnnnnnnnnnnnnnnnnnnngcctcgagnnnnnnnnnnnnnnnnnngtgattatacgttttattagactcgggaggggtatggcagggcttcatcagtgttccttcaaattnnnnnnnnnnntacaaaagctacgtagaaaacgtcagatcagacgactaaactttcccgactcagggccaagttcttcttgagcctgcgctctcgggacgcctgcgagtcggtctccgagtacgggggcggcgcgggcgggtagtaggcnnnnnnnnnnnnnnnnnnnnnnnnnnnnnnnnnnnnnnnnnnnnnnnnnnnnnnnnnnnnnnnntccagtagccgcccatcataggggaggtccccggacctggagccgttgtcccgagggtcccgggtacggtggtggtgggacctggggtcggcaggagggcgctcccgagacctgaagtcgtcgtagtcctcgtgccgaattcgccacccaggcctcgctc

SEQ ID NO: 323698 - DNA, 852 bp, Homo Sapiens
tgtttgtttagctttaatgtctattaaataggttggaaaaacaggccaagtgtagggacctgactcctgcaaagggcctaccgcagccctctgcactcaagcagcagccccatccagaccaggagtgtgttctgttctcctggcaggcagggctgataggtgtaggatggcgtctgtttcctttggagtgtgggctggtcagaggagaaacagcaacttcctgctccttctcactgtgtcgttggctcaccatagaccacgtcctgcattccctctgattctctcatgggggagagccctgggaccttctgggtgggtgtcccagctggggtggggttcaaggctgctaccccgcttggggcagctggcctgcagggaagggccagacggcacctctcagtggagactgaatcttccttccttcaggaggctgcctccagggaagacctggggtccttcctgcgctcagcgctggctggctgtcctgttcatgcagtggaagacattacagaagaattcatacgagaagaacatgaagcctgtggagagggcagccttcagcaagctgggggacaggcccttgaagaagcccagggcgccttccttttggagcacctgcttggcacagtccatgaggcccttgtatctccgtacctggccaaaagcagctctggcatgctcaaaccctccaacctgtagccgcttctttgagagggccagcggatatgtcagggtcttgctgatgacaacagctccactgccccaaagcaggttttggaggggcccatttttctttccctccggctggggatgggcccccttggaacagggggcttcaaagggacctggtag

SEQ ID NO: 323699 - DNA, 1013 bp, Homo Sapiens
cccatttgcaaaacccctttaatcagaataaatagagtcccaggcagggcagagttcattggggatgcccaagccggattcacccacccttccagctccagcctaggcgcagtgcggcttttcgagaggcgaaactgtcttccttgtcctggtgtcccagcagggtcactgggaggcaacagtgtggtttcagggtgctgggcgggcccgtgaggcatttcgccgtccccctaggcatcctgttcatctgtgagcagggcagggggtgccgcagcctcctcggttgtcccaaccctgctcctctcctccctctccttcctctcgtagatggagtgaagcttgttgattaagaagattttgtcctcaccctcattgctgatctgctccttgaggagggcagatgaccttgcgctggccccgcaccacctggatgttgaggtagatcacggccagcagcagggctgacaccaggaagacaaagaaggtgttttccatcaggtaccggtgcacccagggcagccaggagaccctggggcctgccgcctccaggtggcgcacccacaccctgccggcctcgtacatggtgtcccagggtccggaaggggccgcaggtgctcgagggcttacacctgccagaacggcgtagcagaggaagacagcggcgcccaggaaggcggggaagcagagcagcgtgaggaagacggtgctcatgtgtgaaggcacagccagggccggcgcggcgcctggcagttggccagaaggctggtcttcttgacatagaagacgagcagcagcttgatgatctgcacggcggggaggaggggcgagaagagcacccccagccaggtcagagtctgcccataaatcagctccaggacattccgggcaatgtcaaactccggcttccgcctcctcttcagcttcttctcggagataatcctccacaccagttccccaaaaagcgtgtccagcaacatgaggacgaagtccatcaccaggaaccctcgtccgaa

SEQ ID NO: 323700 - DNA, 1308 bp, Homo Sapiens
attcggcacgaggggcatgcagacaaccccacacggccacaccaccacatgcccaagtgtacacacacagagccacaccgtccctctgggcctgctggctcctcccttggctttcccttggcccacttccagggcccaggtgctgcaactaaatgtgaaagctcagtggccgctccttctttcagcccatcaaccagcattggtcccatagggaagcacaggggactcaccctctttcatatcccttgccctgccctgaaatggacaatcactttttgggataggttgaaatttttaaagagcctgcatcattcggttccctcaaagggaagcccttgccagtgggggtttgaaagagaatttttggaaccaacattcaaattctgcctcatctggagggaaaccaaaattgggagggggaagaggacccctgatgttttgctgcttccagagatattagaaactgactcacttgattggaaaatggacaaaagtgccttgacgtggagggtgggcaccagatggggaccagccttgccaactgctgctgtggcctccagcttggctggttttgcaggccgccagcaggaaggcgaaggtggtagtacagcaagaggcactggcggggcagcaggcctgcaggagctgtttttccattgctaggcctgacccctctctacctgtgagcgttcagggggtccctgagatagtttagatgcccccccatcttagacctcagctcccacagtgccttttaagggggacctcacctcctgtgcacagcccacccactttcctctgcttccctggcacagcccaggcatagacgagctgtcgttggacccagttcttcccccttttcagccccacagctgctgccacaggggccaactagggccaggtggaaggggagctgagaagccaacccctagcccaggggtgctgtgggaactgggatccaatttgtagcttcctgcctggcttcagagagcccagcaaccttctaggcctgctttccagacttctgagatagcctgggatgagcaatcctgttacagtacatctggaccttccctacctgggctcttggggaggctgtgggcctggagagggaaaaggagggagggggtgtctgcaccacctgggaagatagcacaaggcctaatgaggtcaccctgactccccaccccagcatttcattcataccagataatagctgcattactgccaactgaccttataaccctctgcaccttcaaaaagattcatggtttttaattgctgcttttaataacatttgttaaagtt

SEQ ID NO: 323701 - DNA, 886 bp, Homo Sapiens
tttttccggcactaagtcaagttctttacttcccagaagtgatggctaaggggagggaggagggtgagaagaggaagacagaaagagccagagagaatgaggaggtgagaagggggggacagtaaaccactgttctatgaagtctcacgaggcaagtgctcaaggtaaaaaaagagtcctggagaatcgtccacggctgcgggaagcatctcggtttccttctgcttttaagtcctctcagggaaggctgtcgccgctgccgctgcattaaatagttatgtacatcgcagagagtcccaggccatgggcaggtgggggaggggcgtcatttcaccaggggccgagttttatcatcgtcaccgcactggtgagctttgtactttttcacttctgccatgtacttggcccacgcgtcacctttacttgttaatacctcatcctccgtcttctgcttcttggctactattcccgtcttgagggctagtttgttcccgcctctgcgtttgcccacgaagctaagtgtggagcccggaccgcccttcctcttcggatccccggggccagcggcggcggccgactggtcgggtcgctgcggacccgggggcggctcctcctgccgctgccgctgctcctcctccatcttccgcttgaacagctccaggaagctgccgtcgttggcgaacaagttcacgccgcccgacaccgggctcgaacccgcgcccgacacctcctcgtccccgctctcgggcgacgtccccgatcccgactcagcccaacggctcccgccaccgccaccgcccgcggggcccggagcctcccggccctgaggctccgcccgtctccctcgggcagccattttgtcgccaggtgccgcgcaaaggacccc

SEQ ID NO: 323702 - DNA, 1382 bp, Homo Sapiens
caaatcctcaacttgagacaggtttattagttaattagtgatttcacagtatcctttcgcaggccgatccccactccaaccgttccctcagcaaccccaggggtgtcagacggggcaccctcccactgtcttctccagccagccttaaaaaccccagagacgccagcctgggaacgatctcagtatggaatctgaagtcgccttgtcagcacagacacctctggggtccccagaagacctgtggcaaagttctctaaaccgaacctggagaggggaaggttttcaagcaggaaccacataaattcacctaaaactcacgcctacacccctctgtgataaaagatttctgtttcttctgttggagactgaattttctcttcaagactacagtactgtatctgtccaatctgtggaaatatactaaaagaaaatggcaccatcagtcccattgccaggacagtacaagacagtttcaaaatccacaatgaccctgggtttttcctgaaatactgggtccttttaaaaaagtaggtgaagacttcaggaatcagagctgaggtcccaaacagcactattctggatgctagcgtttctctaacagcctttgtcccagcaattctggaatgacccaggacattgccttccttgtccatgaccgcaatccccttaatggattcaagacttcgggacatgtagacattcattccactggcttgcacgaggaagatcacaggtaagagtcttttaatccaagggccagtcaggccatacttcatctggacaaactgagggattactcctaagaaagttgaagaagcaacggctcccgccattagtaatgatctttctagtggcttacaagtgtaacttctgtttccattgatgctgttgaacgctgccatgtaggcacagaggaaaacctgaggtaaaatcacggacttgatccctttcagtggcgtcattgacaaaaataccgtgggcgccatgaaaggcaggaacgctgcaggtcgaaaaagcttggggatcaggttgctgctgtcgggatgcactgttgcaagactccgcttccaagcttcttgtatcctttggtccgccgaggcagggctggaaacatcttcatttgtgcacaatagttgcctcgagttttctatactttcaactgaaatgaacacatttgtaggatctaataattctgtccattgaagaaatcgtcgaataaaggattggcgctcggtgatccagaagcgcacgttgggctcaatgaaggcggggacggcgtctctgcgtcctaggagccgcccaggttgcgtttcctcctcctgttccagggacattttgcgctggttagagtggccgccgccgccaggccgcgcgtggagccc

SEQ ID NO: 323703 - DNA, 1150 bp, Homo Sapiens
  misc_feature (38)..(38): n is a, c, g, or t
gtgactcacatctctgtctattagtgaggatgcttcgncattcgccgctgccttcgctcaccgcgcgtggtgtcgtgccgtacgggtttacacgtcgataccgcccccgcgcgcgctttctgctttctgtgtcgatgtactcttgtgcgactgtatgcctatccttcagctgtttcgcgcggccattggtcgtgcccgtctctctctgctaatgtcccgcgtttctctttatttatcttctcgcacgatcgcgggtgatggcgggtgccggtgagttttgggtgcgttgtgctggcattgtgactcaatcgtccgggagctgactcttggggcctcgcgcctgattcgactgagtcccgtccgccgtgggcgctctgtgctgggctattgtgctgtccttccgctcctgtgacgcgttgtcgtctggggggctaggtacttagtttgcgtccgtgcgcctttggggctcgatggcagtggaggctcggacgaggcgcgctcctcctgaggctgcggtgcggttggccggtctaccctccctaggcagaggctgcttcgcgcagtctctgccgatgtcgccgccgccaatgcggcaggacgccggccacggacgggccgtgcaattcgaaggtccagggagtggtggagcttccagttgccttggtgtgggtggccttcttgcccccctcccagaggaccccgccagtaacagccctgctggtggaaccttccccagtgggcatgaaagaaatgagggccccacaagccacatggactctgatgcctggagccaagaataccccttagggtggtagaaaccgcccccggggcactgtgcagtgtggctggctctccagcatcaggagtactggggattgcctgggggacgactcctagggctgggcgcccgtgggccctcccctgctgccactgcggcccacgcaagccgggcctgaagggcgcgagcggcatgggtggggagcttgagggggcgttgggctcccaccaagcgccagatccttgcgcgcctccagcgctcgcccgcgcggctggttcctttgggatgcggaggtgcgacggctcctccgcgcgcgcccgctgcaccccagcccgcccgccgccccctcgtgccgaattcgccacccaggcc

SEQ ID NO: 323704 - DNA, 1550 bp, Homo Sapiens
  misc_feature (696)..(696): n is a, c, g, or t
  misc_feature (926)..(986): n is a, c, g, or t
  misc_feature (1034)..(1196): n is a, c, g, or t
  misc_feature (1370)..(1370): n is a, c, g, or t
agcgaggcctgggtggcgattcggcacgaggaccactggacgaggaggagacgccgtacctggtcaagctgcccgtggcccccgagcgcgtcacgctggccgacttcaagaacgtgctcagcaaccggcccgtgcacgcctacaaattcttctttaagtccatggaccaggacttcggggtggtgaaggaggagatctttgatgacaatgccaagcttccctgcttcaacggccgcgtggtctcctggctggtcctggctgagggtgctcactcggatgcggggtcccagggcacggacagccacacagacctgcccccgcctcttgagcggacaggcggcatcggggactcccggcccccctccttccacccgaatgtggccagcagccgtgacgggatggacaacgagacaggcacggagtccatggtcagtcaccggcgggagcgtgcccgacgccggaaccgcgaggaggccgcccggaccaatgggcacccaaggggagaccgacggcggggatgtgggggctgccccccagacagcgcgtccaccgccctcagcagcgagcttgagtccagcagctttgtggactcggacgaggatggcagcacgagcaggctcagcagctccacggagcagagcacctcatccagactcatccggaagcacaaacgccggcgggaggaagcagcgcctntcggcagggcggacggggcctccctccttcagccagcataacccgactcccaccatgtccccttcaccatcgttcactgtcacgcctcaccatggaaagacatcactttctgggcatcagcatcgtggggcagagcaacgaccgtggagaccgcggcatctacattggctccatcatgaagggcggggctcgcgctccctgcactccccctccctccttcggctccctgnnnnnnnnnnnnnnnnnnnnnnnnnnnnnnnnnnnnnnnnnnnnnnnnnnnnnnnnnnnnntcgcccgcatgcgcccccgcccctttccgaccgaaactccgtttattnnnnnnnnnnnnnnnnnnnnnnnnnnnnnnnnnnnnnnnnnnnnnnnnnnnnnnnnnnnnnnnnnnnnnnnnnnnnnnnnnnnnnnnnnnnnnnnnnnnnnnnnnnnnnnnnnnnnnnnnnnnnnnnnnnnnnnnnnnnnnnnnnnnnnnnnnnnnnnnnnnngtcgccatattatttacccctccaacccccttatcgccaccctatccttgtgttccccccatcacacccatatattccccgcccctttctcgccgcgctccgccgctcccttccgccccctctccgccccgtctgcttttcctccggagcttttgcccgccaccccctcccagntccctatcacgtcatcttatgcgattgtccggcaccccgcggcgaaactacccgccgcttatgctctccttcagccccgcatggttatttcacgtcccccgaccgcgtatgccgtgcgacccacgctagtttttatccccctctttcccgccctacccccacgccgctattccccccttc

SEQ ID NO: 323705 - DNA, 1227 bp, Homo Sapiens
  misc_feature (595)..(603): n is a, c, g, or t
  misc_feature (1018)..(1026): n is a, c, g, or t
  misc_feature (1081)..(1107): n is a, c, g, or t
  misc_feature (1171)..(1179): n is a, c, g, or t
gtaccgagatcggacaccagttttatgtgggcgccagcagggtgcgcaataagtgtattggtaaggggagcgcgaaagagaataatccaaatatattcgcacgagaactgcccccaccgggtacggatttaccaagggagtacaattccaacaagccaatatatattgacaggggctttccgccagttttgggacagaaaatgtgccttaaagtcgaatgtcgtagcccaagttattggatgaaaggaagtggcccacgggcccgggggcgctaattcctggatatttggggctcgggaatcggagcttccttgtcggagtagaatgcccagtgacggacccgcacgaaggtccccttcggggattattttacaggatcgctccagttttcccgcccggaccgtttttttatgtgggtgaggaattccaaaccactagtccatggcccgggatttccgtagggaaacagcatagggcccagggttcccgttccctactggggccgcggctccaaaggaatcgttttagaaagtttttacgggggccgagggcggccgacaagaatataaatattggaatataacgaggtcctagnnnnnnnnngagaaacctttatttacaaccatgggagtcccacaggagtacacaaaacacacaatgtgcacacacacaaaatgaaccttttaagtcaataccatgcgtgctcctggccgcgcgccacccctcagtgccctatccgcaccaccatcacagtgacgttgtcggccgagccccgctgcaccgccttgttggccagcctgttgcaggctgcttcgtagcgggcgtcggctgcggacttcccttcccgggtctggatcttttcatcctcgagacaggacaagatgaagttcacggcttcttctggggtaaagaccttgaagagcccatcacagggcaacaaaatggaacctgttattggggggtcagctggcagcgtctgatgtcgggcacagaggtgacaccgcagcgcttgtactgnnnnnnnnnaatggaggggggaaccctttatgacgcccaaaaaaacgccccttcccggaggttnnnnnnnnnnnnnnnnnnnnnnnnnnngtttttccaaagggaggggaatttgtttcttcggttggggcttaacggccggacgtgttttgannnnnnnnnacacaaaaacaccccaaaattggcccaaaatatcctccgagggggggc

SEQ ID NO: 323706 - DNA, 932 bp, Homo Sapiens
  misc_feature (18)..(18): n is a, c, g, or t
  misc_feature (124)..(124): n is a, c, g, or t
  misc_feature (240)..(240): n is a, c, g, or t
cctttcttcttggccccnccccttaaggcctgggggccagggtttttgggagaaacagggtttcaggggaaagcaggggcccagggagtccctgggggcactttggaaatggggtgaaggggantgagccattaagaggtggtggagtctgagatttagaggctgagcctttgggggtggggccagagtgaacgggaacatgttgggggaaccggggctgtcagccaagtaggaagcttntgcccttccctccagcccaggtccccaggtcctgccccctgttggtcatctcctgctggccccaccttcccagggagaagcctgactgtcccttcccggctcttccccctgcagtcccctttccccacagagaggccagaggctaggaacacagcaccagtctgagggtttaattaaccaggaagggaactgttgggaggggcacccttgtaaaaatgtacaaaaggtcttggggctatgtgaaaggggtgataaatatgtgcatggaaccccccttccttgagcccctcctcccccagccctcggagggcctgaggacttgggtggtaggtgaacgggagggggcactttggcctctggtttagtgagcccttggggaggcaggcccagggcttagaaggctcttacaaggggcaaaggtgtacctcaggaggccccatggcccccgagatgagccacactcccatgcacacgcccctctcccttctctagaggctgtgacctctgctctcccagtgaccctacactccatgtgatgcttggtcttgtgggggttgaggcttctgttcccaggttccatgacctcagaggtggctggtgaggttatgacctttgccctccagccctggcttaaaacctcagccctaggacctggttaaaggaagcctcgtgccgaattcgccacccaggcc

SEQ ID NO: 323707 - DNA, 846 bp, Homo Sapiens
gcagtaatatatgggctttttaattaatacatcaacttacaggatctggtatcattccaagaggtgacaaatatgaacaatacttcaagatgccctttttatgttacattacagttgctgtaactggtttgtattggtgggaaaatcccaggtactgcttttactactgtgatttgttgccagcatttataacttgggagtaaggctaaatttcagtttcattgctgaaaataaagatgtaacattttcttccatcaagttcatggttacccctggcttctatccaggttaagaatccctgcctttagggaaaattctggacataatcaggacactcctgaagaggtttaaagaagaggtaagacctcactcaagaattcccactgcagtacagacagactttcatggtttctttccttgttgtcttcagggttgttgcagatccctcctcagggcttgtttgtccaggcctcgttgatgagatgatattttgaaaacaagttcatcaacaagttccggttttcctgacattgagcagtttctgagttgtatcagtttgccagcgtaatgggttaaggtgaacaactcatttcattgtcttccatctcaggggccagcagggtgtggcactgaggggcggccaggggctggggaaacgtgtccactctgctgatggggcagtcctgggggcggatctccttggccagctgccccttcctcttcaacgtgcaggcctcctggtatggtggcgagatggggggctgtgtgggtggagtgtacttgtactctgagccgccctctaggtccagtgggtaactgcctcgtgccgaattcgccacccaggcc

SEQ ID NO: 323708 - DNA, 1161 bp, Homo Sapiens
  misc_feature (186)..(194): n is a, c, g, or t
  misc_feature (253)..(262): n is a, c, g, or t
gaggttggtgcccgtggctaaggggggaggttgtaaggtattcctgagtcctgacccaagagggttgggggtggtgtccagatgagagtcccagggttggatgggaacggatagcggtatcggaggcaccccctagggagataaggggcccccccgcaaccttttaggggcccggaagttaacccnnnnnnnnncccccttccttttcaaagtttcggacctgaaggcggatgggggcttcctcccttggtgnnnnnnnnnntttccttctggggggagtctgccacagtgccgggaggcagtggccacagctgcaacaggcaattggctgcagaaaagctggtttgggaaggggtgcctgttctgggagcgagtggctctccgtggccatcctaggatccactcggccctggctcccctggggcctctctgctctgagggaggaaaggcaacagagggcttctgccagctctgggcaggggcgggcagcagagagctgctgtcatggctacggagtgttgcacggagaggccctgggggcctgctgaggtctgggcgagtccctggtttagcagcactggtaggtattgcactgagcaagaggaagtgcctatcaatcaatcaatcagggaggaaggaaaccaggccagctttttctttttgccctttttcacactccagggattatgggtttcttccaggaccggcccctccggaagggctggtcttaggagaacccaagtggctcctccacttccactgatccctttactccaaacatggcgcacaggggatgggagctgcagcccgccctggagctcacggctgcttgatagccggggctcaccctgaagaagtggcccctcttggcaggagtgagtctgaggggccaggcctgtgcacagaagttcagacctggctcctgggcagcggggtgtgagggcaaggccctgccaaccggctgccatctcccagcagtccgtcctgtcaagcagctgagggccagagctgggagggctgcagtggctggttagggacaggacgctctctgggttccagctcctggacacccagtctggacttacttacctcccaggcagacacattgtgtgggggagttggggttacagctgttcagaacaggctcagggcacatcctgg

SEQ ID NO: 323709 - DNA, 1212 bp, Homo Sapiens
  misc_feature (100)..(181): n is a, c, g, or t
  misc_feature (616)..(616): n is a, c, g, or t
  misc_feature (887)..(887): n is a, c, g, or t
  misc_feature (987)..(987): n is a, c, g, or t
  misc_feature (1153)..(1161): n is a, c, g, or t
ccatccaccagagtctagaaggccagacgggcccgcatctgtgatgagaatgtaaatgtgccagtgtggagtggccacgtgtgtgtgccagtatatggcnnnnnnnnnnnnnnnnnnnnnnnnnnnnnnnnnnnnnnnnnnnnnnnnnnnnnnnnnnnnnnnnnnnnnnnnnnnnnnnnnnaataagtcggacttattaactctgagtgccttgccagcactaacattctagagtattccaggtggttgcacatttgtccagatgaagcaaggccatataccctaaacttccatcctggggggtcagctgggctcctggggagattccagatcacacatcacactctgggggattcagggaaccatgcccctttccccagggcccccagcaagtctcaagaacacagctgcacaggccttgacttagagtgacagccggtgtcctggaaagcccccagcagctgccccagggacatgggaagaccacgggacctctttcactacccacgatgacctccgggggtatcctgggcaaaagggacaaagagggcaaatgagatcacctcctgcagcccaccactccagcacctgtgccgaggtctgcgtcgaagacagnaatggacagtgaggacagttatgtcttgtaaaagacaagaagcttcagatgggtaccccaagaaggatgtgagaggtgggcgctttggaggtttgcccctcacccaccagctgccccatccctgaggcagcgctccatgggggtatggttttgtcactgcccagacctagcagtgacatctcattgtccccagcccagtgggcattggaggtgccaggggagtcagggttgtagccaagacgcccccgcacggggaggggtttgggaaggngggtgcagggaagctcaaccccctctgggcacccaacccctgcattgcaggtttggcacccttaccttccctgggaatccccagaatttggtcccaaggnagggagaagtgggttcctcaaataccggtaaccaaagaatataaatccccctaggggttacaaattattttttttaggaactcccggttaaactcacattttatcccagccagaaatgctaatttttggatgcctggtaaaagtcttttccaatcctggggaaccnnnnnnnnnaaagggaaagaatttttaatatttaaaccctggggggccttttcccctccc

SEQ ID NO: 323710 - DNA, 1184 bp, Homo Sapiens
  misc_feature (666)..(685): n is a, c, g, or t
catcgaccaagtttaaaacatgtatttacaatacaatttataaaatgcttaatctgccgactcaggagcccgcggtgcagggtggggtgggagtgggcagctgcccgctacaccagcagagtaagactgcaggggtgcagccctccctcccatgcccttctgttcagacacccaaggggcccatgtgcacccctgggatcacacgaccagaaaacaggaccccagaggtttcttgagtctctgcttaccagggaggctgggtacagccctgccagcccatccctgagcagggcacccccagatggggcagagcagggtatggctgggcagggcagggctgggcggggcagatgggctctggaaggggctgatggtagcagatagggtgttgcctcctgcctgcaggtggggagcaccctgattgagtgggctgagaaaggttggtcaccaggcctggaccccccccgctcctttggttataggctgacatcagagtagtggctcatgggaagcggttagctggaaggtctgaggcctggcccatgggttcagggaggagctgggggaaggggacagtaccgtgaagcagataaaggggcagcagcctcaggtttctgccccccattcccctggggttttccaagccaaagcctgcaacgtactttnnnnnnnnnnnnnnnnnnnngcacttaggaaagttacagacaactacccccgaggaaataccctcccacacacaaatccaaaccgtttcctcatctccctcccgcctcccccgacacaatacagtttcctgttttctttctttttaaaaacgttgcctgctacctctccatttgggaagcccagggcatgactgctggtgggtggtgacaggcacacagcgggcaaagcccatctttggccagagggaggtgggaggaccagtccctgccacatcctcaatccacagacacccaccagccagcctttactttggcctcccactagagggtagtggggcaagaacaggtggtcccaatggctgggcaatcagcacttctggcgttcccacctggactacctctatacccttctccaattaaaaggaaagtctcactttgggcgggaaaccactattacataagggatggaccgacagcgtggtcgacgatatcccgggaattccggaccgtaccagcctg

SEQ ID NO: 323711 - DNA, 436 bp, Homo Sapiens
  misc_feature (15)..(15): n is a, c, g, or t
  misc_feature (27)..(27): n is a, c, g, or t
  misc_feature (42)..(42): n is a, c, g, or t
tctgaaattccctgnaaccctgggaancttgggctgctcctnaactccccggggtccccaacaaggcaaagcctctgccttgggaaccagtgctgctcttccctcgctgcttaactcccaggaaggtgaaaggtgaacagggcggcaaggagaggtaaccacagcatggctggggacaggcgctacactgggccccggacccagcacagggatcacagtgtcggtctcgcgcacacacctctggccacatgtgcacaccacatacatccacacgcacctccctcctgtctggcgggaggctcattctctctcgcagccactcgccctctctgcctctcacatatgcggtcacagagtgaatccgagcatcttattgctgcagggggcaggggcgtcggcatcagggaaagttaatccacgaagagcgagaaccaga

SEQ ID NO: 323712 - DNA, 667 bp, Homo Sapiens
gccataaagaatattatttaatccatgagacatcgtccgtacaaagttagcgttacttttaaaaatgaagaccgtgatataaactggtaaaaaacgggcctgatgcgcctcgagcactccctgggagcaggccctggggtggctccgcccagtgtcgttctacctgaggtctacttgtgtctccccccttgttctctgcccccagaccatggccaaagcctttcctacaatgtcccatctgagagccttatggatgggctcacagggcagaggtaggaggagaaagaggaaggggcatggtgggcacccagccctgggggcaactgagggcacagccacgtccccagcaagggcacgctccagtagtagtgggggagaaggcaccagcagaggcagcgctgaggacctgggaagaaaaggaccctgccccaggagatggtctcagcaaggagcgggatattaggaactgagacccaagactcagagaggcaggtgccttgggtgtgcctgagcttgggtcaggatctcacaggcctcacgccccagaaaaaccccgccttaaccaaccatctcacgcggagtcagcctcgcctggcaggggggcacccaggtccagagcccgggccctgtcttgggtctctggctctctggcacacagagagcgctc

SEQ ID NO: 323713 - DNA, 1195 bp, Homo Sapiens
  misc_feature (269)..(278): n is a, c, g, or t
gttaggccgtaggttttttcttttaaaaggaagggtggggtaggggtcctcaaggggagttaaggtggaggcccagggacccagaaaaggtcttgaggttattgagggaggggaaggtgaaaggagggagagagataccaggagaggctttttcccccaagggagaagctgacagccacaggggtaaactggtttctgaggtgggttttgccataaataaaggggcaacagtcaagtttctaaggttgtccacacacgcacacacacannnnnnnnnnaggtgtcccccggctgtccatgactggcccaatcaaaaacagtacatcacaaatgacttgtgaaaccaatgagttcatcaacggtgataccgagatgtccaacagccgtgattcgtacagagtaaactctgagtggttctcgtccaccttggccaaggcaagcagcgcgcgggcagcccgccgcatcatgtccacactagttggctcaaagggtgggttctgcatgtggaggaggctggcctggctctgctggaactgtgtggcggcaaggctgtcctctaggaagcccaggaggttgccgatactgcccttctgcactgcaatggcacgagctgccaggctgtccccctgagccaggttggccagcagtaccacagccatctcccggcacaccgggttctttcggtcactgaggaagcgcaccatagtgctatacaacttctccaggcggctgaaggggggtgtggccagaatcaggtccacattgttgtcctggatgctgagtttgctgagggtttccaagaccagtctctgcggggaaaggacggcattggggcccagggtggaaaaggggtcctgggcttcagctgaagggcaaactgcccagtgtaggagtccgtccaggacaggcaggcaaatgctctcggggtatggagataggtccaactgccccgagatgttggcgagtgtaaccaaggtgttttcccggagcatctccaagcagtcccaccaccactccactttgttgcagctcaccccttggtcctgttcctcctccttttcataagttagtggtgcctgcttccgttctgggtgcttgtggtgcagcaggatcagcttgcccaggatgagcagcaggcctgggtgtttggacatctcaaagtcattgcctggcacaaatgacaggcttcgaatgg

SEQ ID NO: 323714 - DNA, 868 bp, Homo Sapiens
  misc_feature (464)..(464): n is a, c, g, or t
taatataacgtttttaataagaaaagttttaaacaatttatttttggcaaaaacaggtagggcaaccaccaccccacagccctgagtggaataggaagacttggaaaagcacacgaagagggcagggacatgaggtgtcatcttgtagcagcttctgagaaagagctcagtccaatggcaagttcaagtccacgggtgaaacagccaggatgccctcccagcccccgtggcctgggatccagggcgtgaagctgtgcacgtgctccacgctgagtccggccagggtgccccccagcccggccacgcgccggcttcagctccatgggctagggccagggcgggccaggggctccggggaaggaggcgggggcccggggcatgctcggcttgggcgagagctgtcatcccggctacagaacagctccaccaggcgggcgaaagagtcggaggacaggcggaccagncttgctgcgcagggcggggtccgaggccagcttctggttaatgacttctgcctcctcctccagcagggccaccagcctccgcagtatggcttccttctctgtcgatgggggaccctgtaattctgggctgggcggagatttcagctgctcttggaccagctgttccagccgctgggccaccaaagcatagaagtctggagtagctgggcctaggtggagttggaacaggagacccggcagcctcaccacgcctaaggaaggcagctaggaccctcagcgtgtcttcccggagccccagctcttcagagcctgccatggaggcacctggtccggggccccaccgccgcctcctccactcaacttgcggtctcctccactgaactcgtacaaactttattactccc

SEQ ID NO: 323715 - DNA, 325 bp, Homo Sapiens
ccagagttgagtggaggaggcggcggtggggccccggaccaggtgcctccatggcaggctctgaagagctggggctccgggaagacacgctgagggtcctagctgccttccttaggcgtggtgaggctgccgggtctcctgttccaactccacctagaagccctgcccaagaagagccaacagacttcctgagccgccttcgaagatgtcttccctgctccctggggcgaggagcagccccctctgagtcccctcggccttgctctctgcccatccgcccctgctatggtttagagcctggcccagctaactccagacttttatg

SEQ ID NO: 323716 - DNA, 978 bp, Homo Sapiens
  misc_feature (710)..(710): n is a, c, g, or t
  misc_feature (738)..(738): n is a, c, g, or t
aattcttgttacctcaaaacccttttggctttgcccaaagccccaatttaattccttggcacagttaccccccattaattccggggttcccacatgggagaaaatctcaaagggcccagggggatgccaagttgggggggacccctgggggttgaacccagctcccggggctctggttgggatccccagggcttcttgggggccggggtgtggtaaaagggaaggtcccggggagggagaactaggcttctctgagggctgagccaagcccaatagggccaatcgttgggcaggtggagtggagaagtaggccttctgctcttctgagtagcgctcctggggtgtcacagcatcccggtaagtccaatcacgccagtggaaattgaagccttcgagtagggcgatacggtcagctcttgtaggtacacagtcatgaggttttctgggtggcagatctggcacctctatccctggcagcagcactacccctcggatggcaaaccaggccccaaatcgggggtgtatgcacacacctgatatgcgctggttcccccatgggtcagcctccacatcttgtcgttggtagtagtaagcagccccagctacatgggctgctgtctgggccaggatcttggggcgtcggttggggtgcacctcgtagtcagcaatgatttctatctgcagctctgggaggctctctctaacacggncccagatgttaggccacacactggtgcnactgggtcagtcagcattcggaggtggcagctctgcaagaagggcttgagggcccggtcaaacatggcaggcgtgctgagtaccaggaaggccagggtaggtcctggcagcggtaggtggaaggctggaggcaagagttcattgtaccatgccacctggaaggggtaaacctcgaagccaaaaggacatagcgtgtcctcgatcttctgcttcagctctgcgactttcggctccatagcg

SEQ ID NO: 323717 - DNA, 1017 bp, Homo Sapiens
gggtgggatgaggggtgcaaaagtgcgggcgcgagaacggccaacaccgggaaaagagaagctttgttggatcgccgtgtttccggccagcgaaagattccatgatttcggttctggcggaacgtaccatggtttatacctgccgccatgttagccccgggtgaaaccggttctggttagcttaattccccccattgtcgccggattagtttccgcaatgggtggaaggtcccccccaagtgttggcgaccaaaggatcccggggtttttgcccacgtttttgccgaaggtagcttttcggtcctcaggcaccaaaggcatggcccagttcgttcactctgtgccccagaggtcttcattttcagagccttttcgtaagcctaccttccggtgtagccgtctgtaaagatcccgtatagtcctacccaatgcaaaagctgaaagctcttttgtaaagtgtattttcaatcgggaaaagtgatttgttacatccaatacagccctgaaactgttatagacagctgaaaaggtagcatccatcatcatactgacagaggcaaatgcatgcacaatactttcaatggactgaaatgcacccctgctgctttcttcagcttgctgaacaaatctactgggtggaagatcatctacacggaggcggttgtagcccagcccattatatccataactataaggactatagcctccataaaatgaatttccataggcaccatatccagaagaaaatgaactgtaagcaggtctaaaagtgttcacactgctacttcctgtctgctgtgatggccttggaagaataggtgggggcactctggtaagtgctggttgtccaggtcttgtcattaaagtaggacccaaatcagcagattggaaagtggggcccggtcctggtcccggtccggctcccggaattcggcgggtctcccagggtttggggggaggtggcggctgggacgccatctcctccgcctcctctcggctcccgctcctacccctccc

SEQ ID NO: 323718 - DNA, 566 bp, Homo Sapiens
  misc_feature (144)..(248): n is a, c, g, or t
  misc_feature (280)..(292): n is a, c, g, or t
  misc_feature (362)..(396): n is a, c, g, or t
  misc_feature (404)..(518): n is a, c, g, or t
gggggggaaatcccaaccccttttttcttgcccgggtttttcttgggaaccggttttggccccgggtcccctttcctagggggcccgggcccccaaagaaaggttttgaaaagtttttggagggcaaggcggccccacaaaaannnnnnnnnnnnnnnnnnnnnnnnnnnnnnnnnnnnnnnnnnnnnnnnnnnnnnnnnnnnnnnnnnnnnnnnnnnnnnnnnnnnnnnnnnnnnnnnnnnnnnnnnggcagagctagctgaggttttattttggaccnnnnnnnnnnnnngcaattgaattgttttgtagctggaggcatgggcaaggggggttgttgctttgagggaagttacgcttannnnnnnnnnnnnnnnnnnnnnnnnnnnnnnnnnnctggagannnnnnnnnnnnnnnnnnnnnnnnnnnnnnnnnnnnnnnnnnnnnnnnnnnnnnnnnnnnnnnnnnnnnnnnnnnnnnnnnnnnnnnnnnnnnnnnnnnnnnnnnnnnnnnnnnnccggccgtaatggccgaattcccgggcatatgtccggtaccgtcgact

SEQ ID NO: 323719 - DNA, 1157 bp, Homo Sapiens
  misc_feature (116)..(136): n is a, c, g, or t
  misc_feature (138)..(138): n is a, c, g, or t
  misc_feature (142)..(142): n is a, c, g, or t
aaagccagcttattgcgcccaggtttcactttaccctaccggggccccgcggcggccaaaacgaaatggtcctagaaagtttcttggaggggccgaggcggcccgacatgtttttnnnnnnnnnnnnnnnnnnnnntnttantgggaagtcaggatttattaagaacatcgggatcccagatatttctttttttaccatataccttaacatttgggggattttgattcccacaaaaacctctatcatttaaaaccagatattcgaattacaaggctaacatttttagctaatcaactcttcagtgctgatcccagaaaatagcctccaatgggtctttgagtcatggaaatggacaactttcagccattgacatgagtggtgtcggtggtcacacctttaacattcaagccacaagctctaaagtctggaaagggtgaggtctactgtcctgcattgtcgccatctgctgtcgtattttcagtgctaatggactgtacgttgtctgcaaggttgtgtgcatgctcaagaaacaaatctttgagtacacttaattccttggtcagcaatttgatttttgcttccaaccgttcattctcttctttgagctgattgactctctgcagtgtgtcttgtgctttctgcttgcttttcaaccggctctttttcacagccatgttgttcctctctcggcgttgccgatactcgtcactgtttcgatccatgggcgaactctttttgctctgcttgctgggagccacagctttgcctcctcccccagggccagcaggcaccagctgaggaacctgctgtaagccgctggcatgtgcctgggtatggataacactaattccgttcacccctggagtgctgttttgcggcgatatcttgctcatttgggcactctcccttgccaacacagaacaggtagaaatgagagcagggtggtcaatggtttccacgctaagctgccaaaaaatcttcacatgtacctgctcctctagcccgcctgcccccaggcggcctccactccgagcggccccgcgcggtgcggcccgagccgacccaggcctcacagcccgcgagtcagcgaggaggagcgacggttacgaaaccggcagcctccgcccgttccgcagccgcggccaccggcttcccc

SEQ ID NO: 323720 - DNA, 605 bp, Homo Sapiens
  misc_feature (281)..(290): n is a, c, g, or t
  misc_feature (529)..(529): n is a, c, g, or t
  misc_feature (536)..(536): n is a, c, g, or t
  misc_feature (559)..(559): n is a, c, g, or t
  misc_feature (594)..(594): n is a, c, g, or t
cacagtacacagcagttatttatttaaatacttgaaaaggctgatgatggaaaaaataggtttatcatgagagtttatattcattagatttattttatcatttaaaaaattactgcctctaggttatcctagcctgatatagaacacttggtgacacatgcagttactgtaatatactataacagacacagccattatagaatgatttacacttgggatgaaattcaacagtagtaagggtgactctttatttaaactaaaaacattggtaatatacaaannnnnnnnnnatttcattgaaagggctataaaattcaacatactgacaaggaagcaacataatcacatagataacgcctctgctaattgcttttacctaacttcacccttaaaggtgagctgcacactcagctacacaagtttctagactgtgcgatggcttcaaggctggcctaccacaactgactgaaaaaatgtcatgttgggtaagctgacactgacttgtatgtttttaaaaatggagagacantggcaanttgtaccttatgtccttatagancccaaaggatcattctgagtaaatgtggaaataanttaaagtgatc

SEQ ID NO: 323721 - DNA, 952 bp, Homo Sapiens; identical to SEQ ID NO: 137967
  misc_feature (393)..(408): n is a, c, g, or t

SEQ ID NO: 323722 - DNA, 546 bp, Homo Sapiens; identical to SEQ ID NO: 137968

SEQ ID NO: 323723 - DNA, 745 bp, Homo Sapiens; identical to SEQ ID NO: 150729
  misc_feature (158)..(252): n is a, c, g, or t
  misc_feature (257)..(258): n is a, c, g, or t
  misc_feature (261)..(341): n is a, c, g, or t
  misc_feature (344)..(392): n is a, c, g, or t
  misc_feature (396)..(397): n is a, c, g, or t
  misc_feature (399)..(403): n is a, c, g, or t

SEQ ID NO: 323724 - DNA, 408 bp, Homo Sapiens
acacggctaatattctataaaggagagggaaaggagcctgaagcagttgattccagttcacgagcgctctcggtagctcaggaaagcgacatagtctctagcacttagtccctctcctacaatgcaaagcaaaaaagactgtggctccaggactctctgtgggcggaatcggcactaaggagttggtgcaattattttgttgcaaggtaggaagccaaaaagcctgcatgcaacagactggcatgaataaatgtatgtttccccctcccttctgcaagaagggagctggtaatggcaggagttcctccagtgcagactcttaaagagcgtgcaagaactagagacccgacagcgaaacaggcctcttcccctcacacacagtttctcttgctgcagcttagagcaccc

SEQ ID NO: 323725 - DNA, 476 bp, Homo Sapiens
  misc_feature (62)..(123): n is a, c, g, or t
acatgaggggttggggcgaacgtagggcgaggggagcgttttatttttgtaaactatatctnnnnnnnnnnnnnnnnnnnnnnnnnnnnnnnnnnnnnnnnnnnnnnnnnnnnnnnnnnnnnntacagatgacaggttctgtagttatggtactgaactgagcttcctgtcagccaaaactagaagggaaacatgaccaccacctgacttgttgcagaggctttagatctgagcacttggatctgaaaacagtttctctttagatgccttcaaataagggacagtatccttgatgacaatacagtacatacattcacaattctccaagaccatctctgtgtatatcaaggttaacctggatgaatatttctgcagcaggcatggggtaggcaggcaatatgaccaaatatgtagtttggaggctcaaatgaaacaggagaaagagctcaggaaccatgaagcatggtgcaggtacc

SEQ ID NO: 323726 - DNA, 609 bp, Homo Sapiens
ccttttttctttcttcttgggaggctcacgttctccgagcatatttttcggacaggcataacttaagtgtccactttccccacattcataacacttagatttatcaaagtagtttcgccttcggatgaactcagctgctcttccattgtcaatagcaatgcttgcttttatcactctaccaaataactgtttgttgtttattgccctggtacagttttgtgcagagtctttatccaaaaataaaataaatgcaacccctttactcttcctggtatctttatctttcatgatggtaacctttacaactttgccatacttggaaaatatccggtacaagtcattgtttgtcagggaaaaaggcaagttggatacatacactgtgctcttacttggagccaatccaccactcatttcttcaggtgggttgggcctgggagaccagaagagtgcgagccctcggctcagctggggctcaaccccgactcttcgtagccgctcgcagcggccttggcatcacgagtcctgggaggggtcaggcgcggagagcagataatagcagccacggtgcttcttcccggctgtttgagatccgggccccgaaggcggccc

SEQ ID NO: 323727 - DNA, 847 bp, Homo Sapiens
  misc_feature (26)..(26): n is a, c, g, or t
ggcggggcgcgacacaaagaaatacnggaaatatcatgcgggtcttgtatttttgtgggctgaagagccagttattttattaaccagccatgccttgatttctggggggaaggcaagaccttgaaaccctgggttcattccgtactcttcagggggccagcctgtttaagggatagcaggcctgcaaggtctatctctttaaactcccacttgtgtgtacacccttggtgatgtcattgtacctgccttcaggggggttggtagttagggatcggtggtgtgtaatgtggcccttccttctcaaaggggaacaggttaggatcccgcttgatggcctcagcatggagcttcggggattccagttgcagttcctccagagcttcctgctgggcttctagcatagccctgatggtgtccctctccatcttacgctcttgctgcttgtacaaggaccacttcttcagaagcagagctctcctctcagtctcctcaaaggtgagctccacctgaggccgctctcttgctttatccaagaactttagaggggtaataaaatcttcaataggaattagctcttgagtagccttttccagttttcggatcttccttttcaagcgctcctttgcttcttggtcttttttaggatctaccttcttcttttttcgaagaggttctgatctcatgggaatgagttcccagaaagacaacaatgacgctcgctggtgagtctctctaagctgcgtctgccaagttcccagaagcccgctagtcgggcgcagggctagcgagatacttcgcagcacggaggccgtcatggctaccctcgccgcttccgggcgtgcgcccc

SEQ ID NO: 323728 - DNA, 399 bp, Homo Sapiens
aaaccagtatttattaacagcatgcctgattctgtggaaagcagacttgaaccctggtcattcctactctcaggggcagcatgttaaggatagcagcctgcaagtctatctcttaaactccacttgtgtgtacaccttggtgatgtcattgtacctgccttcagggggttggtagttagggatcggtggtgtgtaatgtggcccttccttctcaaaggggaacaggttaggatcccgcttgatggcctcagcatgggagcttcggggattccagttgcagttcctccagagcttccctgctgggcttctagcatagccctgatgggtgtccctctccatcttacggctcttgctgcttgtacaagggaccacttttttcagaagcagagctctcctccc

SEQ ID NO: 323729 - DNA, 399 bp, Homo Sapiens
  misc_feature (17)..(17): n is a, c, g, or t
  misc_feature (340)..(340): n is a, c, g, or t
tgtaacaaggaccaacntccttcagaaaacagagctcctccctcctcaagtcctccctcaaaaggtgaagctcccacctgaaggcccgctctcttgcctttatcccaagaactttaagaggggtaaataaaatcttcaataggaattagctcttgagtagccttttcccagttttcggatcttccttttcaagcgctcctttgcttcttggtcttttttaggatctaccttcttcttttttcgaagaggttctgatctcatgggaatgagttcccagaaagacaacaatgacgctcgctggtgagtctctctaagctgcgtctgccaagttcccagaaanccgctagtcgggcgcagggctggcgagatacttcgcagcacggaggccgtcatggctac

SEQ ID NO: 323730 - DNA, 1020 bp, Homo Sapiens
tttggctcatttctgagcaatgcaacactgtcttgcgtccctcgttagttattatccttgcacagcacaaaatgtaaaccgcgtagtggatattgctgtaaaagccttagaactcggatgcttttcttgattctgaataatgttaattttgcgtgttgaccaaccaggtcgtccacgtggacaaaacacctgtcttctgaccagaacttgtcctgaagatgatgctcagcgacagtggagaccaaagcttcgcgggcagcttcttcacttgatccacgaggcttcgccacccggtgtctgccagaagtgactccagattctgccttttgacgtttcaagggctttcaaaagatgggttaagtttcttccgaggagcagagagcaagcactcgcggttctttggatgagtcagcagatactcaatgtagaccaatgccaattcaggtttgactgggcgtgtgtcatggatctgcaccctacctttagaagctgtgttgctcttggcctgggcatgctctgtgggcagccagttgtcaacaagctccagaatgtgccccacctgcccccaggagcagaggcaatccaacaaagtgcagtagctcttgtccacagcgccctcctcccggcttctcagcgtggaaatcacaccacagctgaatggggggacagcagaggccggcataaaggacattagcatgaataaagggatcttgcagcgatcatccttaaatactttcagatactctggaagcacagaggcaaacttgttaatcgtgtaaagtttggcctctttattattttccatacttctgtcaatacttttccagagaatcacaatgatttctagtaaacctgccatgcatgcaacatcgtttactgacagtgttttgtccagaacagtcacattctccttctcccttccgtcctcttcctcctcgtcctctggaggctcttcggacgcgtggtcgacgatatcccgggattccggaccgttaacccaagtccctgtctttttatctc

SEQ ID NO: 323731 - DNA, 717 bp, Homo Sapiens
acaagaaataaaattaaaatgaaaaacatgtttttcgcatgtaattctgattttaatttccataaaattaactctacaaagatttctcaaagaaatctgaccgccttcaaactacatgtttgttttgtattacatgtaatagatttccacatatgaaaaaatcataaaatgaaggctacgttttccaaccgctatttaagtactgtttagaaactatcgttgaatgaatgaacctgattttgcctcatcgtgtttatctaaaagagtctttgaaagatatttattttccattttctttacacggtccctctttttcaatctgtaaataaaaattaatgagcaatttaggacacaatatcacaacacaattattctgtaattgatctgataaccaaagacacataagaataggatgatctataggatagatgtttccacacagcatttgtctgaaatcagattattttaaatgatgccttgacttttgaattcaattctagaaccaattatcctaaactaaatcagagtattacaaatgaagatattccaacacaaagacttgtaggattttgtttagattgtcaatggttgattcatccaaattttcttcattgtcatccatggtgtgccagacttcagggacaggagacggtatcagatgcagaactggaacacctcttcttaaaaatggaatatggtcatcctgaatcacacccc

SEQ ID NO: 323732 - DNA, 494 bp, Homo Sapiens
acatgggtgtattttttggttgatggtgtttgttttcttaccacaaaaaaaagtctatatttttatattggggggagggagtagaaaagcaagcccctatactgggccctattcagtggcagcttcttgttccataggattaaggaagactctgaggaaataaaagttgtttggaaaaatccaggtgtagttgctttgtatgttgtgatgggtagaagggatgaagtgaagtgtgaaggcccctcataccctccatcttgcctcagactatgtcctggaaccctggggcggagaaagcgccactttcattcctgcttcttgggattgttgacggccacgtagtgatagagaacgacaagcaagaagagcgacacgcccagcatgttggcgaagatggcgagctgcacgtccgtgatcatcctgaccagtccggctcggctccgacgccaccagcgaacaagcccgaagtcagagccctggaccggaacttcccc

SEQ ID NO: 323733 - DNA, 698 bp, Homo Sapiens
aattattttttggaataagcaaatcaaaagggacatttcaaacttttttctcctgtgccacatttatgggatcgcagtcctacatgaacaatgtttatgcttgaattaaatatttttccaaaaacatcatatttatggcctctctccatacttttaaggttgtcttgattatctcggagccacattttgggattatctagccagacttccaagaaaaccagattgctatagttctccaacatcacatctctgtacaagttcttctgagtagggattaagtaggctgccattcctccaggcgtgaaatccacagccacatcctcaaatgatatctgtgactgggatcattttccgctgctcttgggaaatctgctgttttgtgacttctcttagtcctgacaccctggagtggcctctggtcagtggtctgtaaactgagaatacatccttggtcttgtgggctcttctttcttatctcacatgaattgtcttgttccagagggctattgcactttacatttcttcactgcccatggaccaggccacttagatgaagccagacacggaatcagagccaaagaactgaaggacacgcagctgcacagggacgctctttccttcatcagaatgagtccctcggacctcgcagggccgcggcggacacggcccgatcggggacgtgaacgcgcagaactccc

SEQ ID NO: 323734 - DNA, 513 bp, Homo Sapiens
  misc_feature (502)..(502): n is a, c, g, or t
gaagcaatttttatatactttttattatttagcaatacatgtttatcatagaaatttaagaacctaagtaatacaaagaaagtaaggattacctttaattaagaacctaagtaatacaaagaaagtaaggattacctttaatcaataaacaaagataaacttttggagggagcatataccattccagtcactaagtaaggttttaatattcagattccagaattctgatcaatcaatggctatgtttcacacttctttaaattaaaaaattttctatctttacatattttagtgactgaattaccatggcgtaattgagagtttggatttattatggtacattccgatttctatttaatacataaggtacctgattaaaattttagcctatttggttaaatactaacaatacaggttgctattactcttgtcttactaccaattaggacatttctcaggaatgctaaggcaggaggggaccttaaaaacttatctgggccgngcccagtggct

SEQ ID NO: 323735 - DNA, 112 bp, Homo Sapiens
  misc_feature (57)..(57): n is a, c, g, or t
atgagccactgggcgcggccagataagtttttaaggttccttcttgctttagcattnctgagaaatgtctaattgggtagtaagacaagagtaatagcaacctgtattgtta

SEQ ID NO: 323736 - DNA, 1172 bp, Homo Sapiens
tataataacattctttaatgaagatataaactcatcaagtaaattacaaaggaaacaaaaataacaaggacaaaattacatagtttgatacctcctgagacataattaaattcttctcaaagtttagctgaacaactaactatacagtaatattttcaaaaacctgtttgttttatacaaaagaatataccctaacacagtagagtctcataatgccttggcgaaacaccaatttgatgctttaagattttaatgtattgttaacaaattttcaaactcagggcaagtttaggaaatgtcttcatattgaattccttcaactctgcgtccttttaaggggccagtttcaatgacgatagtagctgaaaaagtcttctcattgatggattctagggtaccttcatttcctctgtagcctccatttaaaactagaattctttttcctggtgctggaattactgtctctaaatgagtctggtcaagtttcagcttgtctccagaatcaatcatcttcacaacagctgtatatttgtcaattacttccttaacaatagcctttttcttatgatatttctctcccagtttcttggttataattttcacaataatttcaggctgtagccagtagtctgttcgggcagttcttttcttttcctcttcaatctccatgatttcatccagtgcagatttctttttcttcttttctttagactgagttgagctctgggaagattcttttcgtttcactgatgctgaacttcctatcgtcttcagtgcactcggtccccagagtacttgacttggaagatgttgctccgggatgagctacatgctcctttactcaaattaaaacgtgactttctcttcatcattttctctgcttaattccgtaaaagtaggggacctcctgttccttcccttccagccctcttctcacttgctcttcaataaatttggcagttttttcttcatcatcaaggtcctgctttttctttttctccagttccagttgccggcggatagtttctgggtccctgtctatgtactgaatataccagccttttggtgtctcgtccactttgcacaagccttctctgcccagccacttagtaagatcagtcagagtttcccactgagtggcattcatgtggatgtgctctcggtggctgacc

SEQ ID NO: 323737 - DNA, 707 bp, Homo Sapiens
  misc_feature (41)..(51): n is a, c, g, or t
  misc_feature (76)..(91): n is a, c, g, or t
  misc_feature (100)..(103): n is a, c, g, or t
  misc_feature (105)..(242): n is a, c, g, or t
gaggaacaaattagcaccctttttctttttccttggggggnnnnnnnnnnnaaaaaaatttttaaaaatttttttnnnnnnnnnnnnnnnnccaacaaannnntnnnnnnnnnnnnnnnnnnnnnnnnnnnnnnnnnnnnnnnnnnnnnnnnnnnnnnnnnnnnnnnnnnnnnnnnnnnnnnnnnnnnnnnnnnnnnnnnnnnnnnnnnnnnnnnnnnnnnnnnnnnnnnnnnnnnnnnnnncatggtgtagtttttattgctcttaaagacttggtgttgagaagcacaagctaagctgtgagatgggaaggaaaccagatgaggtgtgacccctgcgcctgggcctccgtctccactctaacctaggggctgcccagctccgccatggctcagtgcagaatttatacattatatattaatttcaaagggagggaacttctatgggaaacaataacaattaaatcataaaagatctaaatttgcattttccagggtcacatatgtgcatgggtcgtacccttcagcttttttccttaaagattttgcagggtgttaggtgaggtcaggtgaatgggcatgggatcttaaacacacatggggaggacgggatgaggcagcgtgcgggccatgaggggaagggtgcagggagaatctctggggggtgctcagccaggggggagcgcatgcccctggccccacaggcac

SEQ ID NO: 323738 - DNA, 468 bp, Homo Sapiens
  misc_feature (21)..(21): n is a, c, g, or t
agcacggctctctgaggggtngaaggggcagaccaacgaaaccagatgagaccaacgacaccatgcgagacacgcttgcagacactgttgttttggaaatgtgcttccctccatctgaaatctcatccctccacccgcccactcggcaggctgtgctgtgggcagggcatgcgctcccctggctgagcaccccagagattctcctgcaccttcctcatgccgcacgctgctcatccgtctccatgtgtgtttagatccatgccattcactgactcactaacacctgcaaaatctttaaggaaaaaagctgaagggtacgaccatgcacatatgtgacctgggaaaatgcaaatttagatcttttatggatttaattgttatttgtttcccataggaagtttccctccctttggaaatttaatatattatgtataaattctggcactgaggcctgggggagtggggcag

SEQ ID NO: 323739 - DNA, 494 bp, Homo Sapiens
  misc_feature (14)..(14): n is a, c, g, or t
  misc_feature (31)..(31): n is a, c, g, or t
  misc_feature (37)..(37): n is a, c, g, or t
  misc_feature (43)..(43): n is a, c, g, or t
actcctaaccctangggcctgcccccaagtncccccnaggccncaatgccagaattttaataccattaataataattaaatttccaaaggggagggaaaccttcctatggggaaaaccaaataaacaattaaaatccataaaaaagatcctaaaatttgccattttcccccggtccacatatgtgccatggtccgtaccccttccagcttttttcccttaaagattttgccaggtgttaagtgagtccagtgaatggcatggatctaaacacacatggagacggatgagcagcgtgcggcatgaggaaggtgcaggagaatctctggggtgctcagccaggggagcgcatgccctgccccacagcacaggctgccgagtgggcgggtggagggatgagatttcagatggagggaagcacatttccaaaacaacagtgtctgcaagcgtgtctcgcatggtgtcgttggtctcatctggtttcgttggtctgccc

SEQ ID NO: 323740 - DNA, 500 bp, Homo Sapiens
tgtgttaagaaatattagttttatttaaccagttttcacagctgaatatttattctataaaaactttacagattgtacagtttatatatagttcaaactactgaacgaaaaggtaggtcccacagatgcaaaaatactgtaccaatcaatccaagataaaggcagatttacacactgtacagctctccgcgtggccggggaggtggtcagttctaagtataaacttcaaaactgtacaaaaataagaatttgatttcgctcttcatacattcaatatgattgcaagctcagaagcctaactaataataggcatctggagtctggaatcagtacccactcctggaaggagtgcacatgtctatccacacagggcactcttggacaccatactgaactcagtatattgtatagacataaaagcagagggccaagaacattaaatgttgaatataaggtagttctttttgttttgaaaggagtttttgcatttaatagtgtcc

SEQ ID NO: 323741 - DNA, 1017 bp, Homo Sapiens
  misc_feature (679)..(691): n is a, c, g, or t
gaacaagacgagaaagcaatgaatggcaatctctctaatatgtatgaagttcttaataataatgaagaaagcttaacctgtggaatcgaacaacacactggtgaaaatgtctcccgaagaaatggaaatctgacagctttttaaggtgtaattaaaggttaatctgtgattgttatgaagtgaatttgaatatcatcagaatgtgtctgaaaaaacattgtcctcaaataatgttctttaaaggcaatctttttaaagatttcactaatttggaccaagaaattacttttcttgtatttaaacaaacaatggtagctcactaaaatgacctcagcacatgacgatttctattaacattttattgttgtagaagtattttacattttcatcccttctccaaaagccgaatgcactaatgacagttttaagtctatgaaaatgctttattttttcattggtgatgaaagtctgaaatgtgcatttgtcatccccactccatcaatccctgaccatgtaaggcttttttattttaaaaaaacagagttatcccaatacattatcctgtgatttaccttacctacaaaagtggctcctgtttgtttgatgatgattggttttatttttgaaatatttattaagggaaaactaagttactgaatgaaggaacctctttcttacnnnnnnnnnnnnngggcagaaatcaccccaaggaacgatttctcaggttgagatgatcaccgtgaatccggcttcctctgagcattcgatggccttagcacctcatcaagccagcacatcctgcctgctgttgcagcctggctgggtttattcttcagttaccctaatcccatgatgcctggaaccttgattaccgttttacatcagctcttgtacttttcagtatattttcataatgagttatattgtcatttagactttgaacagctctgggaaatagaagactagggttgtttcttaaagtttagctcatgttataataaaaagttgaaatgaaga

SEQ ID NO: 323742 - DNA, 624 bp, Homo Sapiens
  misc_feature (13)..(13): n is a, c, g, or t
  misc_feature (360)..(469): n is a, c, g, or t
  misc_feature (471)..(471): n is a, c, g, or t
  misc_feature (475)..(475): n is a, c, g, or t
  misc_feature (477)..(479): n is a, c, g, or t
  misc_feature (481)..(481): n is a, c, g, or t
  misc_feature (487)..(487): n is a, c, g, or t
  misc_feature (493)..(540): n is a, c, g, or t
gcctataatgtcnggctgtaatatatttgccacagtagatgcctagggatcattctgagcctcagggtcccagactttatcccttaatccccagaattttgtgttacgtttttaccctccctaacatatgacacttcatcttatattaaggaaggtttagaatatctaatacgacttgaattcatttgttactaagccttctcaggcaagctgtatactagttactggtctccactgccatgccttttcaaggttcccatggtccagagtgatgtttgattcttaatttttctgtcccttttataatttgttttaatgattttgctacatttggaattcaataaaaaatgtgaacaatannnnnnnnnnnnnnnnnnnnnnnnnnnnnnnnnnnnnnnnnnnnnnnnnnnnnnnnnnnnnnnnnnnnnnnnnnnnnnnnnnnnnnnnnnnnnnnnnnnnnnnnnnnnnnanaacnannncnaaaaanaaaggnnnnnnnnnnnnnnnnnnnnnnnnnnnnnnnnnnnnnnnnnnnnnnnncctagtagccaattccccccggagaattggcaccctatcaaaaacagacccggggtaacatccctggggtttgagatcttccgc

SEQ ID NO: 323743 - DNA, 557 bp, Homo Sapiens; identical to SEQ ID NO: 152186
  misc_feature (164)..(165): n is a, c, g, or t
  misc_feature (167)..(167): n is a, c, g, or t

SEQ ID NO: 323744 - DNA, 469 bp, Homo Sapiens
  misc_feature (82)..(99): n is a, c, g, or t
  misc_feature (451)..(451): n is a, c, g, or t
tttaagaatcaaattaatactttattatcaaacactatgtacaacagaggttgctaataatacagaatttaaagaacgcagnnnnnnnnnnnnnnnnnnaatgttttacttttctttcctctgccacccaagaaagtacagtacaaaacaatagtctaaactaacacgaactgttacctggtctattaaaggatacacggtatccactaaacagacagatccttatttccctgcttgatgttgcaaagcccttggcaaccaggggcaaaggtcactggggtttgactaactggggctgagtggcagctatgactgtccttcagatttttgagttgtttttgaaattaaaagcttctaaaagttgcatcaacatcctcctaaggcccccagagggattgtaacaccaccacaaaagggccaccaacactttttttaaacaaagtggaaaacntgtctggacaccaatcat

SEQ ID NO: 323745 - DNA, 960 bp, Homo Sapiens; identical to SEQ ID NO: 150760
  misc_feature (444)..(453): n is a, c, g, or t
  misc_feature (483)..(483): n is a, c, g, or t
  misc_feature (510)..(524): n is a, c, g, or t
  misc_feature (553)..(553): n is a, c, g, or t
  misc_feature (555)..(555): n is a, c, g, or t

SEQ ID NO: 323746 - DNA, 791 bp, Homo Sapiens; identical to SEQ ID NO: 63037
  misc_feature (617)..(633): n is a, c, g, or t
  misc_feature (635)..(642): n is a, c, g, or t

SEQ ID NO: 323747 - DNA, 1276 bp, Homo Sapiens
catgccaagagtcccagcttttatactagaagcctaagctttgccatatttatatatatcaagcatggggcgcatctttaaatcagcagtacaaaattatatactctaggtttttgccagcaagtccaaccttgaaatgatttcctgcttttctggtcaagtcaggcttgtagcatttcatgtttgggaagacagtctaacacacaggatactacccacaccttcctcagttcttgctatcatattacatcaccagaaagtaatatatctggacattagcttatgtccttagataaaaatgccctacactgtttcacacaaagttataatcttggattttatcaagattcaatataagaaatgaccatatggggaaaaggcaagccaatagtataaatatttcaaagacaaatcctaaatgtcatcataacaaaagtgtgatttatttcctgagatcttccttactctagatttatttataagttagttacgttaaaatcagtttttcccaaccagcatacataaggtgttgtacaagctccctcagctggttaagatatagaactaccaaaacacatgttccattaggttgactgcgtcatcctcttcagaaatttctgtaactgcagcctgagatcgaagaatagacgtgatgtcattagataatttgtcaaagccattctgtgaacatatatttgccacttcttgccacttttctatggagcaaaaggaatcatttatcataagactttctactgcatctatcccacctttattgatttcttgaagtagcttaatgccagcttttttcatgtctacagagaacagatgaagtatagcaagaccaaaagataaagatggttgtttctcattcaactctttagtgagacactgaattaattcaacttggggacatgacattaatagctgcaacaggtcatcggtagtaaagtccttcaactgctgtatgtactccatgaccctatgagtctgaccctgtttacacaagcaaagaatagctttcttgtgcaggccacattcactgtagataatctgagctaaagccaggcacttggccttgttataagtatcctgctccccataatcacaaatcacatccccagcctcctcagaaaatgtcagtccttaaatgtattcattgtaccaatgtttcgaagaattcgtctaggactgtttgctgcataacaagctgccttttcatattcaccaagtgagattaactcattaaacctgagtccctttctccaaacacccc

SEQ ID NO: 323748 - DNA, 692 bp, Homo Sapiens
  misc_feature (172)..(176): n is a, c, g, or t
  misc_feature (178)..(178): n is a, c, g, or t
  misc_feature (186)..(186): n is a, c, g, or t
  misc_feature (191)..(191): n is a, c, g, or t
  misc_feature (193)..(193): n is a, c, g, or t
  misc_feature (195)..(195): n is a, c, g, or t
attgtgtggggggggaattctcaagccccctttatttcgtgggccccggggtttttcctttgggaaacccaggtatagggcccaggtttccccttacccttaggggggcccccggcgccaaaagaaatggtttaaaaaaattttttggagggccgaagggggccgccaaaannnnntnccccaccngccgncngnggcggaatcaagattttactgggcaacttcatactgccagagtggttgggaccagcagctccactccccactgtaggccaagtagggctaaggcaaagtcagacaccccccctaagatggctatctctctgctcccagaccacgtgtgatgaggcaggatgggcagctcaggtggtgtctccattgaggcagggtgctttgaggggctggggttgactccaagacccccgcgtccttggagaaagctgcaggctctggacagcatccctcagctgagcctgagttctctccatctcatttaggcggtgctccaggtttttcagactgtgcccttcattgcttgttaggttgtgctctgaatcaaactctgagctcccagcacggagcctggagtccagatcctgcagctggccccgcagctgctcctgctgctccgtcaaggcccggatttgggtgctcagcgactccacgaggcgggacagcactttctgctcccc

SEQ ID NO: 323749 - DNA, 636 bp, Homo Sapiens
ttttgatgcaaatttgctagcttatgttctctgtctactagctgattctgtacttcttttctctgttcttctttctctattaattgggcaatacttttttcattttgttccttgagtgactcattcaactttttcactgtctcaatttgtttattcagagaatcacatgtgatctgtaaatctttattcttcttttcagtactttcatttctctgaagaagttccatgtaggattttgtcagtatttcatgttcttcagccacagactctaacttcctattatgttgaaagagatgctcaatatcactctgcgctctttctgattcaacttgctgcgccttcagcaacacactaagctcttcattttttctctcaacttctctcaacatactaggcaagtgtccgtgcctctgtttcagcttgagttctttgacagcgatgctgagcaatcagtctatcagcctgtgcaagggctagagcttttgtttccaaaagatcttgtagcctgctttctttggaagctaatgtggatagtttcatttcatatacatccattatgtcagatattctcacatcacaaatctgatcctttaccaccattccagactgaagtttctctattaattcttcaatacc

SEQ ID NO: 323750 - DNA, 373 bp, Homo Sapiens
atatggttcattaatgttttcttctattttttttaataacttcagaagtattgcccaattaatagagaaagaagaacagagaaaagaagtacagaatcagctagtagacagagaacataagctagcaagtaagtggcttcttatttaatacattttctatttttaatgtatttattttggaagccatgagtggttttgtttgcttttttattttcctccttattgttttaaactttaaatcatatttggaatggcttcccttttcttgagcataatgtttcacaaaagcagttcggtttaatcaagttgaaaaagtggtacgttttttaaatttaggagctataagaaattggccaggcacagtggctcactc

SEQ ID NO: 323751 - DNA, 725 bp, Homo Sapiens
caaaaatacaatctcttttttattaagaaatcctaatgactgaggtagatgatgctgttgtcagataccgaagtaatttggtttaagatatgaaaatgatgaaaccaagggaaagaaagcactgttttgaaattatcttcttttaaatttagatgcataattaagaatgcttccaatttaaggttctaagcacaaaatccagatatgtcatgttatggacttgcttcctgaagatgatatcagcagttgatagaaagaatccacactcttacagaacagcaaatcataaatggttgtctctgtgaagccagtagctttgcattcgatatttctatctgggctcattccaaatgttcaggatttggattcctgaaggcttcttcagcatttaactaattctttgttggctgaaggggctgggactgtttctccacacacaaactgatctttgtcataaatcacttttataatgagagagcagctaggacacgttgccacgtcttccccattctccaaatcttccttggtgatggagaagttatctccacatgggcagggatagaaatacgtctccgagtcctcgtcatattggaagtcctcgatttccacctcgtcatgaaacactgccatggtcagcgggggtggccgaaggggtaacgccccagcagtccgaggccagctccgagggtttaacttcgccggaaccggcctgggctcggcatccc

SEQ ID NO: 323752 - DNA, 958 bp, Homo Sapiens
ttttctagttttttaacataaagttttatgtatttaaaaaaaacagtctgaagtattgtacaatataagtgctgtcttaatacaaatcactggtggaaaggagcaggacataccctcagcaaaggtcatacaatagggggtaaaacgtttgtgttcttgagggagaagtttttgctctgtcctggggaggtcatggacacctccgccccgacagctgcctctgacttcttgggagcgtctaccagttgaggcagctgaacagtgtcagctccgtgctggagacagtcctgctgatcacctgaatgctgaacatgcttcgtggggctaacttttgttttctctgtagtctctttggtgatctcatcttttctgctcgagtgatgacagccttgaaccttgtccttccttgtctcagaggggaaaaaggaattggatttcctcagggtctggggcctgggctgtggcttgaggttccgagactgatgaatccaagcatgcttgagggcctggtccggggtcatgcgaagagaaggttcccataccaaacaccttctgagaaaagtcccaggaagctggtgtccataggttttcagcaaccatcgtgaggtccttggaatctgggtatctttttttccccctgttgttggttatatttttaggaaaacctttggaatcaaagaatgtctgtctcctggaggctgtctgaatgaaagccggctggcggcagacccagcacctccatgatgcaggccagctgctccacctcattctccccggggaacagggggtagcccgtgtacaactccgccgtgatgcagcccaggctccacatgtcaatggccacgtcgtaggggtggcccaggatcacttctggggatcggtagaaccggctttggatgtacgtgtatactgcggaggcaaagtaagagaaacctcgtgggacaaacttcttaccctc

SEQ ID NO: 323753 - DNA, 877 bp, Homo Sapiens
  misc_feature (142)..(206): n is a, c, g, or t
  misc_feature (222)..(233): n is a, c, g, or t
  misc_feature (240)..(284): n is a, c, g, or t
  misc_feature (360)..(361): n is a, c, g, or t
  misc_feature (363)..(364): n is a, c, g, or t
gggggatagcgggtgagtgaatcggcgagacggcgaggaacggacgctgtggggcggatggggtataacggcggcgaacgggggccgggcgcggcatacgaagggaaggcgggaaaacgcggaacggaaaacggaggcgaannnnnnnnnnnnnnnnnnnnnnnnnnnnnnnnnnnnnnnnnnnnnnnnnnnnnnnnnnnnnnnnntaggtattagaaaaannnnnnnnnnnncggcacnnnnnnnnnnnnnnnnnnnnnnnnnnnnnnnnnnnnnnnnnnnnntggaaaggaggagccgaaagggacgaacgggaaggcggaaacgggtgaaacggaagggaggggagtgggaagcgtnngnngttcgaaggggaaactggggcagttttattgacgatggcaatgtacaagactccacacctaggtatgtgcacgaggtaaggcctgagctcaggccttatgatcctcctcaggacccttgggggcaaacttctcctgcagtttcttccacatgcctttatctatttccttaagctcttccaaggtgtctgtggacaggatcagcttgtactcttccaacgacaggccactgaagctggtgtctctggggcgagggtacttgtgtttgtagtagtttgaatggagtcgcgctaagctctcgtacatctgatcacaggcctcaggctctgcaacctgggtattctctccctcccgaaaggcctgtgctacccgctgtcgcaggtaagcgcccaagtcccggccccgtttggtctcgtccactggccattcctcacagagcttaagaaaacgccggtaccggctggccgccatcttgggccccgcgtgttcccgccttagcgggaggagtcggcccc

SEQ ID NO: 323754 - DNA, 580 bp, Homo Sapiens
atcttcctcttccacctttttccgggcaactttagcaggaccctttgcacccatcaaactttcctttcgacttatagtcagcaacatccttctcatacttctccttcagctttgccgccttagtgatgtaaggctgcttttcactgtcatttaaattattccacatctcacccagcttttttgccacgtctccaatagagatgccggggtttgtggatttgatcttggggcggaattctgaacagaacaggaagaatccagacggtggccttttgggagcattaggatccttcttcttcttgcctcccttagctggtccataatccttcatttcccgatcatagcgcactttatctgcctttgccatttcatcaaatttagatttctctttcccggacatcgtcttccacctctcagagcacttcttggaaaattccgcaaaattgacagggacctctgggtttttcttcttatgttcttctctgcatgtctgcacaaagaaggcataagcggacatcttgccctttggtttcttggggtcacctttagccatcctgactgtattgttcgctagtctccc

SEQ ID NO: 323755 - DNA, 475 bp, Homo Sapiens
  misc_feature (66)..(66): n is a, c, g, or t
  misc_feature (109)..(109): n is a, c, g, or t
ggacccacgtgataacgtgttaactgtacaaatgactgtaaaacgtgtgtttgaaacagtatgaantcagtgccccttgaaaaagaacagaaataaccgaatttttaangggaacaagggaagacaaacataaggtctgaactgcctgcggggttgggcaaaaaaagccatatttttcttcttgcagagaacctataaacagatgtgcaagtagggaagatatcgctaaattcttttcctagcaaggaatattaatattaataccgtgggaaaggaatgcattcctggggggaggcctataaatggccgctctgggaatgtctgtcttatggggttgagataaggactgagatacgccctggtctcctgcagtaccctcagaattactaggttggggcaaaactctgccctggtaaatttgtggtcagaccagttctctactctcgaaccctgttttctgttgtttaagatgttt

SEQ ID NO: 323756 - DNA, 846 bp, Homo Sapiens
  misc_feature (29)..(29): n is a, c, g, or t
  misc_feature (49)..(49): n is a, c, g, or t
  misc_feature (56)..(56): n is a, c, g, or t
  misc_feature (63)..(63): n is a, c, g, or t
  misc_feature (95)..(95): n is a, c, g, or t
  misc_feature (111)..(111): n is a, c, g, or t
  misc_feature (134)..(134): n is a, c, g, or t
  misc_feature (149)..(149): n is a, c, g, or t
aaaattcagggacccccgaaacggagggnaccggcctggaacccacggncacaggnaaccatnaaattgtggcaagattttcaaggcaccatttnatcagttccccaaatnaatacttttaataacttccttangccctgtctttactntaacctcttaatcctgttatcttcgtaagctgaggatgtacatcacctcaggaccactgtgataattgtgttaactgtacaagttgattgtaaaacatctgtgtttgaacaatatgaaatcagtgcatcttgaataagaacagaataacagcaatttttagggaacaaaggaagacaaccataaggtctgactgcctgtggggttgggcaaaaaccagccatatttttcttcttgcagagagcctataaaatggatgtgcaagtaggagagatattgctaaattcttttactagcaaggaatataaatattaatacccctgggaaaggaatgcaattcctgtggggaggtctataaacagccgctctgggaatgtctgtcttacgcggttgagataaggactgagatacgccctggtctcctgcagtaccctcaggcttactagggtggggaaaaactccgccctggtaaatttgtggtcacaccagttctctgctcttgaaccctgttttctgttatttaagatgtttattaagacaatatgtgcactgctgaacatagacccttatcagtagctctgcttttgccctttgccttgtgatctttgttggactcttataagtagttctgcttttgccctttgtcctgttccctcagaagcatgtgatctttgttagacccttactagtagttctgct

SEQ ID NO: 323757 - DNA, 521 bp, Homo Sapiens
tttttttaaattttacagctgggcctctgggggtgtcatcgcatattggtaggactgtgatggtgaccccgagccgcaaaaccagcaagtttttattagggattttaaaagaggagagggtgtacgaacagggagtaggtcacaaggatcacatgcttcaaagggcagtaaagatcacaaggcaaaggcaaaattagaattactgatgagggtctatgtcctgctgtgcacacattgtcttgataaacatcttcacaggaaacagggtttgagaacagagaaccactctgactagaatttacccggctggaatttcccaatcctaagtaagcctgagggtacttgcaggacaccagggcgtatttcaatccttatctcaaccggcataagaccaacacttcccagagcggccatctatagacctacccccaggaattgcattccttccccagggttcttccattgctggggaaaagaattcagcaatatttctcctacttggcacatccttctataggctt

SEQ ID NO: 323758 - DNA, 890 bp, Homo Sapiens
tttgcaattcagaagaactttaatgcatataccatcattgccactataatagagatagaagatacattaagaaaattcagtttgtatcaataaaacagatcaacacagaacaaggaaacaccatagatatttgtaaatgagatcttctcttttgctactgtatatatatattcctttatatttatacaaactcacaacacatgacatttcatatttcatatgccactgagaagaggtgtcagtatacagaacataggaagaagaaaaaagcatgagaacatctgcttagttagaatctgatgaggagagacgtgagagctattgttcctctctctgctcaggcctatcgagaggcaactgcagtttttgctaattgttcctcctgaggaattctgctcatactgctatggtacatctcctaggttggcatgagaccagcctggtccccagttgaataaattagaaagagcagttgggggaattgaatatgatatgcaaattgcataaggtgacatctctctgtgtggccacagagatagatcatctgctcctggctccttgatctgagggaagcctctgctgttcaaacctgctccccagggtttaattctgttggggttgtggggctgaacaaacaatgtgttccctttcccttcccttctctccccacaagcagaggaagtcatacgtaagacaaaacagatgtttaggttttctcttcagcaggcttcctcttgttcccctctatcacccccagataggtgaagttcagaattaggactgcccactgcggggggaacagaccctcccctgttctgagactaaccctgccatttactgccttctctatgtagtcttggataggttgcttcactgatgcaggcctcagt

SEQ ID NO: 323759 - DNA, 457 bp, Homo Sapiens
  misc_feature (280)..(375): n is a, c, g, or t
  misc_feature (396)..(396): n is a, c, g, or t
tatgcatttgcaaaggacactttatttcttgttaagggtgacagcctgcaaggtagccatccagcagcctgggaagagcagcctctggttaacaccagagacagacatttaggagcaggaggggtttgggcaggagctttatgctgaagaggttggctaaacatacatattcaacaggctacaggaggagctatgaatattcatgtaggtggttgcagtccatgcttattgaacaaacatgtgtggaacatatgatcccagccgggcatagtggctgatnnnnnnnnnnnnnnnnnnnnnnnnnnnnnnnnnnnnnnnnnnnnnnnnnnnnnnnnnnnnnnnnnnnnnnnnnnnnnnnnnnnnnnnnnnnnnnnnctactaaaactacaaaattanccaggtgtggtgatgcatgccttttactcgggaggctgaagcagaagaatcgcttaaactc

SEQ ID NO: 323760 - DNA, 825 bp, Homo Sapiens; identical to SEQ ID NO: 150670
  misc_feature (233)..(248): n is a, c, g, or t
  misc_feature (327)..(327): n is a, c, g, or t

SEQ ID NO: 323761 - DNA, 697 bp, Homo Sapiens
gggcattttgtctcctgtaacaatttacgcgccgtgtaactgtgaatctttcaaagcctcagttttatgaccctgtggagccagtggactttgaaggacttctgatgacacacctgaacagcctggatgtgcagcttgcccaggagctcggggacttcactgatgacgacttggacgtggtgttcacgacaaaggaatgtaggactttgcagccctctttgccggaggaaggggttgaactggaccctcatgtcagggactgtgttcagacctacatccgtgagtggctaatcgtgatccggaaaaaccaaggaagtccagaaatctgtggctttaaaaagactggatctcgaaaagattttcacaagacgcttccgaaacagacgtttgagtcggaaaccttggagtgcagtgaacccgctgctcaggcaggcccccgccacttaaacgtgctgtgcgacgtgtctgggaaaggccccgtcactgcctgtgactttgacctccgcagcctgcagcctgacaagcggctagaaaacctcctgcagcaagtgagtgccgaggactttgagaagcagaacgaggaggcccggaggaccaataggcaggccgagctctttgccctttacccatcagtggacgaggttcgagattgaaattgagcccctgtttgccagcattgccctctacgatgttaaaa

SEQ ID NO: 323762 - DNA, 1425 bp, Homo Sapiens
  misc_feature (129)..(160): n is a, c, g, or t
  misc_feature (199)..(207): n is a, c, g, or t
  misc_feature (541)..(560): n is a, c, g, or t
  misc_feature (575)..(576): n is a, c, g, or t
  misc_feature (578)..(578): n is a, c, g, or t
  misc_feature (725)..(725): n is a, c, g, or t
  misc_feature (727)..(727): n is a, c, g, or t
cacgtgtttctgcccacgcggaggggggtattttttatgggacggcgacccaggggcggggtataccccccggggcgggatagtggtctctcacacaacccccggtttggaggaggggttctcaccgcnnnnnnnnnnnnnnnnnnnnnnnnnnnnnnnncgcaacaccttctttcttcgggaaaaaaagccgcgaccnnnnnnnnnagaatattatatgatataagggcacccccgcttgggggaacccccgcttttgtggggatcccccataaaggggcgcccccaaaaaccccgccccttggggggttttgtttggcggcaccgatcggcgggttttgctcccccgcgggggcgttctttgttttttgtggggggggaggaaccgccgcgaaacgccgtttttgcttacggccggagagtgggttttccttttggggaggacgcctataatcgggcgctgtttttctcttcgttcttttgttgcggggccccgcgccgcccccgcaaaaagaggtggttttgagaaaacttgtttttnnnnnnnnnnnnnnnnnnnncgccaccaaaaaagnncngtatggacgggatttctgtatcaagggggcatcgggcgcgcgatctgttacgcttgtccgtggtgtgtttcgcttttattttggtcgtgcgtgttgcgtatccgctttttctgtcggggctttttgttccgggttgtgttgtttttntnttttgctgggaactgaatataaattaactttattacaaaaagcaaaatgttagtttctcattgtgagtgattcaagaaaacaacggtaacagccctggcaggagctgggaccaggataccagtatgcaggctgaggggtcaaaggccaggctcaggagcgggctgacaggcactgattcacaacctccaagaggtgggtgttctccagggcagctgccacccgctccttatctgcaagttgcttgttcactgcatgctctgaggcatgggtccccggagtaatgtgcacgtccatcttgaaacgctgaggaagggagcgcagaagcttgaccttgatggacagaccaataagggtggccatgctgcagtgcggaatggttggtgtgaaagccacagccactgtactctcggggtcgctaacctgaacccgcacctgctctactacgttcaactcctctagcgtcagtggatgctccgggtcattgatggagcgaatcagatcgaagatctcgcgtgcgtcgatgctgtcgggaacctgctcgtcctcctcgcctgccgtcacaggccgctccccagagcgctggtagatgagggggttggcattctccaggaggccgccgccgaccccgccgccgcctaccatcgcggaaccaccaccgctgatcctagcaggcgtgcgcttccgctccaaccccccc

SEQ ID NO: 323763 - DNA, 930 bp, Homo Sapiens
  misc_feature (205)..(205): n is a, c, g, or t
gggtaatacggcgcggggcacagcgcggtataatgaaggcggaacttaggcggggcggggcctaaagtacgcggcgacaaagccccgggcctcgggcgaactccgcgtaacgggaaaatggcaataagggggtagcacacgcggggcgggaagagaatccaggatataggttacgcggcggagaacgtggaccatgggcggaaantatgatcggacaggcgcacaaaggcgggaaggaaggcggggcgggggtgtatagtacgggggagagaggggaatggccaaatcgggttaagggcagggattccagcggtgcgtcataaggggaggggcggcggaaagggacaagggtacggcgttgggactgagcggcgcgccggggctggcaaggtccgaaaggtctaaaaaaagctttccacggggggccaaagccgctcggcaagaattgtttggggtgagcgttttgcgtctctagagaattcatgtgcagctgtaatggcttaagcaagaacatggtttccgtggctccccctggactgaatgctggaggatatatacttcacagtctgaggcctggtcccaggaactggcaatctaacaggatggcaagtggttttgaaacatatagattttcaggatggaagtttgattcttcagattgtgactcatccgtggaaaataaacggtttagcacctaaatctgtatattcccatcagtggcttggctgactcagttgtaaatagggtaccctccatctgtctcccacccatatgctccactgtccccagggccctcagtgcctgagccctagggggattcgagtttggctgcttggattcatttcctgcaagcaggcctgcaaggtgacctgtctctctaagatggagagctggagaactggcctgtaactgcaaacttaaactccctcc

SEQ ID NO: 323764 - DNA, 870 bp, Homo Sapiens
  misc_feature (748)..(748): n is a, c, g, or t
  misc_feature (751)..(751): n is a, c, g, or t
  misc_feature (808)..(808): n is a, c, g, or t
atagaaaataaaaactttatttttttcaagtttataagatagttcccattacatataacattacggtcacggattctacagccacaaatgcccgcagtcacataaatatatccaatccaatcaatgccttttcctgctaacagaggcatctgaagttcagagggagagtcgcattttgagtagaagtcgtccttaatgggagggctcctgtcagtgcattaggaactagccaaggagccttgcttgccagagctgtctgactcagaggagaggaagggacagatggcctgctgactggggctgaggcagaactagattttctctcttgtggtttaagatattttagaatctcggaattcagatcctatagtgtgaatatctggggagttctaacttctggatgaaaaaggaaaccaatttagtggtaagaaatagaagcctgcttaagagggaccctaactgcctccttgaggagtaaggagtcagaggaagaccctaagctcaccattccttggcccagaccattgctctaccccatactcctctcccctgtggttcagtgacactgacaaccattcaaggtagtaaacatctagaagctccacatgctgcagctagagtttgcaagtcagattctatttggaattttaaagctgagtttgtgtaaactgcgaacaagctgtggcatcagtctcttgggacaactcactagctttacagaagacaggaacgccgcaaatcaaacaanaanccagatgggcatctaaatctggagcaggtgtccattcttctggacactaccaggctnccaggggcactggacagggtgatgctaaggcacagtcagttttacattcgaaagtcaagccc

SEQ ID NO: 323765 - DNA, 653 bp, Homo Sapiens
ttctgcgacagccgcactttatttggagttttccacctaagcagctcccagctgagctgcatgacatgtgcaaaagtcccctagaaagctgggcctcgcagtgtgtaaaaaaggccccccatggggcagagccgtgcaaccattttaaaaaaagagacagtgagagagaaatcaggccccctgggagcctggcttgggtggagtgcacatcgctcaggccggtccatgtgccaggccactcctgctggttcgggggctgttttcttctctgattgtgctttcctttccaagtccttaaaactctggggttgtagccaccagagagaccagaccaagtcctcggggtcaggagggtatctggccggcggtgcagtttgagggtgacctcacacacagacacccacaacacaatgctcccccactgctcagccccgccagaaactcagggcttccctggcctcgcagccctcgccagccccttgtgtcccagcctctgcccctgagcctggccccagtcggccctcatgtcacattcccagggagggacactgtcctgacacagacaaggtcctccaacccctggggcgcggtggggtggggaggctgggcccggacgcgtgggtcgacgatatcccggaattccggaccgtacc

SEQ ID NO: 323766 - DNA, 1303 bp, Homo Sapiens
  misc_feature (82)..(82): n is a, c, g, or t
  misc_feature (262)..(262): n is a, c, g, or t
  misc_feature (288)..(322): n is a, c, g, or t
acagacacccacaacacaatgctcccccactgctcagccccgccagaaactccagggcttccctggcctcgcagccctcgcnagccccttgtgtcccagcctctgcccctgagcctggccccagtcggccctcaatgtcacatttcccagggagggacactgtcctgacacagacaaggtcctccaacccctggggcgcggtggggtggggaggctgggccttcacttcacccccaaggcaggtgtttgtagtgtctgattntgtgcgtgtctgggtgtggcacattnnnnnnnnnnnnnnnnnnnnnnnnnnnnnnnnnnngctggaggtgggggctgaggctggggaggcacttttgggattcaagggaccttgactttgaaggggcttccagggacactttcgtcaccccacttgacaatgaggatgtagtcccctttctccttgacagtgtaggtgacattgtacacccggttccccatgtgcttcacgtacacctcctcacagggggtcttgggccgtgcacgcccaccagtcaatcatgttggtgcctgctttgctgcagtccacggtgaaggagttcttctggcccacgaaggccttggacagcccagggccccgagtcaccaccttgctggcatctgaggagaacattggggatggagctgtagctggagccccggcttggaggaggacttggtcacagtctccaccagaaccgtggatgtttcgtgaaggttgtggcctccggacagcctcgggaccagtgaccttggccttgaaggggctgcccacgatgtgctgggggccaccgtacttgatggcaatgaggtagttgccaggggccatgggagtataagtgaccacatggccctcaggacactcccgacagtccagctgcaccttggaggggccatcaatggtgacagacaaggcccccgagccggcattcagggtgttcacgatgaactctgatgacacaccggtagtgcctccctcgagcccaggaccgtaggctgacaccaagcctgggtccccagcctggctctgctccccaacgcggatcttgaagggacttccagggatgtgggcaccgttgaacttgacatcgatggagtggacgccattctcgtgggggatgaagcggatggtgtgcttgtcactgtccagctcagagacgtagcactcctccacagcccccgagggtgtgtgcacccgggcatcaatcacgccccgggcaccgttcagctgcacggcaaaggcgacgcgtgggtcgacgatatcccaacttcgggaccggta

SEQ ID NO: 323767 - DNA, 521 bp, Homo Sapiens
  misc_feature (134)..(138): n is a, c, g, or t
  misc_feature (140)..(162): n is a, c, g, or t
ggggggattccagccctatccaaggcccgggttttcttagaaacaagtaaggcccaggtccctttccttccgggccccgggcgccaaaggaaggttttgaaaagcttttgagggccggggcggccgaccaggtnnnnntnnnnnnnnnnnnnnnnnnnnnnntaaatgtcaagaggtctttattgaaataatagcacagttacacttctaataccctttccacttgtatacaacagatgaaaaatgcttgctacatacagtgcacagacagttcaataatgagaactaatacaactgcatttgaaataaataaaatagcctatttaaataatttaaagtaaaattactgtacaatatgaaaataaagatacataaatgttagaatctacaaagctgtagaaataaaatcattattctgcattacacaaaacagtgcaagaaaaaaatccaaataagcttttggagtgcaaagtttaaatcttccccggccgtaatgggcactctgcgttgataccactccc

SEQ ID NO: 323768 - DNA, 839 bp, Homo Sapiens; identical to SEQ ID NO: 123444

SEQ ID NO: 323769 - DNA, 1099 bp, Homo Sapiens
  misc_feature (1011)..(1011): n is a, c, g, or t
  misc_feature (1020)..(1020): n is a, c, g, or t
  misc_feature (1078)..(1078): n is a, c, g, or t
  misc_feature (1083)..(1083): n is a, c, g, or t
ggggggcttccaggagttgtggacccaatcccccgcttatttgggaagagggtcttccccactgtttcgcgccccagaattggtcttttccattgacaatcttgcggtgcccgggttcccttccgaatagcaactgggcacgttggcggcgggggccctaattgttgaattatttcggaagctctccgcttgtggcacttcccctggcgccgggtaaggactccccccgttaaaatggccctcttccaggagagctcccaccttccctgggatgttttggtttccaggaaacccgcctccgggggtttgccccctcccgggggcggttgtttttgtaaattggtggtagggaattcccccaaaggccctttaggttcaagtgggcccaagggatttctcccctaggggaaaaccgggctattgggccccaggtttcccctttaccctaccggggggccgggggcgcccaaatcggaattggtctaggaaaaactttttcgaagggcccgagggcggcccgacacggcccattaattgtagttgtgggttagttttttacttagcaaatattttattaatacacactgtcatagtcctaggatagaagagtcctcagaacactgctccacattgaagatgctgaaatgggtggtcaggtccttagtcttccttctagtctgttaaccccacactcctttaacagaaccatgcttgctgcccttaccctgtccacatccctgaaaggaaacgggtctctctcagccagatgcagatagttgacactcactgcctttgctatggcagggggctccttatgattaacccagaacaggaaaaacttagtgtcagctgaccgaaaggaactcagccttaatttttcaaaaagtcactctcattccagctatctccagggaagggcgctgggagtatctttcagcatgaggcacagagattcccactgccgaaatattcgggaatactttccttgatttctcagagggactcatgggngtccgtttnagctgggctgggctaggacttgtttgtggcgccaagagggtgggtcagcactgctttncagcnggggtctgctgggggc

SEQ ID NO: 323770 - DNA, 740 bp, Homo Sapiens
  misc_feature (640)..(667): n is a, c, g, or t
  misc_feature (673)..(673): n is a, c, g, or t
tttcggcacagttgattaggaaatgagctcagtttgtttacaacccacgctgatgggaactgcctcctttgccttctctaggaatgggggacaagttgtccacatgacttccttggtgcctgcaaactacagcatgacttgtcctggactccgtatgaggacattgagaagcaagatgctaaaatcagcatgatggacacgttgctaagccagtcagtggccctgcctccgtgcactgaacccaacttccaggggactgactcactgagagtggggctttgacaaacagctctcacaggacctggctgtcaacctccttgttgcccccactgttgccttgagaattgaagacatgtaggtgactcaccaaacttcttggaaagagaccctgtgtgaatgtaaatgctgtcattatgacttttaattcgggatgggaataatcattgagacagagtcactgtctttcgggatcctctttggaccacagatacccaagtcagtcagtttcagagtattggccagtgtactttccttcttcctctccatcacttcttcccttaagttaaagtgttagagaagaccttcttcccataaaaaggttggtggatcgttttccagagagaactgttttcagtctttnnnnnnnnnnnnnnnnnnnnnnnnnnnnactggnagtatataacattggggttgaggctgtctcacagttggtgcaactcccagtttaaaattcatctggg

SEQ ID NO: 323771 - DNA, 382 bp, Homo Sapiens
  misc_feature (126)..(155): n is a, c, g, or t
  misc_feature (244)..(244): n is a, c, g, or t
  misc_feature (258)..(258): n is a, c, g, or t
  misc_feature (262)..(262): n is a, c, g, or t
  misc_feature (318)..(318): n is a, c, g, or t
  misc_feature (339)..(339): n is a, c, g, or t
  misc_feature (361)..(361): n is a, c, g, or t
  misc_feature (368)..(368): n is a, c, g, or t
gagtgagttgttgttgttttttaaatcaccctccattactcaacattctcgttcccagatgaattttaaactggagttgcaccaactgtgagacagcctcaaccccaatgttaaatactaccagtnnnnnnnnnnnnnnnnnnnnnnnnnnnnnngggctgaaaacagttctctctggaaaacgatccaccaacctttttatgggaagaaggtcttctctaacactttaacttaaggggaagangtgatgggagaggnagangggaaagtacactggccaatactctggaaactgactgacttggggtatctgtgggncccaaagtgggatcccggaanggacaggtgactctgtctccantggattnttccccatccccaa

SEQ ID NO: 323772 - DNA, 648 bp, Homo Sapiens; identical to SEQ ID NO: 132323
  misc_feature (176)..(224): n is a, c, g, or t

SEQ ID NO: 323773 - DNA, 1208 bp, Homo Sapiens
  misc_feature (175)..(205): n is a, c, g, or t
aaaactccccaacgcccctttttttcccatggcccccgggggtttttccctttggggaaacccagcttattggccccctggttccccttttaccctttggggggccccggcggccccaaaggaaaaggttttaaaaaaggtttttcgaagggcccgaggcgggccggccaagggnnnnnnnnnnnnnnnnnnnnnnnnnnnnnnnaagcctcaggatttatttttttaaaattaatgcaatataggaaaaatttaacaatttttaaaatttcacttagaattcatagattacagctgttcagactctagtaggccccggtttgctgatctatgagcgatactggtttgtgtgtagccaaaaatccctacagaccagtggttgtcaggcgaggaaagttttataccccaggacatatttggcaacacctgagaacctttttgtttggcaccactcaggaagacgcgttactggcattgaggcaagggacagtgctgaacatcccacaatgtacaggacagcctcacagcaaagggtgacctggccccacatgtcagtagtgcagaggttaatccctgctctagagacaacacagggatcatgggacacaagtcactagccctggaccagccactgctcaagaggccacgtgcaatccacggcattcatctgtccctcttcctccactgttcagcacttgtcgtcaatctggaagctgctaagagcctgtctgtcactggcagagaaagagcagaccctgtgccggctgcaaagtccttgagttgcaggaaagtccaggcctcagcctctttcaggcctggggcaggaaagctttggggtgcaagataaggcagggtgaggggccctggccttatgatgttttaaagaaaagttttttccggaggaaattaaagcaaccaggcatctgtttataaatccctttcaccgaaaacagcattagcgacccctaagcaggagggactgcaggtcttcaagagtgagcccactgctcaaagatgtcgtccagggtctcaacgtaccaggagccactcttggggtccctcccaggaaacaaaacctgggaaagtagagtaggacacaaagatgtcactgggtgtgggcaaactagatatggcgtccagctggtcgaaggtcctcaaaccttcctggaacggggtggcatctggcctcgtgccgctcgtgccgaatt

SEQ ID NO: 323774 - DNA, 397 bp, Homo Sapiens
  misc_feature (336)..(336): n is a, c, g, or t
ggcacgagatgcctgggttgctttaatttcctccggaaaaaacttttctttaaaacatcataaggccagggccctcaccctgccttatcttgcaccccaaagctttcctgccccaggcctgaaagaggctgaggctggaactttcctgcaactcaaggactttgcagccggcacagggtctgctctttctctgccagtgacagacaggctcttagcagcttccagattgacgacaagtgcttgaacagtgggagggaagaggggacagatgaatgccgtgggatttgcacgtgggcctttttgaggcagtgggctgggtccagggggctagttganttgttgttccccatggattcccttgtgtttgttctcttaggagcagggggtttaacctttt

SEQ ID NO: 323775 - DNA, 491 bp, Homo Sapiens
tttttccatcaagaatgaataagttgtagtatatttatataatactatatagcaataaaaatgaaagaaagtcacagaagtaaacattttgccatttatataaaattcagaaacatacaaaattaacatttcacttacagatacatacgtatgttgtaaaactataatagacaaatgacaaacacaaaattccaaataattatttgagagggagagggccttagggaacttctaaaatgtcgacaacatctgtatcttaagctggctgatgagtacacagatatttacatttattatccctttatatatacgtttatgtatttttgtagtatgaaatacttcattaaaaaaagagtgaaaatgtaagacttcaaaaatgaagactaccatttatgtataacaataaaattagtgtaaaaaagtatacaaagaaaatgttcaattctttatctttccgtgctctatataatcagtattaatctaaagaccat

SEQ ID NO: 323776 - DNA, 336 bp, Homo Sapiens
tacagataaatttgtttttaataaaggagttaattttctttcaatcctatataaaacaatagcaattaaaaacttcatttctgaaagtaaaatatttacatatgaacaagtaactgtgcaaaatttacatgaaaaaatggaaagacagggatttcctaaaagacaaaataaaaggtgtaacagttctcaggtgttgataaaaaatactgatcagcgttcagttcacacgcgctcgaattaaagtctaatgtgagaattcacacggagaaagccagagtatttacagtcataaaagtactatcaataggacaatttcatacaataacctctgaaaat

SEQ ID NO: 323777 - DNA, 931 bp, Homo Sapiens
ccttttgtaaaaatgggacctttatttttgttttgattataaagtgaacatggtcatggctgaaaatctgtcaagcacagaaaagtataaagtaaaggtcgctcaaaattccactgcccagccagctgatactgacatctaggaggtgtcccactttggctcttattgatccctggtgtgcagacaggggtccccaggtagacagaacccctgaccaaggacaacaggaggcatttgctcttccagggtaagcatctgttttattcagatctgggtggttcagggcctccaggcagccagttttgcaggagattcagcacctagtgtcttcctgcctcacgctcccaagaacctgctcctgcagggggaacatcagaactcatccttgatgtcaaaatggggctggtcttcaggcttgaagtccaggttagggctgccatcctcattgagaattctccgggcagtgtagccgacgatggggtatttggctttgtacactttggtgaagacctcatccagggcctccagttccttggccgtgagacccgtagtgtcatgggtgaggtctgcaggatccaaggacatcttggctacccctctagtggagtccttccccgtcaaggcattgtagggggctcctcgtccataaaactcctttccggaggtgacatcaaacaccactcccttcactgccaagtagatgggctgatcttcctcctccccgccatagcgggccagctcctcctcggtgaaaagccgcactgggggcccccgctcggcagggcgcggtgtctgcccggcccgggctgtgggcagccccggggccagcgccaggaccagggccagcgctgccagcggccgcagccgccgccgcggcgcggggcccaccatggtgagcgcgcagcgcaaggcaaggccgggccagggcccc

SEQ ID NO: 323778 - DNA, 449 bp, Homo Sapiens
ttcagaactccaagatgtttttatttatttcaaattccaatagaatgaatatgttttatctaaatatttttatcacacaactaaaacattgaattactttttcagaaatagttaaatacatcaatctagttacaaattctaatataaagagtacaaaatataatgttataaattgtattttaaaaaaagaaatacaaattctatggtcttttgcattttactgcctcaaagcagaattagcaaagctgatgaagaatgaacattttcccttgggcgggtggcccttggtcactcccacaggcacgttaccgggctccggcgtgtgctcccaccaaccacggcaaacaaaggcgtcctcctcacttgaagtcctggcctgtggttgtttcatctgtttttttggctcagtgaacaaaacgttctgaaatttagaactcaccaaagtctcg

SEQ ID NO: 323779 - DNA, 665 bp, Homo Sapiens
ggtattgcagtatattttactccccatgaaataaaacacatttgtttcatattttgctgaaaagtaaaacaataatattgtacgaaatgttatacacagggtaggttgtacatagcagtttcagaaacatcattgcatccaccagagaaactattctaaaactgatattcacacattttttataataataataatatgttagaaacatacagtgtggcatttagtatatacactcccttgctcgcaagcgaaaaatcctaatcgcttctgtataacatgctttattttaaagcctaacctttaaaaacactgttgtgatattactaacaactgcttttataaaattaatttgacatttcgatatatatacatcctttcagtcatttaaatgttaacaatgctaaacttaaaaaataacaagcttatagtaatgttaaaatgtcatatccagtcaaacatttgtttgtgtatgtgtccttgcaactgttagaaatacttgtagtgaaagatgtcagacactgaggacatccctttgaaatcaaaggagctctctctttgattcagtggtttccttttctctatatagcttctctttctctccctttctttagtgcccacgaccttctagcataattcccagtctttcaagggcggagttgcccccc

SEQ ID NO: 323780 - DNA, 1581 bp, Homo Sapiens
  misc_feature (102)..(102): n is a, c, g, or t
gggggcacgggagagaaccagaaaaccccgggttcgcaaattttggtggttcttgaagaagggaaggtccagggaaaagggccttggaaaggaagggaaatncgaaaaaagcgcatatgggtagaccaaagggagaattccgcgccgagggggaaaattgtccttgggagggaagaagccagggccctccaggcgcaaggcaaagggtgcagttttggacccttggctttacttgtggtgaaagggttgaatgccctgtgcggcaaggggaaacccaaagggcgtttattgctttggaactggctttgggaccagagaaaagggtacaggggggcccgtggtttgcgagggatatttgccgcaggggaaaggtcaatcgcatggtcaaatgagagccaggatgcatgggctcctggcacaaggttgtagaatttgtttaaagagaatgggacctgtggtcgtccaattgctgttgcgcatcattcataggccccaccccactggtttccccttggactacgtagggagcctgctggtcctggaaccgcgtgatcttggctcctttcaggaactggcagatctcataataggccaggaagcctgaagactctgtgatgggtccagcagctccagggccagaggcagagggccccccccggtggtttctgcagaggccagtgtgaaggagtgccccatatgtggggatggcccatgaccactttctctgatggcattcccttatgtatccagtaccccacagcatattccacattgtagtaggagcttggccctctgtcctgccaccccttgctcagagggctgttgtggccagtgataaggggcttttcccaagacccatggaagtcaaaggacaggaggttgatgaaatccagatcttttgccagtttctcaacttgatagctgttatcaatcatttgcctccctgcagatacgcccgcagtcaagagaagcctttccttggtggattttgtgaagtccttctgaaaggcttctgctaactcatgaatcagcacagtgaaatgagtgttttctttctgatctgggtagatccagcttacatccagtccatcaaagttatggttcctcagaaacaggattatggagttaatgaattccaagcgtgatgtagaagaatccaccatagggtggaaccctttggaaccaaacaggtaccctccaatggacaagagaattttcagtttgggattcttggttttgagactgttgatggtctggtagagcatcacttcactcttgtccttgatgataaccttgttgttttcgatgctggcgaatgaatagatgagatgagagcataggaaggggtcaatattctcaggggtgaattttcctggttcctgccggtcctgggaccagttggtaaagtagcaaaccagtttgtaggcagatcctccctggagaagcagcaagaccactacacctgcaatagatgggtggaaagagaaatctgttgagccaaacctggttctgctgtcccagataatggcagtgaaaatgtgggtgtgctcacatacaagatagagccacacttcatctccc

SEQ ID NO: 323781 - DNA, 1408 bp, Homo Sapiens
  misc_feature (14)..(14): n is a, c, g, or t
  misc_feature (39)..(39): n is a, c, g, or t
  misc_feature (573)..(588): n is a, c, g, or t
  misc_feature (595)..(595): n is a, c, g, or t
  misc_feature (631)..(631): n is a, c, g, or t
  misc_feature (822)..(822): n is a, c, g, or t
gtaagcggcggatnagcaacagcgcagatctagtccgcnacaccgggaaatcgggaggcgatgtcggtcgatgaacaaatatgcgcgacgcaagacattatatgggtcgaaacggcacgcgggagtatgctacggatcgtgattatcgagttaaacggtacacacggcacatcaacggggggcgcgagatgaaaataatgacggcacaatatggaatagttacgagataggaataatcaggatacggggtcggcggtataaaagaatatagcggcggttctgcggttacgtgggaaatgaggggttattgcgggcgcgggcgccggggggtaggggggatttttcgcgcggcgtctacagatgtgagtgcgcgggacgtacctgcagccgtgacgcgcgcgcagaatatggaaaaccgtcccacccgtgcagaagatgagcaggcgagtgcccgtcacggtacacccggcggagggaacgacgttagaggtatgaggatgacgtatcccggaggggaacagaaaaagggccgaaagcgttcgtgcggggaggtataacaaagaggggcgaaannnnnnnnnnnnnnnnagagaangaaattgggacagatggtgagaacagaggaaagagncgacggcgaaaaggcggtagtacgggttattgtcggcccaaaacatggaggtcagggcacgggggggtaggcgtatggggaggagaaaaaggccgggcggaggggatcgtgcgcgggacatagggcagaggagtaacacaagcgtcgggggggatcacaccggcatgggttcggactagctagcgtacctnggaggtagccggagggatcccgcaatgctgcgcgcacacaacggaacgcaggaaggtataatgaaggagaagagttgtgcgtggggaaagcgccgaggggaatgcgaggtaaaaccgggcgggcgggatggataggagaggagcgatccggaggggaacggaggatgcgcgcgtggatgcgggcgcggcgtgcggggcgcgcgcgagatggagggtgggatggaggtgcaggagaaggaggaaccgcgcggccggaaaggcgcgcgtaggagcggacgcgaggaagaggggaaagagcgtgtgggttgatagatatgtagctgtgtggtccgtccatccactgtgtgtatatatctgtgtatctctgtggagcggggaacgggacagttgtgtaaaaatccaaaatacaattctgactatgaacaacctgcagggtcagtccaggtgtggctgtgaagccccaaccaaaccacaggacacggggttgggggaaggcagactggcaggccagggtgaccctcctgaccagaggtgctgcccagacccgagcccgtttgtcctactggggctatggcggccgaccccc

SEQ ID NO: 323782 - DNA, 1172 bp, Homo Sapiens
  misc_feature (199)..(224): n is a, c, g, or t
  misc_feature (636)..(637): n is a, c, g, or t
  misc_feature (797)..(814): n is a, c, g, or t
gcaatctgtagtcgcatttgcactccatttttacattaattcgcagttgctttgtatcattgttttgtttgggttttgtttctttttcacagtgccgggtcttcgtttcttaaagttggatggcaggtagagttcaaccagttcgtgactgttgtagcgaatgaagttaaaaaaatgtctttctgatgttgtgttgtcnnnnnnnnnnnnnnnnnnnnnnnnnngcatattaaaaaaagagaaaagagaaagcaagagacagaaatcaggactaagtcctctgcttcagtttcattgttaacgggccttattctgatctcacctgtcccgtagctctaatattcacataaaccgaaataaagaagtggaatgaggagctttgaccttccctctccgttccgtcgcctttcttctttttctccccccgcctcccccttctccgcatccacgaaataaccgatccgcgacccctacagtcacccccgccgaaccacccacataaccctggttttgcgttccgctccccacctccccccaaacatttctcttcaacgcaaccgcattctcgttccctgcgggtgcttcgcggtcgcccctccgtaccaatgctacacggttgttaatcgcgccggccgnnataacataaagatattcgcgttttctcccgccctatggcgccaccgaccttcccgcgcggtaccctttatagccgggtaacgattaccacaacgccgctttttgctgggggcgagttccgctcccccctttgccgcgcgcccctcgtatatacgaaatannnnnnnnnnnnnnnnnngattgccgttcgcacaataccccccgcgatacgcgcgcgcttctttggcgctacacacaatacgtttgtcttcccccaaatggggcgacttatacctgtctgtacgcggcgcgctttatatatcatccgtgtgcgcgctgtcccgccttcgccacacccgcgcgagacgcgctacatacggtcattcgacgccccctctcccttgataccccacacatccccccgttgccgctccgcgtgttctgtcccctctcgttcttttccgcccagccggtctattgcgccggcggaacactaccctttgtacgacgtatttccctttcggccgctcacccgtcccgaccttccccttgtatag

SEQ ID NO: 323783 - DNA, 988 bp, Homo Sapiens
  misc_feature (94)..(133): n is a, c, g, or t
  misc_feature (864)..(877): n is a, c, g, or t
  misc_feature (879)..(879): n is a, c, g, or t
  misc_feature (901)..(901): n is a, c, g, or t
  misc_feature (903)..(903): n is a, c, g, or t
  misc_feature (912)..(912): n is a, c, g, or t
ggaatgttctcaccaaatgtaaaacaggcccagtcaatgccatttattatacatgtcaaacagcttctaagaccgacgggctcccataataagnnnnnnnnnnnnnnnnnnnnnnnnnnnnnnnnnnnnnnnngcatcaaacaggttcttccaaaagcctgctcacaaggtagacaaaaacataaatcttcaggaaaatgaaacaagagaagctgaaacaatctacacctgaatgttaaaaaactcatcagacacaaaccacaccaaacactcatcccatttaatttcctgttacatgctctgaggaagccaagaacatcaggccccagggcagcaatgctctaggattccagctcggaccccctctatatgacagattcatgcacacacatccacacaccatagaaccaggcagaaatacacatgcatgcacaggtggctagagaaccatagggcaggatgggaaaaagggctgatcaaggatatgcaatcaactggaaactgggacctagagaatgcttctgttgcaggatgaacatgagttaaaattaaaacaaaggcagaacacaggataaaggtgggatgttcagacaagaggtgggatagatgaagagataaagatgcagggggagttttgggaaagcagcctcagaaggggaggtttttctttattgggaactcaggtgggcagggtcctgtgactccagtgatacactgaggcagaagcaatatgccacagcattacctctgcaatctgtgccctctcccaaagtagagggaaaccatgagcccccaccctctatccctccccattgacactcttaagaactttcccattacccaaaaagaaatgaccccctactnnnnnnnnnnnnnngnaaagttaggtccagcataggcnanagtcaggcnaagcacagaaagcctcagtaactctttcttggtggaaccaaagccagagaagcccatcacagctgccatctcatcg

SEQ ID NO: 323784 - DNA, 1035 bp, Homo Sapiens
  misc_feature (49)..(60): n is a, c, g, or t
  misc_feature (195)..(195): n is a, c, g, or t
  misc_feature (416)..(425): n is a, c, g, or t
  misc_feature (514)..(623): n is a, c, g, or t
aaagtaaggttgtgggaaaaaagcggttgtgataaggagagcgtccgcnnnnnnnnnnnnaaggggttatatagggggttttcccggcgcttttttcgtagataaggatagacgccggaccggggagtccgcaaaaattttaggtttggggggcgcgccgcgggggagaacacccccggtgttggttagaaactnccccaagtatgaggtcgccgcaaaagggcatcccggattttggagcggtttgtgtgtttaaaagaaggaattctatagtggggtttctcgcgacgggggaggttgggttttgtattttggtgtggaggggaaggtggcaaaaggggggatggtggtttttggccgggggggttgtttttgggaagaaaaggagtagggccacgggttccgctgtcgcgtannnnnnnnnnccgggcccacaaaaagagggttttaaaaaatcttttttaggggcgaagggcgccggcaaagaagaaggtgtaggtgtggtttgtgttgnnnnnnnnnnnnnnnnnnnnnnnnnnnnnnnnnnnnnnnnnnnnnnnnnnnnnnnnnnnnnnnnnnnnnnnnnnnnnnnnnnnnnnnnnnnnnnnnnnnnnnnnnnnnnnggtcatttcataaaatacgtgtttattattaccataggcctacagtccccggtattcttaacacatcttgcctgagaagtatcacactcatgcctatcaaccagctcacacatttaatcaaaggaatttggcagctgtagggttgtcttttcatccatatcgtccctggaattaactgtcctgctataccagtcagattgagcagcatctgtcaagagtttcagtcccacttgcagaggaaaggctctctggcttcggtccgtggctctccgtaggtgccgtgtctggacccagcctaccttcatctctgttaggcttaggggtctttctccacactgtgtcttgtccaatcacaagacttcaacggagcgggcggtctggcctaggctcttatgcgtgggatgtctgcagg

SEQ ID NO: 323785 - DNA, 549 bp, Homo Sapiens
  misc_feature (491)..(491): n is a, c, g, or t
  misc_feature (496)..(496): n is a, c, g, or t
  misc_feature (516)..(516): n is a, c, g, or t
  misc_feature (527)..(527): n is a, c, g, or t
tttcttacatttcttatacgaataacagaatgcttcattttattcacttcaataggacaaagtccttaaagaaagactgaaaagagctgataatcaaaatcccaaattttatgcttatttttgttttagtgctatcaattttctgacatattaacataggcaggaaaacattctcagtaaattgagcatttgagtctacaaatgtcttgaagcactctggcaagttacatgtatcccatgttgcttttggtttcccatctcttctttgcttcaaacccccatgcaagtttcttcttttttcgggcagcctgtgaattttcaacctcctttttggcttttacaaagttgtggcaggcaactgctttggcaatttttacaccaagctctcgagtagctagctgggttgctgagttcctcagccttctcaatattccactcctccacagcctggggtctatcctcttttcaagggcctggacttctcaactttnttccngttaacagggcggggtcaantcctaatcatnggactccaaaatactggaggca

SEQ ID NO: 323786 - DNA, 1051 bp, Homo Sapiens
tcccctgggggaaaaggatattaaaacctgggtattttaaactcagccttaaccagataaacctgctccagcatttgtccagtgttgaaataaataggaagaaaaatacaatttccttaaacatgccagcttagtagtaggaatgacctatcaatccaatcaatcaatcattcagcaagaagttagttggtggttccccatggccccaaggtctgcagggctggattgtccacttttcctcctcaccaccagcactggctgctgctactgagaaaggcacagtggactcatgtgtgtgtcatgactttaatggttagctacagtatgcatacacatacaagaagtaggggagctgaagcccaggaaaaggctacaaaatacaacacagggaccaatacatttgcaaaacattcaaaatccttataaaaggggctgtattggtcctttcaactttgtcattattcagcttagcctgtatggccattcattcagtggggtaatgggggagaacaattaattaatgagatttggttccctttcctatattcccactgtttttacgtttcacgagacgattgggggggtgaggggacgggtgggcctttagggctggccatggctttccctttatactaaagagcttgaccccccattctcagggcggctggaaggggtataatccccccccaagaaaagtaagatgggtagcaaactgcgaagtccagctctcgggaaatacctctgtggggtacgagaccagaaatgcgcccccctcatgggggatttcccaataatggaaacccccctcccccatggttccctgggacactattcccactttataggccaatttcccacctttttttcacccaacctcagttcgaatctttcccagggaccccctgttccgcgccttctaaaagaaataaggctttcgccggggaaaggggacaagagatagcacggggggcctccaccccctcgtgccggacccctcgggaaccctcggaaaaaacttttttctaaacccatcttcatctcggaagcgccg

SEQ ID NO: 323787 - DNA, 1033 bp, Homo Sapiens
  misc_feature (24)..(24): n is a, c, g, or t
  misc_feature (477)..(477): n is a, c, g, or t
  misc_feature (507)..(525): n is a, c, g, or t
  misc_feature (565)..(596): n is a, c, g, or t
gagttcatcttcttccttcttacngcttttcccaaacattctccagtaaccaggtactaccatttataatggaaggaattttttaaaaaattttaagctgtacactttcaagtaagatctgaattctaatgctggcttgtgcctcttactatgtggtttggtcgattatagataatgcccagtttcagtttccccatctttgaaaaggagataatatgttatctcttgggagtagttctgaatatgaagtgtgttgatacaagaagcactgacaatgtttctgtttcttaaatttaaaactggcctggtttgccttttttatcaagagagcttaacagataaaaaatgaaattagtctattttctacttgccagcagagtatctgtcttattttaggatgcagtgtgaaacttaccattcaactgaacaactagttgtcaactaatgaaaataaaacattttctctaagcaaacccngaaaatcaaaccccatccaacacctctgtnnnnnnnnnnnnnnnnnnnacagtgccgcactacgacccaccccactaatcaactagtnnnnnnnnnnnnnnnnnnnnnnnnnnnnnnnntgtgcgttgctccgcagaggtttgaccgcgccgtaagccccctcgtcttgctgtgtgaatagccccggcttgcccaccccaatttccctccacccaaccagaccagtcggctccgcgggtgaccgccgctcgcctgagctgaccggcctgcccagtcaatcgctttatcgccgccgcctctttctcccacaccatgagtaaccccctcgtccttgaccccccagtgtattggcttgtctcgctctcaccctcgctggattacccctccgatctcctacatgctatcatcgccgccccgccgcgagcacttttcctctctttaccccaccacgtttgttgacgcgggccctttttcctctcccctcgcgatgtttcaccgcccgccgactctctcgccccacccagccccgcatcgtgtcttctctggtgcgggtcgc

SEQ ID NO: 323788 - DNA, 641 bp, Homo Sapiens
  misc_feature (177)..(186): n is a, c, g, or t
gggtggaggaaatgccaaggccccctagttcagtggcccaggggattcttccttagggaaacccaggctaatggccccatggttccactttaccctacctggggggccccgcggcgcccaaacggaattggtctaggaaaaagttttcttcgaggggccgaggcggcccggcgatgnnnnnnnnnnctcccccgggggcgttttttgaacatttcatcttttactttttagcaccaacagacttgataacagcctgatgctgatctgacaatgggttgatagccttcccccactgacccttaaatctgcttagtaacaagtcctttgcttctgtcattctcctgggggatggcctactgccctcctttctgtacaatctgggcaaaccgactggtgatggcaagagtggtgtcaatgaagcggtctacacagctggagagacaattttcagtgcgagagtctaggcgattccctggcttctccacacatttatcccaacataactccatgaagtgatgcacctgtgcagtaaactgcgccttctgctgctcggcggccaccaggcgctgcaactccgcttcatcggcttcgcccagctccgccattgttcgcctcaggctcgccaccttccgacagctccc

SEQ ID NO: 323789 - DNA, 419 bp, Homo Sapiens
gaacatttcatcttttactttttagcaccaacagacttgataacagcctgatgctgatctgacaatgggttgatagccttcccccactgacccttaaatctgcttagtaacaagtcctttgcttctgtcattctcctgggggatggcctactgccctcctttctgtacaatctgggcaaaccgactggtgatggcaagagtgggtgtcaatgaagcggtctacacagctgggagagacaattttcagtgcgagagtctagggcgattccctggggcttctccacacatttatcccaacataactccatgaaggtgatgcactatttgtgaggctggggtactaaggaaatcagttctctctaagggtcctcaagggtagctgtcatcacctcccatttaagaggcgtgattatgtagtc

SEQ ID NO: 323790 - DNA, 441 bp, Homo Sapiens
  misc_feature (41)..(61): n is a, c, g, or t
tttgcattattggtagctttattaaatttgtttaccttctnnnnnnnnnnnnnnnnnnnnngaatacttcatttaagtgtaatactggctttatggacgtaccgtgatcagaaagtgaaattaaagctcatggatatgcgtgagaagagaatgggcgcagaggcacgagtccagtatcccacggagagaaggaagtgtagagagatgcgtggacccatctcaggggtcacgcattcctgggccaaggagttgcttctaagagcttaaaataaatgcactggctggctccagggctggacacacaggcacagaactcttgtaccgcttctcaaagctgcccaaagctgcgaccttccccctcagacacccacaattaattgtttccaatcagctttggttttgttttctctgcaatttacatgcaaacaccatctatctatt

SEQ ID NO: 323791 - DNA, 1071 bp, Homo Sapiens
ttttctgtgtttactacaaactgtttaattgtttcttatcccaataactttacaaatatagaaccacatgctagtctgggggtgctgtgcagtgagtcactacaaactcgctcaggcacagcttaatgccgctgagatccatctaggagcagtcccagcggtggcctcagccacgtgaggaagagggctttggaggagggctgccaagtgtggccaggggacccggcctcaggtctgtggaggtgcttcaacagcacgatgctcattctctgtccgtagtgtctccatatactttctcatcttctccaccatccaggagggtaggacaaaggatttcaattcctctagcttcagatccaggcatcctctgtaatcatcactggccgcaaggtcccggatgtcctcctcgatgaggaggtaggccatcttgccccctgttgcccgcatgtgatgctgctcagcccagccagtgcttatcctgggggtcagctgcatacttaaagaggtgtgggtgcttgatgtagattcttcctctggtgccccccatccccagggctttgttggctcgagatcccaacacaaaggtggtagattcattcaggcgagctgggtcccacttggggccttcccggcgaattggttcacaggattttggtttccataccatgccggcggctgcccggtcgcttgacaggatgtgtccaggaggccgtcctttcctctttttaggaagggggcttcctcgatgggcacattcttcttctgcctgacggccacgctttattcctggaagctcatgggtcaatctgggtattactttttctccatctgaaaagagcagtttagccttcatgtacttgttgaagacagtctggatctcctcgttgatgctgggctgcaggacagctcggaggagatccatggagatggcaggatctgtgaaacttgttgtcatctgtgagcggcggcccctccgctgcacctgccggtgctttatcattatgttccaagggttcgtaagaaccagctgccccgctgcgcccgcatcccccagctccaagccgcccctcc

SEQ ID NO: 323792 - DNA, 342 bp, Homo Sapiens
  misc_feature (135)..(143): n is a, c, g, or t
ggggctttctggtttgaaaacaaaaatgcatctatgtggttgaaagtttgggaggagattcaccaatatctgaggagaagatggagtgaagggaattcttactttttgctttatacctttctataatatttagannnnnnnnnactgtaagtatggatcaaattgcaaaataaagaaaaatgccaaccttagaaaagacaataaatgcacaagagatataaacaggaacagcaacatatttatattttttccattttgctctttttaaatctatgtttagaactttatatcttgggacttatgtatatatataccttttaaataaaataaattttctaaata

SEQ ID NO: 323793 - DNA, 542 bp, Homo Sapiens
ctccattgcgacctgatagacctgtatgggtggctggccccataatcagcatctaccacatcccacgcgcatggggtctctcacagcggcccctgcccatggacagatggactgacccacaggcattccacatgtggtgctgaagaagccgtgaggaaagggggaggtgggaagggcctcgtcccagggtgtctggctgcacaggagacatagcagctcccactggcaccctgcatacaagggaaaggcctcgaaatgcgctcaccaaagcctcagagttttattatcaggagctcacattcaggtacagattcctatgaagtttgcctcacctggagggaagagggagagagcagggctggctgagatggggctgccagaggcatggtctccagctgggtaagcgggattctgagagcccctggtgcacacggagcctcctggcacacacaggattgtctcaaacacagaggacctctggcacactcaagggcactgaatctagcaatgagtctgcacttctgttatgagagtgggttttt

SEQ ID NO: 323794 - DNA, 379 bp, Homo Sapiens
  misc_feature (350)..(350): n is a, c, g, or t
tttgctataaatacacgtgtttggtgagtgaggggcaacagaaggcagagagatggcgctgtacacagctggtataggcttggaggtggaacgccagagagacagacacacagacagtccgcccagcagggctggccgggcagcattctggggcttgtaacacttggttggtgggcgagagccagccaggaggtccggcccggggctggaggggccgaggcaccccgcaggctccaaggtccgaggtcctgggtggcatcagtggtggcgcctgggctcagctcacatcattcagggccttgcgggcaaactcgggcagcacaaaggcggcgcggtgcacgtcggagttntagtactttcagctgcatcttcgccacct

SEQ ID NO: 323795 - DNA, 426 bp, Homo Sapiens
gaatttttaaaatattttaatttgtatatataacttcaaatttagaacactcagtatgaacaagaactattctctgacaaagatgtgaaatgggggagtgaattactgtacaggtgcatatcaacctctccatgcaatttacatctgtatcttatgcaatgagaaactggtttacacagctccgtaactgcagtattttttaacaccccattttgcagtctcagaatacttttcaattaaactggtcgacatgtttaaagatgagaaataagatgtttgcattgtaaagttgagtaatagctaataaatgcacacttccttccattaatataaatctggaacaatttatgggtaaacaaaaatctatccgcgttatcagtaatctaacagtgcatacttttactgaacacttcctgtgagccaggc

SEQ ID NO: 323796 - DNA, 334 bp, Homo Sapiens
  misc_feature (272)..(272): n is a, c, g, or t
  misc_feature (305)..(305): n is a, c, g, or t
  misc_feature (313)..(313): n is a, c, g, or t
ggaagcaagtcttttttattgacggaataaacacaacattgatggtagtaggatagagttggtggcaatgtcctgtcactgcaattatgacattcaaatcagacctacataactgtggctgcttttgattctttcaactttgaattttgattatctgtacagaggggcttctaaatgaaaacgaattcacttgcaccacccctactcacctatttactgtttctgggagaataacaaattttttaaaaggtgggtaaggctaaaagacaaanaaaaggttaactaaaataggctatgagggtccnatcaggangggcttaacattattccattt

SEQ ID NO: 323797 - DNA, 765 bp, Homo Sapiens; identical to SEQ ID NO: 4617
  misc_feature (37)..(37): n is a, c, g, or t
  misc_feature (67)..(67): n is a, c, g, or t
  misc_feature (150)..(159): n is a, c, g, or t
  misc_feature (161)..(177): n is a, c, g, or t
  misc_feature (505)..(514): n is a, c, g, or t

SEQ ID NO: 323798 - DNA, 985 bp, Homo Sapiens
  misc_feature (966)..(966): n is a, c, g, or t
agataaactatcttgcatttaatcaatcattacaaaaagtattcatgccacatacaactttgtaacacccaggtgcgtgaccatctataaaaggggggaaacccaacctctatcccttttccacgtgggcaagccaagggttctgagggctcatccacagggctcgccggcctggcctcctgctgcgtcccgggatgtggaccactgacccagaggcttctgagtcctgagcacagataagggctcctttcaggcctttccttgagctgcacgtgaacctgtgtgggcaggcagcgtttgcaggcgtgtttacgggcaggcagcgtttgcaggcgtgtttaccggcaggcagcgtttgcaggcgtgtttacatgcaggcgtagcaccatgtgagaccactggtccagggtttcagaggtcctgctcaggtgaatcggctgtgttctcacaagttcacggagctgagtgggtgtgcaacatgaaatactagtgctgtgagggacagaagggacagaaagaggctgaagaccatcatccagctgagaaaagccgaggcacaggtatagctgggcacctggaagaagctctgcaaatggaatcctccttggcaggagtggtagtgctaaggcgagcagagtgggctacaggcaggtcctgcaggccctgggtagagctcatcctctgtctgtccattcctcccagaccccagcgtggtggagaagacacaggcatagtaaacgaaggtgaacagaaacacaacatccccattgtaggctggccaggctcaggccctggggtgaaaggagacaggtgctgccaagacctggagaaggacaaaagaagacagaatcaagggtgaaggaaaggaccaggcagtggcgaggggtggtgctgctggagcaggtctaagtgggaagcctagtggtcagggatggcccccagaggccttctgagccaaggcaaatnctcgtgccgaattactggc

SEQ ID NO: 323799 - DNA, 850 bp, Homo Sapiens; identical to SEQ ID NO: 150804

SEQ ID NO: 323800 - DNA, 577 bp, Homo Sapiens
ttttgtttgtggaaacaattatggaagattcttaatgttttattagtctaaatatggagccaattaatcacttcattaatacattgaaaactattctgggaatattgagcataatcttactcttgtacacttggaacataagagaaattttcaattaaaattaattgactctgatttttaaaaaatctacttgatcaggagcacattgctttgctggtgtctgtgagcagctggagatggtggtgaacggtctgtttgcatttcttggaagaagatcttttattctgctgctcaaccccaggtctctgccttccttagagactgaggcccatccttcagtttccctgattctggagaatggcccgcagcctcccactcagggcttggctgtgctcctctagtccatcccagggctggaagggacattcctggcggtacacaaaggtgtcccagcagtactcaaactcatcgtaggtcatgatggagacttgggccccagcatcccgcagcatttgcagcgcctccttatatagggggtcgtaatcatagatgcgggcagcgaagatgcgcagtctca

SEQ ID NO: 323801 - DNA, 978 bp, Homo Sapiens
  misc_feature (458)..(484): n is a, c, g, or t
taaatccatcacccttttcttccctccaggtaagtcatttttatggaggctgtcactactgctggagcaagagggcccggaattcctgatcttgttgcaagggaggtggggctgacctgatctctgcctccactgagaggctgtgtttctcctattgtttacagtctccagcacacggcaggcttttctgtcctcctgcctgccctgccctgcatccagccatcatttcttgtcatctcagaagcttcagagtaaattctctttcatttttgcagttcctcacaggctcagtgacttagccaacttgtttttcctccccccatgtcaaaagtgacaaataaccattctgagacaatctgacagatgactcagcaagtgggctgccaggtgatgtggcttttcctaaggcaacccagtgaactgctgaagaaaggggaactgagaagtgaaccaagatnnnnnnnnnnnnnnnnnnnnnnnnnnncctcttttcaatgggaaaaggtgtaggccactcctcctgtctgctggctagatgcagatgagcctgcagggggctccgtgcacagggagttggcagagcaatgagaatgacagagcctgggtcactgcctttctgtggagaagatcatttacccaacacacacatgagcaagcattgtatcatcttaagccactgagatgcagggattgttggttacagcagttatcttcccctgactgaaataaaagggatatgaacactcacaagacttttaggggagaagggcactatgctgttccttcctcatgcccaggaatcaaaggcgtgcagggtgaggctctaccacagctgcacatccttagtgagatggggctttaacatggaacactcactgatggatcctttgctggctgaaaggggcagtgtagcagtcattctcctccaggtctggcagtgtctccttgtccagcctcattggcttcttaggtaaccat

SEQ ID NO: 323802 - DNA, 823 bp, Homo Sapiens; identical to SEQ ID NO: 150595
  misc_feature (137)..(137): n is a, c, g, or t
  misc_feature (144)..(145): n is a, c, g, or t
  misc_feature (147)..(148): n is a, c, g, or t
  misc_feature (154)..(155): n is a, c, g, or t

SEQ ID NO: 323803 - DNA, 399 bp, Homo Sapiens
gagaaagtagggtggccctgaaaagggccttttattggtagaaaaggacgctcaaccaccgaaaccgtagagggtgcggccctggcgcttgagcgcgtaagaccacatccatggcggtgaccgtcttgcgcttggcgtgctctgtataggtcacggcgtcccggatcacgttctccaggaacaccttcagcaccccgcgagtctcctcgtagatgaggccggagatgcgcttcacgccgccgcggcgagcaaggcgccggatggccggcttggtgatgccctggatattgtcgcgcagtactttacggtggcgcttagcgccgcctttgccaagacccttcccgcctttgccgcggccagacatgacgagcaagaggagtctcacccaacgctttgtcc

SEQ ID NO: 323804 - DNA, 735 bp, Homo Sapiens
  misc_feature (20)..(20): n is a, c, g, or t
  misc_feature (27)..(27): n is a, c, g, or t
  misc_feature (35)..(35): n is a, c, g, or t
  misc_feature (326)..(336): n is a, c, g, or t
  misc_feature (532)..(532): n is a, c, g, or t
  misc_feature (633)..(633): n is a, c, g, or t
  misc_feature (691)..(691): n is a, c, g, or t
  misc_feature (700)..(700): n is a, c, g, or t
  misc_feature (705)..(705): n is a, c, g, or t
  misc_feature (724)..(724): n is a, c, g, or t
acccctcaaaagtggccaanagccagntctctcgntccctcccaaagccccacaatcagaagatgaagctcacttggggcagtagctgatgcaacttcccaccttgctctcaggtggaacagaggtattttgggtctctctagcctgaaatgtcatcctcaactgctactgagtttaggggagggggaatgtcttgacagacatcactgcattgccctggaccgcctcctttatcccagtgtttgaggtacaagtaagaaggctgaccagcacctgtaacactgactttatttttaagtctgaaaatgtcttgggaaagttttacnnnnnnnnnnntcaacagaagcaagttatgaaaatatttgaccagcttcatctttggttatttcttattgcagctctgtaaggacagactgttcccaaagctccagccatggcaggaagggaagcaaatcagtccctgtataaaccatttaaccaattgaatgtatcacatgttgataaatacatagaagcaggccctagggcttancaaaaccagccccactcccaaccacaaggttgaaagtcttatggggggcagaacattaaggactcctttataaatatggaaaatagggttaatcaacgggnaagggtctttggatagggttaggctaggggccttgaccaccacgttggcttggtggtncccttggcnagggntttaggtgacgtggggttngacctggcggt

SEQ ID NO: 323805 - DNA, 653 bp, Homo Sapiens
  misc_feature (185)..(202): n is a, c, g, or t
acagaatcagtataaaatagcagttgatttctccataattatcagaattatttatacttgaggtcttggctaagtggggctgaaatcaacaaaaggtcttggactgttggctcagaaatcatcctagaaagcccgccctgttgatatctgtcatgcttagctcttatgagatgacccagtccttnnnnnnnnnnnnnnnnnngaatctctctttattcattctttggaggcttgaagtgaattcggcagcgttcattaaacaccttccagctcctgtcatttaccacttcttcaacattcagttctgactgcatccatttcaactttgtctgctcttttctaagttgttttaataatgttaaatcgtccaaattcttttctctctcttctcggaggttttttactactgctgaagtctgggctatacagttttttatgactctgtctctactggcatgagctgccatcaaagactcataaagttgtttacaggtttggctggcatcaattttccctgcaaaggaagctgttggaaccgtagtgtttaattcatgtactattctgtcatcaattgtcctcatcaccttgagtaattcctggaactcggcgaactcctcacagttcacaccgccactgggcgccgccatattccc

SEQ ID NO: 323806 - DNA, 1195 bp, Homo Sapiens
  misc_feature (279)..(291): n is a, c, g, or t
  misc_feature (434)..(444): n is a, c, g, or t
  misc_feature (605)..(622): n is a, c, g, or t
  misc_feature (664)..(725): n is a, c, g, or t
  misc_feature (1153)..(1153): n is a, c, g, or t
  misc_feature (1158)..(1158): n is a, c, g, or t
taagagggtggtggcccaaaaatagtgagggcacatattatttttttgtggcccgcgccgtttttgttcccccgcgtgtggggcccaaattttagttataccccacagagggggcgaccaaaagtgtgcgtggtatttcccccctggggcggattttacaggggttcccccacaaacccgcttttgtggaggggggggcttcccccttatcggcgaaaagaatattcgttaaaagaaaattttccccccccgtttttttctgggaaacaaatgtccccnnnnnnnnnnnnntgtataatttttaatatttggggggccgtcccctggggacccccccttgtgtggatgagacccccccgaaagaccccctccgagaaacgccccgtttgggagtttttttcaaaaaaccgcccggtgttccccccccggggggnnnnnnnnnnnggggggggaacgcccaaccccctttttgcctatgccccggttttttcttttggaaacccaggttttgccctgttttcactttcttatgcggggggccccgcgccccaaacgaaaagttttttaaaagtttttttagggggcggggcggcccgcacaagcannnnnnnnnnnnnnnnnnccgttttgggggcgtttcctccgttggtttgttttgttgtgnnnnnnnnnnnnnnnnnnnnnnnnnnnnnnnnnnnnnnnnnnnnnnnnnnnnnnnnnnnnnngcaaacaattaaactttatttgaaccttaaaaatttgcagagtggaacattattgtaagatctaatggcaatagagtacaaattcagtacagagcaaataatcaagcaaaatgctatataaaatatgacttacaatcacctttgaaaaaaattagctctctaactgttcacagaaaaacaaataaaagctaagcaaacataatgagaccatagcaattagcatattttctaacaagccatgttgtttaaatttatattaatgatattattatgatcttgaagagtatgtgatatattgtcaagggtgtaaagaaaactctccctggtttgtatacaaatggtttcatcaaatggaatataaagcagtcatggaattggaaaagtaatggattatttgtcctgtccactcccggttttaagtcctttcnttccnttcctatggtctcccacctatattccagtttttaaaa

SEQ ID NO: 323807 - DNA, 896 bp, Homo Sapiens
aattataattgtataaaatttaaattttatgatcatgtctggacctttttacacttaacacaatggaaatgttcatattcatttttttccccaaaggaaaaatttctgaatcatcactatgttgcacagtagaatagaaatatgaattcaggtacttagtcaagtttctaaagaatgcaaataacagacatgatttaacttccaaaatctgaagtcatcaacatgattttgtagtactctatctcaggttttacctaaaaattcgttattattcagataaagatagctccctaatcacatgtttttaaaaagcctctgccccacgacaacttcctgagatctgtgaagaaactgcagtcttgtgatcagactccatataggactggcagttttgtaatcgtagggaaaaaacggtgactgattttacgtgtcaatcagttgtagtctgctgatctgattagaagccttgacaaatgcctggtggcgattgcaaataactgccaagcatatagggatgatacagtagcccactgttttgggatcagctcttgtacaagagtataggaacaaaaacatctgtaagtaaggtaccagaaaaataactgtccacacccaaaaaggcaaggagagtaattgagctttcaaggagtgtgtccatgtggttccttcaaggggctcctcagggtgctgttgaatgtgttccaaggccagcctgttgtaagtctcactgatttcaaaaacatagtaaaatgctgctgcactggctaacagatacaatcccactccaatccatcccatccgctgacggaagttcatcattctccatgctctgtgccttcctgtcccgtggtggccagcccgcccgccgtcccggatgccgccgcagtcggagcccc

SEQ ID NO: 323808 - DNA, 415 bp, Homo Sapiens
ttttgacttaaaacaacacaaatttattcccttagagttctaaaatcagccagaattataaaattagcctcactgagccagtccaggtgggagcagggctggggcttccagggctctgtgggaggatgcatttcctggctctgaggtggcctggactctgtggcttgagctgccctcctcaactccagtttcctgctccatcgctacacctccaacctcctctcccgtcacctgctcttctgttatacagacccgggttaggacatcaagccctcctgaacaagctgggataatcttcctgggcgaaagatccttaacttcattacatctgcaaagcccctttgggccatacaaggttaattttgacaggttccggggattagggacatggggcattttggggagggccactact

SEQ ID NO: 323809 - DNA, 221 bp, Homo Sapiens; identical to SEQ ID NO: 97895

SEQ ID NO: 323810 - DNA, 765 bp, Homo Sapiens
  misc_feature (630)..(630): n is a, c, g, or t
taaggagtacaagagtagctttatcatggatttagggctgtggttacaaggaagctgtaaggaataaaatgactcccatgaagacgtaccgtgcggacgagtggaaggagaaatttggccattacaaagacacaggaatatgttaagaagtgaggggcaggatgaaatcatctagggtaggtatttagagggagggcgccgtgcaaaataaaatcctcactatgaaacaaaggcggaggcaggaggctgcgttgggtggaagcagcggaggaaggagacgaaagggattgtcattttcatgtcgtggctttttagaagacagccatgtcctctactctgattctatcaaaatgtgttctcggggtgctggtaacgttcagccaacgaaataattcctatggcggcagtaggaataacaaaacgcagaagcgggaacgatgtctttttattcctccccagacgcaaacgtggatgcatgaggtttggtaacaggcaaagtcatctggttaacgtgactgatgcaaaaagtcccggcctgggcaaaaagaagtcactgggtgaatgggatggatcagactccctgtcctgagggggagatggtttcttgcagaacgaggtgaaggaggtggnttctgctcagcagtcaacagtggccacatctccacctgcagcgacttgatggcttccgtgtccttttcgtgggtagccatgaccaaagactggagcagcagaaagagctcctcgggaagctggccgcctcgtgcc

SEQ ID NO: 323811 - DNA, 812 bp, Homo Sapiens; identical to SEQ ID NO: 150871
  misc_feature (158)..(158): n is a, c, g, or t
  misc_feature (689)..(722): n is a, c, g, or t

SEQ ID NO: 323812 - DNA, 777 bp, Homo Sapiens
  misc_feature (42)..(42): n is a, c, g, or t
  misc_feature (423)..(424): n is a, c, g, or t
  misc_feature (426)..(426): n is a, c, g, or t
  misc_feature (428)..(496): n is a, c, g, or t
  misc_feature (498)..(500): n is a, c, g, or t
  misc_feature (502)..(504): n is a, c, g, or t
  misc_feature (506)..(510): n is a, c, g, or t
  misc_feature (513)..(515): n is a, c, g, or t
  misc_feature (525)..(541): n is a, c, g, or t
  misc_feature (548)..(548): n is a, c, g, or t
  misc_feature (555)..(555): n is a, c, g, or t
  misc_feature (606)..(606): n is a, c, g, or t
  misc_feature (642)..(650): n is a, c, g, or t
ttaaagaaacgggcctgccctagtcaaaatgccaccttgaancctgtggccaaaaacccaagtgtggtctttcaccttcagtgtgttagcatccccagcacccgggatggggtttgtgggcaagttgattttgcccacactgtagggccccaggtggtccccattgcccaccgtgaagccaaattctagcccaagtctggtagagcagtcgggcagctagttttcgggggaggatgatgtggtgggacagaggacctcagtggcctattacggagccctcttcccagactaaattcatagccgagagctcggggggatggtagagttaaaatttaaaataattttctaaattctgtatttggatattagtgtttaagtggtaatttggcaacagtttataaagtgatgttctgaatactatannanannnnnnnnnnnnnnnnnnnnnnnnnnnnnnnnnnnnnnnnnnnnnnnnnnnnnnnnnnnnnnnnnnnnnannnannnannnnnaannnaacaaccacnnnnnnnnnnnnnnnnnaattttntatttgncccccgggcccccaaacgtgtttccataaattggccccccttttgttcccntccggtggtgggggggccctcgccccctatgtagannnnnnnnnaaccccacatcggtgtgtcggggggcgccccccccgcgggcttccttgaacaccactgcaaacgtgtctgctcctgtaacaaaaataactccgttttcttacaaacacgggggtttaattcctaaac

SEQ ID NO: 323813 - DNA, 398 bp, Homo Sapiens
tgatttttttctttaatagtaaaataatatacgtcttggaaaatacagcatacaaaatacagaaaatataattgagcacttttatgagcatatcgatcattgaatcgcgagtctgcatcgcctatctctccgcgtctcttgcgtgcgtgtaggtatataaatggtgtataggcttgtgggtgtgcatgcatagacagtccttcttgggtactcataagggggctcagaccctcaggtgcccctgagtcttaaccccaccccttcttcatccgtccctgttccctgaagacgacccatgaaggtgactcttcattgaggagcctctgggaggctggggagcttttagagtaaggctttgcaatgtaaccgtgaggtagctatgatcatccttatttccc

SEQ ID NO: 323814 - DNA, 840 bp, Homo Sapiens
  misc_feature (138)..(218): n is a, c, g, or t
  misc_feature (220)..(227): n is a, c, g, or t
  misc_feature (230)..(230): n is a, c, g, or t
  misc_feature (232)..(233): n is a, c, g, or t
  misc_feature (404)..(437): n is a, c, g, or t
gggggggaatcccaacccttttcttttccgggttttcttgggaaaaggtttggccctttttcctttccttttggggccgcgggccaaaagaaaggttttaaaaaatttttgaggggcgaagggggcccccaaagtgtnnnnnnnnnnnnnnnnnnnnnnnnnnnnnnnnnnnnnnnnnnnnnnnnnnnnnnnnnnnnnnnnnnnnnnnnnnnnnnnnngnnnnnnnnttntnntaaagggaaaaatgtttaattttattgctgactatgaacacattgccatttaatccagattattttaattctgatgctaaggccatccattgtcttttgttaggagtcaaacaaaattttagtaaccaaaacatattttcaataaaattttatatgtatataagtaaatannnnnnnnnnnnnnnnnnnnnnnnnnnnnnnnnngcaccaagaacctatgtaaaatttcatcatacaatttctatgcaagctgcttgattacagaaaactgttcaaactgttcatcaaaaactgagtgggattttccattgatatttcagatattcaaatcaacccatattctgagtatcaatctgaattgcacaggttaagatgtgaacccttcacatagtgttgaagatgtgttgaaatctgtacttgaattggcattgttttcctcagagttaggctgccttcatgagaaatatcttctatccctgagagatcagctacatcaagatggctcatcagctaaatcacgttggtcaaaatacctgctaaccaagcagattaataaattcaaagcaggaaccctctcatcatctttgctatccactaagagcctcac

SEQ ID NO: 323815 - DNA, 336 bp, Homo Sapiens
acaggaacacagatttgatgttttaataaaaatacgatttctacaaaaggtgcttaacacggcccaggacgggctgtccggttggagtcagccgtaggacccctgaaggatttacaaagacagagccggctcaccagcacactcctgccagcaccgggacccactgcgaacaaagacagagccggctccccagcacgctcctgctagccctgggacccactgtgagccactgcggggtgtccttcatttaaaaaaagtctggactgtgacactgcagaaggagtctgaaagcccaattcctgaatccctgcgttagaactgagagttcaggccggg

SEQ ID NO: 323816 - DNA, 861 bp, Homo Sapiens
  misc_feature (399)..(399): n is a, c, g, or t
tattttcgagctaagccagggttaccagggtagggggcatgggttaccatgttttagggtcaacttccctttttcgggggttgaattggtttgttctttattgccggggggttgggttaggggaaaagcgaagccagaagtaaccatggagtgggtgcagcctcccttgtagaacctggtttcgggagcttgggggcagttcacctgggtctgtgacggtcattttcttgacatccatgttattagaagtcaggatattttttagagagtccactgtttctggagggagattagggttttcttgccaagatccaagcaaaatcccacgtgaaaaagttggatgatgcaggtacaggaatacacgagggcatagttctcatagtcggtggccaggatccnagtacggttccgatggcataaaccaggaaaacttaacttccaagccttggcaggctctgtgaggttaacttggggtggcttcaccttcgatttgattcacaagttccatcagctctcaactccctggtttaacactttgatctttccgttttcccattagtgagtagttggccctggatgcagcgtccattctcaaaggttgttgggatcttctcaatttcgtaccatcttccgagatacttattcacgtcaaaattctcctgcaccggaggattggggcacttcccaagatgaaatgcttgtccctctgccgcaccgaagaggccagccagtgcggaaagcagcagcagcagcatcaccatcttggggctgggtggctggagaagggacctggagcttttctttcaagatgaaggcagtttccagatgcagaatcagccgatttgagatgcctgtcttggt

SEQ ID NO: 323817 - DNA, 499 bp, Homo Sapiens
  misc_feature (116)..(135): n is a, c, g, or t
  misc_feature (238)..(262): n is a, c, g, or t
gcgagcacagcaggtcagcaacaagtttattttgcagctagcaaggtaacagggtagggcatggttacatgtttaggtcaacttcctttgtcgtggttgattggtttgtctttatnnnnnnnnnnnnnnnnnnnnaaagcgacgagaagtaacatggagtgggtgcagcctccctgtagaacctggttacgagagcttggggcagttcacctggtctgtgaccgtcattttcttgacnnnnnnnnnnnnnnnnnnnnnnnnnttttttagagagtccactgtttctgtagggagattagggtttctttccaagattcaagcaaaatccacgtgaaaaagttggatgatgcaggtacagggatacacgagggcatagttctcatagtcggtggccaggatccagtacggtgccgatggcataaaccaggaaaacttaacttccagcttggcaggctctgtgaggttaactggggtggcttcaccttcgatttgattcaca

SEQ ID NO: 323818 - DNA, 580 bp, Homo Sapiens; identical to SEQ ID NO: 130701

SEQ ID NO: 323819 - DNA, 597 bp, Homo Sapiens
ttggctacattaaacctttattcaacaaaatcccataaagtaaaaagaaaagtcacaagatagactagaagatatttgcaacatataaaactgacaaatgattgatgtctagaataaaagaactcctaaaaattattcagagaaaaataattcaatacaaagttgagcacaggatatgaacaggttcttcacaataaaatgtccattagaatgaaggatttaacgagaattgaggaaaatgcaaactaaagtcataataaaacaccattccatactcatgtaattcacaaaaactcacatttactttgaagagcaatttggcaatgtctataaggctaaatgtgtttattctgtgatacgtcttaggtaacacgcagtgcgcccaatgcagaagaatgttccactacagtgttataatacagaaactggcaacaacttcatgccttcaactggagaacagataaattatggtagttcccgtaattgaattctgctacacaggactaaaattaatgaacgagagcttcaggatataattataccaataatgaggtggaaaaagctgtagaatgagcaagtatgaggcttaaaaatacc

SEQ ID NO: 323820 - DNA, 737 bp, Homo Sapiens
  misc_feature (101)..(110): n is a, c, g, or t
  misc_feature (248)..(345): n is a, c, g, or t
  misc_feature (347)..(347): n is a, c, g, or t
  misc_feature (614)..(614): n is a, c, g, or t
  misc_feature (713)..(713): n is a, c, g, or t
  misc_feature (721)..(721): n is a, c, g, or t
gggagcccccctggggcccccgtgtggaaagattccggaaaggccctcccggaccccccctctgggttttttttcaaaacgcttcggtttccccccggggnnnnnnnnnnggtgggattcccaaccccttttcctttcccgggtttttctttgggaacacgtttggcccagtttcctttccttttggggcccggcgcccaaagagaaggttttaaaaaattttttagggggccaagggcgccccccannnnnnnnnnnnnnnnnnnnnnnnnnnnnnnnnnnnnnnnnnnnnnnnnnnnnnnnnnnnnnnnnnnnnnnnnnnnnnnnnnnnnnnnnnnnnnnnnntnttgcagcttttaaaatataacatttattgcttaaatggtttgatacagaacagctttcttctcattctgaatttggaagttctatacaactgaatacaaagaggaacaaaaagtaccaaaaccaaacttgtgattctctgttcatgtggcataaaccagttttgtacataacatgtagcagcagtttttaagttccctttagaaaaatatgaattctacaaatttattattgtttcctgtttaatgcatgggctgaaatcactaggntcaatttccttcttgaaggaaagggggagagggaaagagacggaacagaggggtcagaacgcatggggggaatcttcccaaaactgggccatccgactntttacggnggcttccccagcgctt

SEQ ID NO: 323821 - DNA, 323 bp, Homo Sapiens; identical to SEQ ID NO: 150636

SEQ ID NO: 323822 - DNA, 893 bp, Homo Sapiens; identical to SEQ ID NO: 149577
  misc_feature (249)..(265): n is a, c, g, or t
  misc_feature (276)..(279): n is a, c, g, or t
  misc_feature (303)..(381): n is a, c, g, or t
  misc_feature (383)..(383): n is a, c, g, or t
  misc_feature (386)..(390): n is a, c, g, or t
  misc_feature (394)..(410): n is a, c, g, or t
  misc_feature (412)..(418): n is a, c, g, or t

SEQ ID NO: 323823 - DNA, 498 bp, Homo Sapiens
  misc_feature (24)..(24): n is a, c, g, or t
  misc_feature (67)..(67): n is a, c, g, or t
  misc_feature (87)..(87): n is a, c, g, or t
  misc_feature (104)..(104): n is a, c, g, or t
  misc_feature (141)..(141): n is a, c, g, or t
  misc_feature (209)..(209): n is a, c, g, or t
  misc_feature (470)..(470): n is a, c, g, or t
ccttttttggattttcaacgaacntcacaattttattcaccagacaagacaaaagggaccaaggacnagaccttttgcttcaactgnggacccccaagggtctngcaagttcccaaaagaggtgatggtgtccagtgtgtngaaacgggggacagggaggccgggggcgtccccaccaagtctccatcccttctggccaactgtccgcnggcctttttttccaagtcgtcctgccttaagacacatgttggggtgagcggttcctaaccagcatcaggggttctgggggcgggcgatgggggaggaaggggcagtccagggccccccactccttagtgtcaagggcgtgaaggggacgggtgggtagacagaggaggtggctccttcaacttccctcctccattctgcaaaccggggagctcaggcggagcggcggagggcagggcggcgaaggtcaggagccaggcccnccagcccgcgcaggtgagtttgctgtct

SEQ ID NO: 323824 - DNA, 558 bp, Homo Sapiens
gttggtttggtttttgcattcatgcagtctttattaatctgacaaatacagaaaatctgcaatcagctatcaaaattatatcttaccaagaatttgaaaggtatttataaaaaaggtgtattcacagtctgtctgaattaagtacaaagcagtgtccacagaagcagaaggcagacaacatgtgagagtaaatgatcccactgaaaccctcaccccagcacctccaaggacaccaaaaacaagacagtcctgtacttgctactatatgcagctgactttgaaactgcctagtctcaacaattacgtatttcaaaaggaaaattgctttctgggaaatcgtccctgctacacagacacacagaccaactggcaatgctgccaccacatgtcagggctcagggtggacccagcacatccactaagaggcaccatgctgcccaaggctgtgggagacagctttgatgttcaagaaagaggttcatttcagcaccagggtgcttttttatatgcaaatctgaggtgtttcccgttagaggagaggactatgcagatgatccc

SEQ ID NO: 323825 - DNA, 1095 bp, Homo Sapiens
  misc_feature (120)..(120): n is a, c, g, or t
  misc_feature (130)..(130): n is a, c, g, or t
  misc_feature (200)..(200): n is a, c, g, or t
gaaatcgatggggcgggccggggtaccagggctcccatcccatatgggagcagggtttaggtcgtcgacagcgaactgttggcgtgcgaaaacctcggacgtgatgtgcccaacgggggnacccgggggnggaccaacagcaccatgtaccacaggtaacctggccgcgcctcgtgcgccgtccggagacacccgtcccncccttttacgactacgagggtagcgcggccagcgcgatcagagggcgtggctcgtcgaggatgaagtctccccctttccgtcgccgcattctcgcgggcgccccacgcggcaacggcccctcggaggttttgcgccgggaccacgaggggggcgggctcccagccctcacacatcggggcggagagggagagtttccccaaagacccccgcgcttagtgtgcacaagtggggaacgcacgggggtatgtctcccctctatgggacaaacgccaaacacctgacgtggcgcgcaaggggttcgcccctctcagccttagccgtgggcccccgcggcgcgcgccaaaaggaaaaagggtttctggggaaaagacctcccttgggggagcacggaaggcagggccgaacaaggggatgggcagggcggcccgggggcgggatgcgtctccggtctctttcatatgattttattttcttccttcgaccataataatatgatatccaaattttgtcttaaccggtgggtctgtaaacacaggcttatccatcccacttacaggcaaggcaaatgctgcttcttgaaatggtcccaccatggaccctctggtcatccaacccaagtcacccccttgcctggctttatcttcactatactgtgcggccacttcattgaatctcatcccagactttaacttttccatggcttccatgattttgccatgtttttcacatagaatgtgtctgacctttactgcattgccaccacctttgggaccttgagccttcttgtcagcactgtcactcccagaggctgctccccctttccccgcttttccagaaccactttttcctttgggcggcatcttggaagcttgttgttgaactctgaactgcccc

SEQ ID NO: 323826 - DNA, 518 bp, Homo Sapiens
tagactgaacacataagtactctcaacactgctggactttgaagttagccgtgcaagtttggtcatgcataggttttgacatagatgacccttattctactatttacaagttggacatttctgcttttgagatctttaaaccaaaatatcgctacaaccaatggttgaacaaaggaatgatccctacttctgtgtttcttctgtggaggatggagaatttttatcttattttattatttgtcatttttactttgctttccttaccttgcagagaaaattataaataataagagcaacataccccttgcctggctttatcttcactatactgtgcggccacttcattgaatctcatcccagactttaacttttccatggcttccatgattttgccatgtttttcacatagaatgtgtctgacctttactgcattgccaccacctttgggaccttgagccttcttgtcagcactgtcactcccagaggctgctccccctttccccgcttttccagaacca

SEQ ID NO: 323827 - DNA, 945 bp, Homo Sapiens
  misc_feature (640)..(640): n is a, c, g, or t
  misc_feature (839)..(839): n is a, c, g, or t
gggaaacggaagtggcgtacggcatgcgccggtggcgtgatggagcggcagcagcagcagcaacagcaactgcgaaacctgcgtgacttcctgttggtctacaatcggatgacagaactctgcttccagcgctgtgtgcccagcttgcaccaccgagctctggacgctgaggaggaggcctgtctgcacagctgtgctgggaagctgatccattccaaccaccgcctcatggccgcttacgtgcagctcatgcctgccctggtacagcgccgcatcgcagactacgaggctgcctcggctgtgccaggcgttgctgctgaacagcctggggtctctccatcaggcagctagccatacccaaccccaggaaggaaggccttggatggaccctcagattgaaggacccggtggaccttggggttggtgaatcctaaacagagagaattcgaggttgcctgaaagctgggtgtccttactccttttcctggagccaatatacccagtttttactcagtttgatttatattctgggcaaggaagctttgcctactttattggcacaatccgttgttctgtcgtttagtgcatatctgctggcttcagccctggcagctgagaaattgttttctatatgtagaanggaaaacctgagcatttgcaggcatctgggttaaagcagggtctgtgtgtacaattttaaaacgggtaatatgtcctgctcttagttcatcttcacaacaaaactatgagtaagcggtattagcctcactttacagatgagggagccaagattccagacagtacccagaaggtcattttataacacagggagattggtntcctgcccaggatgaccgaaaaatgggaggctctggtctaagttggccttaaagtctgactggacctccatgggctccataacccgtgagccaaggtatttgtttg

SEQ ID NO: 323828 - DNA, 1294 bp, Homo Sapiens
  misc_feature (20)..(20): n is a, c, g, or t
  misc_feature (42)..(42): n is a, c, g, or t
ttcctccaaaaaaaggaaanaccagggtccaaccctgaatgnagggtggggtaatgggattcaaggaacagccagtaacaggtgtaaaaataactgcccatggtaattagagaaggaaatggacccagaaccccataaaggtgtgtgttggtgtgactgcgtgttggtgtgaggacttggctgaggttggaggccttgaatatttagtggcattcattacacaactgtttttctctagcagtttgaatgaaggaatggaaaagacagaataagtggaatgatacaaaaagatggccaatggtggcaagaaaatggggtgatggaatgatatgctatccaggctgctgaatacagaagtaaattacacaaagttggggggcgggggaggcaataatgagaaaagaatggagaggctggaattagaaatcacagaatgtactcaatgggaccaatgtggggcagatgatagaaagctggatttaggagtttctagacgagcagtgaaacattaacgtagcattaaagaagtcccgaagatttagttttatcccttttttatcataaccattgccatctacttctcccttcagtttctcttcctcggatttggctgcattgcagaatatggtccccagctctctcccttcctgattgcccgtgaagacaaccacacagacctttgttcaaaggttttactgctcatcctgagaagactgtacatactaagaaagtaacaacctggggaaatggctgaagttccaaaagactccagacttcttacaggtttcatctctcttctgtggccactaacttcccaaggaggcagtgcccaaaagccctgtggttttttgatccgttgtacttcgatagctcctcctttccctagatccagcagaactcccaaggtccaccgggtccttcaatctgagggtccatccaaggccttccttcctggggttgggtatggctagctgcctgatggagagaccccaggctgttcagcagcaacgcctggcacagccgaggcagcctcgtagtctgcgatgcggcgctgtaccagggcaggcatgagcttgcacgtaagcggccatgaggcggtggttggaatggatcagcttccccagcacagctgtgcagacaggcctcctcctcagcgtccagagctcggtggtgcaagcttgggcacacagcgctggaagcagagttctgtcatccgattgtagaccaacaggaagtcacgcaggtttcgcagttgctgttgctgctgctgctgccgctccatcacgccaccccc

SEQ ID NO: 323829 - DNA, 590 bp, Homo Sapiens
gtgttccagatccttttggggcaagggagtggggaacaggcactggccatgttgttacactgagatcaaacctgacagccgtttttaaaggtttaaccccaatcccaagtgctgaaaaaccagaggctgagggagatgtgtaagcttccacctcagtgttttactgagaccagcattggggcatatgaggcacaaggaatccagctctgttccctagaagccatccacaaggttttccttgtagacgtcatcactgtagacaatctgggtcctcttgtcccggtggcaacccttagggctgttctggacagcgagggagccccagacagacttgccagtagcggcatccagcatgggctgttttcgggctatgttgactttgagctgtacagactccacctgggtcccgttgagctcagcaacggcctgatctgctgactccatcttttcataggtgacgaaggcacagtttctgggtgggtccatggagaggtcaatgatgtttccaaaaggagagaaggccccacggagaagggtgggtgtcatgtcttctccatatacatagagagtattccctttcctaggggccc

SEQ ID NO: 323830 - DNA, 552 bp, Homo Sapiens
taaatctctatttaacccttcaaagtttcctttgcagccatatgcatttctaggtggctctacctgtagaaggctgcactttccaagcggcgagggactttaattctcactttccaccactccagcctctgctggctgccttgaatttttgcttccatcctctgacttctttttcttctgtgcttttcgttctaggttaatctgagcaatctcttcacttttgtctgtgatgtattttagcagtgaattactcctcctggctaagagcttcacatcttcagtgttaattgtggttcttttcgcatgtcttgcaaacatttcaaggtctttggcaaaattttcacactgtcggaaagtcagctccgaaatggccgcaatggtctgtttgctgaactgcatctctttgtccaatgcaacttcctcgcaaagacaacccacagtatagtgaactgctgcctttagcctctgttggtaagagaatcgctgctgctcctcggtctccgcctcctcctccatcactgcgggccgaccctgggcaaacgcaggaggccc

SEQ ID NO: 323831 - DNA, 447 bp, Homo Sapiens
  misc_feature (308)..(389): n is a, c, g, or t
tttaagaatggacatcattttatttcattttaatttagttttgtttaattctagtttcagttttgatgatattttgccatgcttcccaatttttttctttgataacaacataattcagggagaaagtacaaatttgccacaggttgaacacttaatttgtgttccttaaaaaataatgctgtgcttagtttattgccaggaaacttcttgcttgatgctttggtctgttttgtttttaatgttttaaacaaagaatattccggcctttacttcagagtttcttccaaagatacatatgcattttggannnnnnnnnnnnnnnnnnnnnnnnnnnnnnnnnnnnnnnnnnnnnnnnnnnnnnnnnnnnnnnnnnnnnnnnnnnnnnnnnnttggggccttgctgtatcctcacgtggcataaagagagctcttgtctcttcattccct

SEQ ID NO: 323832 - DNA, 1355 bp, Homo Sapiens
  misc_feature (42)..(42): n is a, c, g, or t
  misc_feature (156)..(156): n is a, c, g, or t
  misc_feature (581)..(591): n is a, c, g, or t
cctgcgggcagcgcgaaaaggatgattttgttatacgtccgncaaccacatgccgtccgacaccacgcaaggggagtgctcgtgaagaaaataataccgcccgccgtgcgtgccgcgagtattttcccagcggttgtgtctcatattcctattatnccacccgcgttcttgctgaggggagacggggctcttcttcccacaacatgttgtcggcggcgcgacagagtaaaaatgcgtgtgatctagagaatggacagatttttccccacctcccacgcagttgttttgttagtgccgcgaaagtgagcatgttgcccgccccacggtgcagcgcgcggggtagccccgtaacacaattgtcgagaaatatgatccgggggcagctctctcgcgctctctatgcgtacgactcatccccgcggttgtcgggacaaagcgataattccccacagcgctacataatggggtgccccctctctcagagagaagacgtcctcaccgactctggcgggggagagtatattgtgtgtatctcacagagagaacacgccgcttcggcagtgtgtggtcgctcgcccccnnnnnnnnnnntttgtttttattatctcgggggtgagaagaatatccgcaagggcccgcttatagtccatcggcacccacgggggttttccctttagggagaaaccaaggcttatggggacccaggggttcccctgttgccctatcggagggcccccgccgcgcgcccaaaaccgaaatgttctttagaaaagttttttttgaggggccgagaggccgaccccacagggtttatgcatttgtgcgcgcgggccattgcgtcttgttccaggcgcgcagctttttcggcgggcgtcggggcgggggcagcaaaaataaatttttattaaaaggcagtagagtctgagcaggaagacagtacaaagaatgtaaacaatgtaaacatcactacattcagctcagcctgattgaatgctgaaagacaactctaaatgctctacgtgcccttactagcaagatacattaattctattttacacagacaacaaacacactctaattttgattaggcaaaagtattttatcgaagtcgatcccagcgccaaatactggcatcatcacaaacagctataagaatgctgctatccctgctaaaactggtttgtcgaatagcagcaccacatttatgatgagtcagtgttgtacatttggctttatgaggatcttctacttctaaatcccaaacataaagtttgccaacttgattgcccaatgcaagcatcttttgccagaaatccatagaaaacctcatgtaccaaatgtcacactggctgccc

SEQ ID NO: 323833 - DNA, 409 bp, Homo Sapiens
  misc_feature (364)..(364): n is a, c, g, or t
acacagttccatatctctctaaagctttcttcacggcatgatttagaattgttttatttgtgttcctcatgctacaacacaaccttcaaagtcagcgaagtttataacattaatatgcttcctcaaaacatcaatttaggcaacccatagccagagcttctaaacttctacaatgcaacttcaacattcacaagagcacaatatgcttcaaatcccatctcaatgcaaatttaagaaaagcaaagcaaattgtattatcagtctaccaaaactcagtaagattctgtaatttaatatacctacttctcaactctctaaatttgtttctcaacactgggggagtttttaaaggatatcaatgccnggaattctactccaaggccaatttaaatcagggaccattaaaatc

SEQ ID NO: 323834 - DNA, 416 bp, Homo Sapiens
tttcctcttcttcccctgctgttccttgaccctcactaattccagcttcttgtttgggtgaattttctacagtaagttttgcaaattcatttggaaaattcttctctaaccattgtctacatttagcaacatcaggcatatattcacagtactctgttggtaatgaacagactccacaataaaggactcgaagtgggtaatcggcatctaacttggcactgttccttgggtctcctttgcagtcagccccgctggattcagaaatgtcagcagccatttcacaaacccaggcggtcgcacaggccccgccggctccgctcccgccgctatcgccagctgaaccaacacatgcaactcgtctccccggccagggccgcccgagcgcccgaccgccagcagcgctcccgcgagacccc

SEQ ID NO: 323835 - DNA, 502 bp, Homo Sapiens
  misc_feature (492)..(492): n is a, c, g, or t
ttcttgcaagtacaagggtaactttattgacccccagctgggcactgcttggcccctacatcattacccccctattttggctgttgcccccatggcactgcctgtcaacttctacaacctggtgatgtctggcatcaacccctcccaaagatggaggggattctcttgcgagtgatggtggcagctgtttcagggggcacagggctaaggctgagacgtgtcacctcaactgaagcagaagaggtggattatggcattggccacgaagaaaaggaaaatgcctccgcttatgttgctggatgctgaggggctgctggtttggctggtgtcgttttgtcctgagagtccagtttgtatctgtaccataaccaggaggctgatggtgagtaggaggaagaggaagcgcttcattttggtaggatcttcgtggctgtcttggtagcagctttttaggtgatctcagggctgtctggaggcttcttttggtgtagntgcttttgaa

SEQ ID NO: 323836 - DNA, 418 bp, Homo Sapiens
atttatttatttttagcaagaatgtacaattctttttgcaattttttgctaacaaaagacaaaaagaaatagtgctcccttcaatttagtagcaataaaatcatctatcttcatctctctcagagggcttagggagagtgaaaggaattagaggaacataaaccatgggtccttcaggtaaaataagtcatttcatagtgatggaggcaacagcaggctacgctcttgtctgcctgtacgctcagcatcagcatgccctgcccctcctcctcccacataaggtgcaccaaagccttcttttcttctacaacagagtcttccggtataaaggtggcaacagaaaattgttgctttgtccttttggggcatctcttgcatctcctgcttgttttgcttttggggtactataacttgtctc

SEQ ID NO: 323837 - DNA, 740 bp, Homo Sapiens
  misc_feature (475)..(475): n is a, c, g, or t
  misc_feature (650)..(686): n is a, c, g, or t
ggggggggaattcccaagccctctgttccatggccccgggtttcccctagggaaaccagcctagggcccaatttcacctttacctaccgtggccccgcggcccccaaacggaaatggttttgggaagttttttcgaggggccgaggcggcccgacaatttttcctctccgctctgttcgttctcccccaattaaaggatgtttatttagaaaagaaaaattagctttgacaagagacacctgcacatttgtgtagccaaggagatgtcagtgagagcagaaggtgaatccttcatggagactgaacacaggtggccagctgtggcagcgacagtgaacacatgtcagtgtcggcctgggggcagagtggttgaatgctttaagtctggtggagagcctgccttgctcagccctgttactacatgggaagtcactgtaggccacacatgtgcaactttacaactctcgggtttccntggaatgtgttttgggatgcactggccagtgggccgcaaatgcttggaagctaccatgatgcttcacagatgatgatcattttggtaactcaaaatataaatgcgggcttggtgcggtgacccatgcctgtaatcccagcactctgggaggcttgagcccaggactataagaccnnnnnnnnnnnnnnnnnnnnnnnnnnnnnnnnnnnnntatacagtagttcgcctggagccacagctacctgggaggctgagtttgggagcc

SEQ ID NO: 323838 - DNA, 562 bp, Homo Sapiens
ttttttgaaaaataaatgaaaaaaattttattgagtattactttatacatgcaaattgaaagtgaatctatattaagttgactattccacaataaaaacctatgaaatgggaatgatcaaagctgtctaacacaatactaatgtgttcaataaattatccagatgtttttccacaaatatttggattacctgaattagctgattcttcagcaaaagttaaattttagctttaatatggtagcagcaggatgctacttaaatttagaagaaaaacataagaataaaaaccctgaatagcatagccaaatcttccaagaaataagttcaccaaaaaagtagcatacacctatttggtatccagaggaggaaacaaaacacaggcacttaatcaacatccaccaagtgatcatcactaacattctattattaccagagtaactgtcgatatgtgaactgtagattagaacagacttacatatctaaaaacaaaccagtaatctataatatatacagaaatactaacttgaagtcacatttaaataccatcaacagtttggtgtcc

SEQ ID NO: 323839 - DNA, 468 bp, Homo Sapiens
  misc_feature (80)..(80): n is a, c, g, or t
ccccaaaaaagctttaaaaaaactgttgtggaagaatgcctttaaaaagcctcccctgccccggtgtggggaatggggtnccccccccttgtgaagggctgggaagccatggcacggcaatggattaaacacggccagagggaaacaaaggtgtgcctcctgaggcttccttccatatttcacccttcacccctcaccctgtgttcctcttcccctctctccccaataaaagggctccccattataaatgcccatgtacttctcttgggaaaatagacccccttgccctagagtaagttgttaactgagggctttaaacctggaggctcttcctgaaagtatgttcatgaataccccaagcatcaaggtctaaataattttcagaagattagaattgggtagatatactgttggatatagccatggtaaatttaactgaggaattaaatccttgttaattttggtgta

SEQ ID NO: 323840 - DNA, 753 bp, Homo Sapiens
  misc_feature (742)..(742): n is a, c, g, or t
tacaccaaaattaacaaggatttaattcctcagttaaatttaccatggctatatccaacagtatatctacccaattctaatcttctgaaaattatttagaccttgatgcttggggtattcatgaacatactttcaggaagagcctccaggtttaaagccctcagttaacaacttactctaggcaagggggtctattttcccaagagaagtacatggcatttataatgggagcccttttattgggagagagggaagagaacacaggtgagggtgaaggtgaaatatgaagaagctcagagcacacctttgttcctctgccgtgttaatccatgccgtgccatgctccagccctcacaaagagggggaccccatccccacaccaggcagggagcatttaaagcaatctcccacaacagatttttaaagcataattagagctcctgcccatgtaagtcataatgaaaagtctgctggatagctagagctgtagctatagctcaactttccaaaacaaacttattcttgtagacacatggttaaacataaaggagtgaagcataagctcagtaagactaactgggcttctaaatagtaccattatgaaaaagatacaatgcacttaatttctgtatctaactatttagaagtgaaaatgctccatacattacctatttcccctccccgaaaatcccctaaaaactgactaagaaatcttcagtattcacttgcgctagttgatatnctgtgccgaat

SEQ ID NO: 323841 - DNA, 868 bp, Homo Sapiens
  misc_feature (65)..(65): n is a, c, g, or t
  misc_feature (77)..(77): n is a, c, g, or t
  misc_feature (177)..(179): n is a, c, g, or t
  misc_feature (185)..(185): n is a, c, g, or t
  misc_feature (283)..(285): n is a, c, g, or t
  misc_feature (349)..(350): n is a, c, g, or t
  misc_feature (355)..(355): n is a, c, g, or t
  misc_feature (357)..(358): n is a, c, g, or t
  misc_feature (360)..(376): n is a, c, g, or t
ggcacattcctgagagtaggtgtgtattatctcaacacctcggcgcggcgcgcccgccgcgggcntctgattctcgnggtgagaaagagaactattacgggcggacggcgccgcgagccgcacagcacgcagacaacaccatcacgtgtctcgacgcgttgtgtttttctggggggnnngcggcnagacgaaaaagaaaggtaataaaaaaatttgtttcccgggcggggaagggcgcggcggaaacgaagcgtgctggcggcgtcaacgctcccgcccacgnnnccccccgcacttcgtgggtggtgcggcacgggggggctccgggctgtgtttgctcctctgactnnccctntnncnnnnnnnnnnnnnnnnntactgtaaaataagtttattagtggtaacgtgatagaatttattcccgatatctgatgttacaaactttagggtccttgagatatgcaggatccttgtatgtaactggcataaaccccattatttgagctctcttaattgcttttgtgatttctttctgtttcttcccacaaagacctgtaatgtgccttccataaatgcatccagtaaatggagaaacaaactgggacaaaagctgtacattcttataatctacatgctttccacacaagatacatttcttaagaggttctttataaggattttccattgaaatgggcaggtcctcattgctggatacctgttgtgaacaacctcttctccaaagcaccgtgtgagtcccgggatgtgtaaggctgacagcagccgttaccaagtgtgtcaacttcttcctccctagaccaccgcaaacagcaaccacagcggccatggttccgcgtttcttccactcccc

SEQ ID NO: 323842 - DNA, 590 bp, Homo Sapiens
cgttgtttcacacagaaccacttttattcaacatagataaaatgtgatgagtgttaacattttaaataagcaatctgcttaatggacattggtatgaaggggaagtgtcattctttacctcactcctcaaacacttttctatccaaaggttggtttgagtcagtattggcatcatacaaccacttactgtaaaataagtttattagtggtaacgtgatagaatttattcccgatatctgatgttacaaactttagggtccttgagatatgcaggatccttgtatgtaactggcataaaccccattatttgagctctcttaattgcttttgtgatttctttctgtttcttcccacaaagacctgtaatgtgccttccataaatgcatccagtaaatggagaaacaaactgggacaaaagcaggtcctcattgctggatacctgttgtgaacaacctcttctccaaagcaccgtgtgagtcccgggatgtgtaaggctgacagcagccgttaccaagtgtgtcaacttcttcctccctagaccaccgcaaacagcaaccacagcggccatggttccgcgtttcttccacccc

SEQ ID NO: 323843 - DNA, 971 bp, Homo Sapiens
  misc_feature (726)..(731): n is a, c, g, or t
  misc_feature (733)..(733): n is a, c, g, or t
  misc_feature (735)..(735): n is a, c, g, or t
  misc_feature (739)..(739): n is a, c, g, or t
  misc_feature (874)..(874): n is a, c, g, or t
cgaagtgctcaagagggaggtttcctcctgagtgaagagaagtgattctcccttgactctggctcctgcaccacaaatgttaccctcattggcttgaaaagcatccaagggtgcacagggagtatggccaactggacctgttgtcaccttaattgtcatgctggctggttggattttggggtggcagttggactaatgtgaaaaaaacattgctgaaaacctaaaaatgaaagtttgtgagtgtttattggttttcttaagagaaatgggactattttgctctcatgtgtaatgttttctatttaaatctttctttaaatatacccgctgttctctttccctgaactctcccccaggttctaggacaaatttaataacatgtaattctcctcaaatacttttgtatgtctcagtgttggtgttttcctccctaaaactaacattagggctgtgccacgggcatgactttatttttgttgggcttttttttccctgcttaaggagaggtgtcttttttggatatgagctatttattttgtgaaatgaaaattgttcacccaaatgattctcttataaactatttgtaaatgtcacttattcattagtgtttgacataatttttagaatatttattttgaatcaatcctttcattacgaaagacttgaagttttgtgtccatccttaccagccctggtcaagtcagtcccaataaatggtcagccccnnnnnngnanatcncacctaagctaccactacatcgcaaactggcgcgcgcgccccccaggcatacggtgttggcgcttcgccacccccacccacccacctctgcgctccccgcccctacgaccccaaactctcaccggaacatgtggngctaagtgtgttggggggccccctcgtggcccctccacaaaagaaatttttttaaaaacaacctcttttctgtgtgtgggcggcgcgcccggcaccc

SEQ ID NO: 323844 - DNA, 700 bp, Homo Sapiens
  misc_feature (180)..(208): n is a, c, g, or t
agtaccaaatgacttgggcgcgacccggaaacgcagttacaaatgagaataatttaaattctccgataattacagtatttacaacagcaggggagggagtcacctagtgcccctcttccaggctggacagatgcccactcacctcacgaccattctagaggccgaggcggccgacatgtnnnnnnnnnnnnnnnnnnnnnnnnnnnnngggatcacttttatttcaaacaattaaatacaaaccaatattttaccccttcatagatgaaatcacatcttttcaggatatgagtataaagtaacaagcctagggcagagcttgtactgacaaagtcctgaaactacaatgagaggaaacacattgctctacttcgggataagtcatgaccgagactcaatttcagagacgctctatgaacagaggtgcttgaagccacagtggcagaagggaaagatggggaagtgtgccgaagagcctccaggcatgacagacagtcccctgaccaagcacaagtaacaggccctttgggtctctgcttctcactggaaaatgatgaagcctagatctgatgactcctagtgccaacatttaacaaagttcgaaagttatgcaggacttcacacatgtacggaatggctgtatcacagaatattatgcgttagaaagttcacggtcactatacctagctctaaaattctc

SEQ ID NO: 323845 - DNA, 468 bp, Homo Sapiens
tgctcactgtcctggagtgcaccggcctctgcactgactcatttctggtcttggggccagtctcaggggaagctgggtggggaggtccctcctgccctaagtgcagctggactgtacagaacactccaagggccaatggcagttcagcgcaaggagagggagggcccacaggtcagaaaaagctccagagacctcacagcattgtagggcggggtggtgggccaaagttaggacactgcgtaaaacaggccatgccaccacctctacctgctcatgccaggagaatccataactgcctagagcctggggccctaccggtcgtgaggtgagtgggcatctgtccagcctggaagaggggcactaggtgactccctcccctgctgttgtaaatactgtaattatcggagaatttaaattattctcatttgtaactgcgtttccgggtcgcgccagagtcatttggtacta

SEQ ID NO: 323846 - DNA, 398 bp, Homo Sapiens
gaagttctcaggagaccgcgtattcttagattcagccgccgaagccatacagagtgcgcccctgacgttttagggcatatactacatccatggctgtgacagttttgcgcttggcgtgctccgtataggtgacggcgtctcgaataacgttctctaagaaaaccttaagcacacctcgagtctcctcatagataagaccggaaatgcgcttgacgccaccgcgccgagccaaacggcggatagccggttttgtaatgccctggatgttatcccggagcaccttacgatggcgcttagcaccacccttccccaagccttttccgcctttgccgcgaccagacatgattcctatcgcagtgcccggccgtaatggacactctgcgttgataccactgccc

SEQ ID NO: 323847 - DNA, 311 bp, Homo Sapiens
  misc_feature (44)..(58): n is a, c, g, or t
  misc_feature (69)..(172): n is a, c, g, or t
cttggggggccccgcccccaaaaaagtgtttaaaaaattttttnnnnnnnnnnnnnnncccaccaaggnnnnnnnnnnnnnnnnnnnnnnnnnnnnnnnnnnnnnnnnnnnnnnnnnnnnnnnnnnnnnnnnnnnnnnnnnnnnnnnnnnnnnnnnnnnnnnnnnnnnnnnntaaaatgagtatatatttgtctaataagcagaaaaatacaaataaaaacaaatcattagtagagcgtttctcataattactttaaaatgtcttagcataatgaatggtgcatacgctacaatttatccatccttattta

SEQ ID NO: 323848 - DNA, 806 bp, Homo Sapiens
  misc_feature (179)..(179): n is a, c, g, or t
  misc_feature (299)..(307): n is a, c, g, or t
gttggggggggaggaattctccaagagcccccttttgttccagtgccccagggattttcccttaggagaaccaagcttatgggcccatgttccccctttcccttacgggggccccgggcccccaaaacgaaaggttttagaaaggttttttgagggccgaaggcgggccgacaagggtntttttgttcgtgcttgtccttatttctggggtgggtgttttaaaaggtctctatttttattactcatcacacataacaggcccacattgctattttctgaagttttaaaagaacaaaccnnnnnnnnnttccactctctctttgttgaaccaaatattcccctgcttctgaattcattttgagggagattagaaagagacctgagattaacagcaacaataacaaaaagacatccaggaaacagctccttgtcattgctgtgccaggtaagctgtcctttgaagttcctcctgaaagctttgcttaggtaagatgtttttctgcctaagacaatgaagcattctcagagatctgctggatccacatcagaagaataaggaaaagaatggaattccaaagaactgaaagcctcgctgttggcttcttggctgggtccctgcaggacgtaatctcttatgtcacacgctgatggcaggtccaaagcactgctctcctctgacaggctgcctgaagtggcgtccctggctgccatagtcctctcctccaaagcactccagaaagactgaggagaaaagccgccaagccccccgacacactcaccatccgcaaccggaacgcggaagcccc

SEQ ID NO: 323849 - DNA, 762 bp, Homo Sapiens
  misc_feature (85)..(146): n is a, c, g, or t
  misc_feature (184)..(192): n is a, c, g, or t
  misc_feature (218)..(230): n is a, c, g, or t
  misc_feature (240)..(398): n is a, c, g, or t
gaggcccccttggggcccccctttttaaaggttccccgaaaaaacccccagaaatcccttttggtgttttttaaaaaccctcggnnnnnnnnnnnnnnnnnnnnnnnnnnnnnnnnnnnnnnnnnnnnnnnnnnnnnnnnnnnnnngggaaagatttggccccgttcccttttctttggggggnnnnnnnnnaaaaaaaggttttaaaaaattttttnnnnnnnnnnnnnccccccaagnnnnnnnnnnnnnnnnnnnnnnnnnnnnnnnnnnnnnnnnnnnnnnnnnnnnnnnnnnnnnnnnnnnnnnnnnnnnnnnnnnnnnnnnnnnnnnnnnnnnnnnnnnnnnnnnnnnnnnnnnnnnnnnnnnnnnnnnnnnnnnnnnnnnnnnnnnnnnnngcaagtttaataaatcatcatggtttatttaacaaggttatactacattagagttttatatatatacatgtatatgtgatatgaagagactgatgtacaatcaataagtcttaaatctctcttccatggatttcccccatctccccacttagcagtaaaaggcatttttaggtttatataaacacattctttacaactgccttcttaacagaaaattactgtagtatataaatagcactgagcatttagtaaataagttacaggccaataagttcaattgtgcagttgtgaaatctaatgtcaaagagtttttgaaaccttaagactgggtgatctgcaatgtttccaacatgtcttcgacccc

SEQ ID NO: 323850 - DNA, 730 bp, Homo Sapiens
tccgggacacacaattagtcctgctttgctgaaggaaagatatgcagcccaccagtcggaggctggagaaggagcagcagcagcttaaaccttaacccagagttatttttattttccagaacgtgttaggaactagtacttaaataatctcaagtccctgaggggccagagatcccaccatgcaaaatagcaaacagacccaagacttggggagaggcggtgagtgcatcagaaatggatgggtacatctgattcccaccacgcggggctcagcttagttagcaggagaccttcagactgagaaaaaatgcaagtctttttttggcctctaatatctgggaaggatggagggagctcaggagacacagaaaagatggcgtatgaatcctgtccggcctgaacgaggctggagttgtgcctctggatagcttcaagcactgatcagattgtcagcccccgctgcttgaacagatgctttagagcctcttccagttgccggtttgttccctgaagccccttcaccacctgcgctgcccactcgaagtattcctggactcgatgttctgaccatcctgcataagagtcgacagaaacttgctagcgtgatgtcaaggaaagcactgccttttccccacttcctggcaagcttggttcaaggccatgagttcctgatggaatgagctgtcctgaaaacttccccttggccccagctattgtatttttactgtat

SEQ ID NO: 323851 - DNA, 604 bp, Homo Sapiens
catcttttttgtggtgacagttgtattttaataaaggattatataagcccaattacagccaaactgttaaagcttttttttgtggttaaattctatggtaacaaaatcagttcaggggctttttttctgaacaaatgatcatgatccctcagtctttcccgtggcatgctcctaaaacaaccctctatgtctaatcagtcacctaagatattgagtggcaagtctttcacagttgctgcttataattcctaaatggtccatattgagtattttcatttctgggtaagggaaaaagcattttggtccattaattcacccactcgctcctggaggacattaaccaattctgctattacaaagacgtgagtgtcatcaatgtcttgaatgatgaacttcttccccagggcattggactcatccaagtacagcagaaactgcttcatggcaggatcacattctataagcactcctttcaagacgttgaccatgttttctcagaaggttcagatgacctgaagaatgctcggcccacagatgcagaagcgcctcggcgttgcccgaaacgcgtgggtcgacgatatcccgaaattccggaccgggtacc

SEQ ID NO: 323852 - DNA, 335 bp, Homo Sapiens
aaatggaagcctgcgaagttaatcatgcaagacattgatgcccactcacgtctttgtaatagcagaatatggttaacgtcctcccaggagcgagcgggtgaattaatggaccaaaatgctttttcccttacccagaaatgaaaatactcaatatggaccattcaaggaattataagcagcaaatgtgaaagacttgcacactcgatatctataggtgactgattagacgtagagggttgtttatagttgttttaggagcatgccacgggaaagaccaaagagatcatttgttcagaaaaaaacctggaactgattttgttataccatagaattaa

SEQ ID NO: 323853 - DNA, 517 bp, Homo Sapiens
ttccttcagtgtggtccttaagcatcaatgtttggtggttgtttctagcaagtcttttgcttcatttattttggctgctacgtaaggagatccacctttatctgggtgattcaaaatcatgactctcctatgagctgttctaatcttagccttgccagcagatgggcttacacctaaaataagaccagcttctcgcctactcattttctgttcaaatcctcctttatagtaggatgaaaagctaggagttgaaatcttctttgcagtttctgtgataacttgttctagaggtttccagatccgaaatgcgtagcgacctgcaaatgcaagagctgcaacacccagtcctacagctatcaaacttcttaccagtctctgctggtcgacgtcggcgtctggccgtttggccgagggctgcaagtactcagcgtagcgcaaactctcgccaactggagcgatgacaccacgggcagccatggcaaggcggcccggagactcaaggcgccgcggcagtccc

SEQ ID NO: 323854 - DNA, 1162 bp, Homo Sapiens
  misc_feature (198)..(210): n is a, c, g, or t
  misc_feature (334)..(358): n is a, c, g, or t
  misc_feature (514)..(585): n is a, c, g, or t
  misc_feature (1041)..(1041): n is a, c, g, or t
  misc_feature (1059)..(1059): n is a, c, g, or t
  misc_feature (1076)..(1076): n is a, c, g, or t
  misc_feature (1124)..(1124): n is a, c, g, or t
cccaacggcggccggagttattttaatgccggacagggggtgagccaaaggggtgtgtgaaaagtccgcttgggcgaattttcagggtttgcgtccatgtaccctgttggtggggagggggtttaccacagtttcggggggaggagacgctaaaaggagaatatcaaaccacgttctcttggaaaaaagtggtccaannnnnnnnnnnnntataatttggggatagggagcctcgctttttggaattcccggggtgaaaaggatccaaggaaaggggccttaagagactcccaatttgggttttgtttcacaggcccttcgggtttggcccgcnnnnnnnnnnnnnnnnnnnnnnnnnaattcaaagccccttgtcacaattcccagggttttccttgggaacgcggtaagggcccaggggcacctttgccttatgtggcccggcccgcccaaacgaaatgttttggaaaattttttgggggccgaaggcgggccgacaaatttttgtgtttannnnnnnnnnnnnnnnnnnnnnnnnnnnnnnnnnnnnnnnnnnnnnnnnnnnnnnnnnnnnnnnnnnnnnnnaggataagtaaaattattgcatttaatgtcattttcatgaaatgaaaatcatcaaattccttaatgttgtatcaaacgtaaacaataccagttcaaattagagggaatgtatgtcaacaccaacttttgacaaaaataagaaagctaaagccctacaatttatctaatttaggtcaggcaaccatggaaacaaaagaatattaaaattatttattttatcattatgcacattgaaggaaatcataacagacagtacagttcttttccaccataaaattatatacacccatttatttagctagaaacactagcttgagaggtactgatatattccatttgtgatactttacaatgtattagaataaaatcatgaaaaatttgcttcttgaactaaaaatttaagaattttagaaactggcatatttttctttaatgaacaattctacatatcctagnaatgttcttatgatgccnattacagttaaatatanttaaaaatatctattcaggggtgtgtgtgggggagggggagagagggnttttgtgctggggccggattcttgggcctaatgcacct

SEQ ID NO: 323855 - DNA, 626 bp, Homo Sapiens
  misc_feature (31)..(31): n is a, c, g, or t
tcgctttcttctcagcccgagctcttttccngttgttcagccttttcttcttcttgctgcacaagggctgcttccttctctgcagccttcattctctgctcattgacacgagctaatcgggtttcagttttctgaacagctatatcccaatcttctaaagaaccttctgtcctctccatggtgagtaacacttcgcagacgtgctctgggtagtcactggtgcactggacggcccggtgcagagccttccggcagtgctgggtgtcaccatgagctctttccaggttgtaatactctagccacatgttggcgtacttggcatttcctctggtcatgatgctatcccagagttcccgagctttctgcatgttattgcacagtcgagcctcaatcctagcccagttctgcataatcacgcagcttggatcaccactctcattgaaacgctcttccacctcctgcttcagatactccaaggcacgagtaaaggcggccctcaactcctccagctctttactggagtcttgtttgaaatcaacccttctcctcaggtaatcaaggtatgcctgccaaatctccacataatcagtggcctggatgaagccggcattcaaagctttctcgaa

SEQ ID NO: 323856 - DNA, 684 bp, Homo Sapiens; identical to SEQ ID NO: 152197

SEQ ID NO: 323857 - DNA, 580 bp, Homo Sapiens
  misc_feature (104)..(112): n is a, c, g, or t
ggggaaataggtgaaggctttacaccctttattatccataatggcttttggaattacgattgtgtgacatatagaacctttgatattttagatacagcctttannnnnnnnnccacgggaagttaaaaatccatcataagactccataagactttactagtcttgcatgtagactctaggagtttgtgatctgataaaagagtaacatgaaaatttactgtattgccctaatttcatacttccttgtacacaatgaatcactctgagaatctattccaagggttatatacacaaaagtgtcaagaataaaatgttctccactctcgcataaaaatgtgtacagtgtatcaggaatggaaaacttctaattttcctgggcccgggcttcatggatttctgctgccagaagatgaaagactccttctgctttattgctccattgttctgaggattaatcatccaaccctggcgtttctccttgttggattctagacgctattctgatggcttcttccagagatggctgttctccaagctgaactgcaatctgggtgccattggatgttgctactaaggtccc

SEQ ID NO: 323858 - DNA, 240 bp, Homo Sapiens; identical to SEQ ID NO: 152198

SEQ ID NO: 323859 - DNA, 1355 bp, Homo Sapiens
  misc_feature (1340)..(1340): n is a, c, g, or t
tctcaaaatataatacattaacagacaatgatatagctctaccaaacattcacacgcaggcaacagaataagcctttgggtttaccaaggacattttacagtcaaagggccacctgccctccttccttccctgactacattctcagggaagcttttccttgcagacacttcgttgcaaggtcagctttctctctcagcacgttggcttcgtcggcgcttctgtgggcctgtgcgttctttagcaagaagtggctgatgaaaagcttcaaaccctcacgtaacacccccagctttgggttgtcagatactcttgtgaaaattaaactgaggtcttcaacttctgtttccattaataggatacttaatacttttcgtaaaaaacccggactctgggtttggtccaattccctgaattcaacttacctttaagatggaaagggaaagcgattttgtcttcaacaagtgggcccccaggatggacgcaaattagagaaattcgtaggtggcaagttttccaagtcccgaaatttgtcccatatgctgaactggaaagtcatctgaaatctcctttcatattcacagaatttgctagccaggaaagcatagaagggattgtaagttttctcttgaaggcagcaatccatgagaacgtgaatgatttctctctcctgctgatccttaagtccaagcttcagaagcttttcaaaagcatccaaaaaatcttcacttgtcattattgtgcagaatatgtttctccggatgtctgtgttcatcctctgcttccgggcgagttctaggatctttgaactgaccgtccccacaagctgcttctgcaggtgcgtatggtgactgttgtcgatcatcggggccccactccaggcggaccccacaatccaccagcgacccgtctgctccgcactcaagacactgtcccaggagacgcgaagctgcgtctcagaacctgagccggcgttgcggaccaaagctctctgcagtttcctcagcttctccacgggctcggggtcatagcctggaattttgcgcatgtcattgttcttcagggccaacatcgtctctagcataaaccgaatcctggtctggtcctgaaactcgctgcctgccccgctggctttggtctgggcttcagtgatcaattccttaagtgataaagcatcatctttcctcaatgaaaaacccacgtttttcagcattaacaagatcagttcaatatctttttcggtgaaagttccaatcagttttttcaaaatgtcgaagatgaggagagcggaacgcgtgggtcgacgatatcccaggattccggaccggtaccagcctgctantactcgagctgtcaa

SEQ ID NO: 323860 - DNA, 344 bp, Homo Sapiens
ggtttttaagttttatttgcaatacttatatgatagatgttttttaattcctggaaaaataaatacacattattaataatagttatctggtagatggataacggtacatttctatgtaacattttcattttttgtaatcagaatgtattacctttacagataggcaaacacaaagatttgggaaaatgcatgtaaaatctaagaaaaaaggtaaattgtagatataatacattcacaaaaagaatataactgtgttgagctatatttatagatataaaaagatgaacaaattacattaggttttttaaaaaaagacaacctaacagtatgtatcgatgatagca

SEQ ID NO: 323861 - DNA, 1296 bp, Homo Sapiens
  misc_feature (712)..(712): n is a, c, g, or t
  misc_feature (846)..(937): n is a, c, g, or t
cacaacgcagattatcatatgcgatcatagagccgcgttgacgaagaataagtgagccaagaagtgaggtgcgcgtgctcacgcactcgagatgaataggaaggcgctattcattctgacgtgcatgcaccaaatgctctaatgtctgccgcacgtcatgcgcggtggagaggaagacactcctcgggtgcggcgcaaagggccctaccacacaccagcggctcggcgcagattgcaacgtgcattggggtcgaaactaaaataagtgttcaataattttatgttgagtaggtttctctacaggtatgtgcggcacttcactggggacaacaaacaagtactccgacagatgccatattagttcactcgagtgtgtcgttatagggcgagcttgggcgagagtagcggcgggccctataacaatctatcaattaacaggtatgtgtgcgtgtcgagcattgtttcgcgcaggggagcggcctccaataccaaacatcccggcgcgtcacccttgctgagcctagttgaataattggactcgcgtcggtgttttccatagctcggctgttgtgttcattaaacaattaaggtttaaaagacgcccgagtcttagcgcctttacgagaattcccgtaggcgaagtggtctgacggttcctttcaggtatactcctggtaggttcacgtagctagccaaagaaaattcatagtanagagttcacattacggatgcgctccgagccactaaaacagatagaatgatttgtacgatgggccaatcgcgcgtgaacgtgaatttgaaagggacggagaatcgctttgcttggtatattttattttgagagannnnnnnnnnnnnnnnnnnnnnnnnnnnnnnnnnnnnnnnnnnnnnnnnnnnnnnnnnnnnnnnnnnnnnnnnnnnnnnnnnnnnnnnnnnnaccatttaaaaaaacaatttatataaatagattcgtatacaaagaagaaacacatatacagagtaccccaattaccagtatggtggaccctaccccttcttttctgcattgggaaacagaacagagaacagaaaaaatcattccatcttgctcttaactctttccacctatgtgctcagtttttcaagtagaatttctattcctttgctggtgcttttggttttttccagtgtaggaatcaagcttttcagtgcagctttgactttgtttgcaacttccaggtcacaactctggaggaggctagaaagaataatggcacctcgatttacactagcccaggacttcaggttcttcatacc

SEQ ID NO: 323862 - DNA, 900 bp, Homo Sapiens; identical to SEQ ID NO: 150604

SEQ ID NO: 323863 - DNA, 862 bp, Homo Sapiens
  misc_feature (817)..(817): n is a, c, g, or t
atttttggttttattttaaagtctcaatcaacccttaccttccagtaattattagaaaaatcaggtcactattttaagtagattcatttcaattagccttatagttcttactcctccagccagtagacaaaccctgggtttattagctgatccaaatggacactcaaaaatatgccaggccttcagcttaaggaatggccagatgcggaatcccagatttggtgagctgagaattcccgtgtgatggaagaactctaagatgaccccaaattatccccaccgctggtactccagccctgtgtaatcccctccacttgagtgtggcaggacttgggactcatttataatgaatagaatagaaaaggtgaccaaggtgacaggatgtcacttcagtgattgcattagataagactgcaatgtcctcttgctagtggactctctctctcgcaggctttgatgaagcaggtgagcatgttggggaggccctcagttcaacgggctgcaaggactgaattcattcaactctgtggtcttggaagtgggtccttctctagtcaaggcttgagataagattttgtggatgacactttgattgtagctttcagaggggatccatgtttagcttcagatgtcctgtcttatctcccaagccctgcccagtacatgctgctgttttgcttcagggctgttgtcaccaagttcttagtgctgtgtctgcaaatgccccggatgactttcactcttccctatgctttgcaaaatattggctgctttatgtagtgctctagggagggctgttctagctcctgcccaatgnccctgtgtctataggtctttccctgctcagccagcaaaaggcccc

SEQ ID NO: 323864 - DNA, 446 bp, Homo Sapiens
  misc_feature (323)..(323): n is a, c, g, or t
  misc_feature (329)..(329): n is a, c, g, or t
  misc_feature (352)..(352): n is a, c, g, or t
  misc_feature (374)..(374): n is a, c, g, or t
  misc_feature (424)..(424): n is a, c, g, or t
caacaaaactctgcctttggttttgctggctgagcagggaaagacctatagacacagggcattgggcaggagctagaacagccctccctagagcactacataaagcagccaatattttgcaaagcatagggaagagtgaaagtcatccggggcatttgcagacacagcactaaggaacttgggtgacaacagccctgaaggcaaaacaggcaggcatgtactggggcagggcttggggagataaggacagggacattcttgaaggcttaaacatgggatccccctcttggaaaggttaccaattcaaagtgttcattcccacnaaattntttattcttcaaggcctttgganttagggaggaaggggaccccanttttccccagggacccaccaggagttttggatttggatttttcagttccntttggccaggccccttttggaa

SEQ ID NO: 323865 - DNA, 602 bp, Homo Sapiens
  misc_feature (55)..(55): n is a, c, g, or t
  misc_feature (115)..(115): n is a, c, g, or t
  misc_feature (571)..(571): n is a, c, g, or t
cggccctcccggcccctggagctcattaggtcgatgaccaccttccagagggagnccgcaaagttataaaattatttgccaaagcaccataaaggtccaggcgcaggtaaaagtngctggagaagcgtgtggtgccacctgggtgtaggaactccggggagaattaaagaacttgttaaacaaggtggccttaatttgagccccttaaaatttctggtttttgactggaactggagagatcagaagttgaggagaatgatggacattcccgagataagaaaggaggtattcgaacttctggaaatgggagtgctcagtctgtgcaagtcagaatccttgaaactgggccttttctaagtctgtgtcctaatgaagattccagttttcacagtagaagttgcatcttatttaatgactctgatacattgcaagcactcagtaaatatcagcaaatagtttatgttaattgtgtcaacagatggatcactggaatgtggggattctgaaacagaaatgaaactgtccttttgacaactctcttatataataaagtatcaccggcttgtgcganaagcataaagtgaagttatttgaaagcatgt

SEQ ID NO: 323866 - DNA, 1311 bp, Homo Sapiens
  misc_feature (328)..(363): n is a, c, g, or t
  misc_feature (428)..(428): n is a, c, g, or t
  misc_feature (466)..(466): n is a, c, g, or t
ataaaaatagcgattacagcggtggtgctaggctgatggggagcggggcaacgcaagcgcgggagaacacaatgcagtggagttgtgtgcagtgaatagtactgccgaacaggagggttgcgatacgaggggtgagagggcgattcgagtgtgggatagcaggggtgatcgttaggtgtggagagtggcgcgacgctacaggagctgaggtgggcgaggtatatagctcgcgcgcactcaaccacaatcggtaccggtacaaatatgtgagttcgctgctcgcgcgctgcgctaacgtgtgttatccagcctggaactaggatcttgnnnnnnnnnnnnnnnnnnnnnnnnnnnnnnnnnnnngcggtcgtcttctattttttgttttcttcaactctgccccccgccggggctccgcaaagaggggngaggatttgtcttgttgtccgcccccaaatgttgttgngggcgaccttggccccggaataattttttttgtgtgtcgcaaaagaggcaccgccttgtaaaaaagaatatatatatggcagaaataaatcttaaaagaggggcccgggggtgttgtctccggggaaaggggccacgggaggaaaaaggggagaagggggttttcccttccccgtggggagggcaaaatttgggttccgggtccgcgttcaagaaaaattccccttttccaacccaattaaggttccaaataccacaaggatccctgggggttctcaatgcatccccaaatattggttccatggcccctcatttgaaaagttccccatcagtttttaatgaaatctttcaaaaagaaaaaattattatagatcagtataaattatttttaattttagaaactgagattgaagtacagtttttagtttaaaatattaaaaatgaaaaaacctttaacattattaaagatgtgttgttacaaagttcctagatatatacatgtacaaaacaaatagatattactatctgacacctcaacccatgacttaccctaaatctcctgatatgaacaattaatctactgggaggcttttcccaataagtttcaaatttcttgcacaaagatttgctgccattcatattctgtgcatggatgaggacatttaatcacagactatttcaacttaatataacctagcataaaataaatccaatgaaacactacatttataagcgataggacaaacttgcatataatttgcaacttttgccagactcattaaattcattaacacattcagtcttctcttcacgggcattttcaagagctttagatcttgtgcttaa

SEQ ID NO: 323867 - DNA, 1035 bp, Homo Sapiens
  misc_feature (474)..(591): n is a, c, g, or t
  misc_feature (617)..(620): n is a, c, g, or t
  misc_feature (625)..(713): n is a, c, g, or t
  misc_feature (716)..(716): n is a, c, g, or t
gccgtcgtgctagcctcttgccagcaagcggagggttatatggcgtggtttggattttggttgtctgctgtgccacaaaaatcggggtgaaggaccggctgttgacatgtgggcgtgggggagccggcgtggtcgacgttgacgtgcggctccacctgcgggagtgtgcgggccatactaggggagagagtcgaggatgaggaagcgaaagaaccaaaccctggccgagacggcgtaaatctgtcactagactgcttgtaaagaaaaaagcgcgcgagggtgacgagaaggaagtaatatgtgggggggctagcgaaattgtaaggagccaaaaatacgcggccgtttggatggtaggtgctgtagatattagaattaggttggggctgtccgaagcgattgttttgtttcgggggggattggccaacgactcctggatatgtgggccggggcctctcccgggaggcgctgctnnnnnnnnnnnnnnnnnnnnnnnnnnnnnnnnnnnnnnnnnnnnnnnnnnnnnnnnnnnnnnnnnnnnnnnnnnnnnnnnnnnnnnnnnnnnnnnnnnnnnnnnnnnnnnnnnnnnnntgtttggtgtggtggggggtgtgttnnnntggtnnnnnnnnnnnnnnnnnnnnnnnnnnnnnnnnnnnnnnnnnnnnnnnnnnnnnnnnnnnnnnnnnnnnnnnnnnnnnnnnnnnnnnnnnganaagtttcatttaggtgctatcatttaaaaaatcagaagatatcacttaagaatccagcattctagtttctttcgaaaaatcagaagatctggcaacactaggcccacattccggcatggcaacaaccagctagagcggtgctggctgttccccctctgtggggcttgtgctctggtttctgaagtcctaaccctcaccaggcccaactgccacctacgccagctgcatggcccctacactgtgtctctgcacgaggcagcccagcaggaaggaacaaaagtgggggtgatgagaggttgtcctgttcagccctcccccc

SEQ ID NO: 323868 - DNA, 428 bp, Homo Sapiens
  misc_feature (77)..(86): n is a, c, g, or t
  misc_feature (136)..(207): n is a, c, g, or t
  misc_feature (396)..(409): n is a, c, g, or t
ggggggaatccaacccctagttctggcccgggttttcttgggaaccagttttgcccagttccctttcctattggggnnnnnnnnnnaaagaaaggtttaaaaaagtttttgagggccgaagggggcccaccaggtnnnnnnnnnnnnnnnnnnnnnnnnnnnnnnnnnnnnnnnnnnnnnnnnnnnnnnnnnnnnnnnnnnnnnnnngatctttacatgtttattaaatctgaatttgaagatacattccaatcttgcataaagtgtttgttgggcttttacattacgtaattaaaaaacaaaattttttaaccaattttatgtgccatgtcacgtttaatgctatcttgtgtgaccagatcccaccagtaatgacaaaactgtcttaaacctcannnnnnnnnnnnnngagacaagagtttcactct

SEQ ID NO: 323869 - DNA, 1019 bp, Homo Sapiens
  misc_feature (774)..(887): n is a, c, g, or t
ggataactttaaccgaaggaagggtttggttccattcaactccacattcattgtgcctttacttgcattagatttctgtgctttcttcctttccctctttgaagcaattaaaatcttccttgataactgctgtttctttctactcttgtttctggcaatttagtgggttccttctctagtggtcttaaatctcattccactggtggcaagatggggcctagccttcttttcacatgtctaatcttttcctttctcatggtgccctccatggaagtcacagtcaacactgaataaatgactagaatgacacgtgtgcgtgcgcacgcgtgtgcgtgtgtgtgttcatctgtctgcatgtggatcaatttcttttagaaaataatttattgtatgatttattttggagttatattctgattacagtgctccctctcccaaatagcattgattttttcccccctctaaaatgtataatctggtctcaggttggattctttggtacatttctctcttctggatgccatgcagcttaattaaaaccttgcttaaaaacaaaaagtgaaaattgtgtactcttgtctggaataccgcctcaggtggtggcacagagaggggagaaaacctttgcctcataatttgggtaagtgtagtggtttgattccaggtcccttgaaaaagtagatctactgaattgggcagactcatctatagctttctgaggggtcttctctcctcctctccagctgtattttgaaaattacagttctagttggnnnnnnnnnnnnnnnnnnnnnnnnnnnnnnnnnnnnnnnnnnnnnnnnnnnnnnnnnnnnnnnnnnnnnnnnnnnnnnnnnnnnnnnnnnnnnnnnnnnnnnnnnnnnnnnnnnaacccccgtcttctactgaaaaataaccaaaaattaaccccggcggtccttgggcgcaatggccttggtgggtccccagatcttacctcggggaaaggcccccaaggctacggaaaaaaatacccccttttg

SEQ ID NO: 323870 - DNA, 408 bp, Homo Sapiens
  misc_feature (254)..(254): n is a, c, g, or t
ataataaaaccaaacaaaaaacccaacacatttattcaaagcaggcatttcagttaagttaaaatcctataatcaggatagccacaattccagacactccggtgcgaagtgtagatatgtcagtagccacatctggatgatgaacaagccattgactataaaaacgagaacaacagcacagtctcagcgcctttagagtgagtgaacagtatgttccaagcacttcaccatggttcacaatgggcaaagcctgncaggcttctccatttgggggggtcacattttctactcggtttcctgcacgtacaacagccaattgccatcattggtggaggggcagacggatgagttcacatcctgtatacgatgcactccaggtgagatctcaaagggtcctggacaaatccc

SEQ ID NO: 323871 - DNA, 1548 bp, Homo Sapiens
  misc_feature (96)..(96): n is a, c, g, or t
  misc_feature (108)..(108): n is a, c, g, or t
  misc_feature (122)..(122): n is a, c, g, or t
  misc_feature (167)..(167): n is a, c, g, or t
  misc_feature (195)..(195): n is a, c, g, or t
aaggaatcgtgtgcgtgcatagatcgactgaggaggcgcgtgattaacagccgctggcgccgccgatatatctgagagacataggtgttgtgtgtntctacaccaacnagtgatgattagtncggtgctaggaggaacgtgcgcgtcgcgtgcaggatgatctgcgncgaggaggagtagtacatagtatgagcncgttattatgatagcacgaagagagatgcgggcgggtactatactaggacaacgagacatagaatatgttgtgttgagtgttggtcatagagacaacagtgagaccggcgtgatgtatgaagctattgtttcgcgccgccggtgcgtggcggtgttagtgaaatgggggcgagcgaaaagagaggagagacacaattagtattgtaggagggccgggcgcgtggtggcgttcgctaggggtcgtaagaatgtagataatatacatcaagaggagcgcggaccaagaggtgaatcataagtgtagctatgccgctacgcgaagttggacgagagtgtccctacgagcgccggtggtgctcggagtaaggaacgtcccgccaagtgggggaaaaagagagagaattatgaggtgtagagtacagaaccaccacgttctatcgagcgtggagagagggaccaacgggacacgtgggagcggttaaagggtgtgaatatgtgggagcgcggcatctttgagggagcgcagtgttaacgagggagattacacgggtgaaaagggcgggccaaggagatcgcgctatatgggggttatattattggggagagcgcttatggggtgagagccgcgagcgggatagtgttgggattttgtaggggaaggtgccagggccagcgagggtaattaacgcagggggtcgcttagagggggcaaaaggggaagcaagggttcattgtacttatgggggccgggccgaccaaagggaataggtggaaaaggtttttaggacccaagggggccacaaggggctcggaattttgtaaggggaatgaggggaactgggggggattagtgattggggttatgttttttgtttggcggaggggattgcacagtttatttccaaacactcagaggatagggggtggcctatgggctccatctgcctcccctccctgcatttggctgaatcaagaacttctcccccctgacccccaagaccctaggctgtgcccaatagagaaggcactgtcaccccccaccctgaggagacctagacaggtgaggagcatggagggtgggggaacagagttcaagtattcacagttcccccatctacacccctggattacactgtgccagagccatgagggaggatcccacctctgggattcctagtggtgttgatagtccttctcccacttagaaccctccagatgaactccctactccttttccctgatataacaaaccaagtcctaagccctgtagtctgggcaaggaggagccttagcaggccactcacccaaggcccccagggatgggggtgagagccttcacctgtagtgaatgcc

SEQ ID NO: 323872 - DNA, 633 bp, Homo Sapiens
  misc_feature (483)..(491): n is a, c, g, or t
tttttttatttcttaaatttattgaagaactcttagctgggagaagaaagatcacaggcttaaacaattgtaagataaaagaacaattaattgcaaataattacaaaagtaatttctgaaattttttgagccactgctgaaacaaaactttagtgcatctcaaagttcgtattttgttaagtgaacatattaaattactgaaaagcaaaaaagagttactgttacacagtacaagatcttaatatagtaactgagcacagccaaataaacagctataattattccaagctgcttttgctatgtatctggtatattaaacaagaaagtggattgcttttaccactgcacaagtgtccaaaggtagcaaatccacgcaatattaaaaccggatattaaatagtattcaagcattgcaacaaaaacaaaataagaacttctagtactagaactctaccctatgaaaggaatgtacacagatggttnnnnnnnnnccaataaataaataaagtgacaagagtgactaattctgtatccacatcttcagagcaggaatacagtaaatgagtaaatggttagaggagtcttgctgaaaatgagaaaaaatgcatctctctgtagtatactttttgtccc

SEQ ID NO: 323873 - DNA, 1442 bp, Homo Sapiens
ttaacatcatccagatgacagacgtcctgatgccggtgccatggcctgaaagctccctaatagactttgtcgtgacctgccaagggagcattcccacggaggtctgtaccatcatttctgaccccacctgcgagatcacccagaacacagtctgcagccctgtggatgtggatgagatgtgtctgctgactgtgagacgaaccttcaatgggtctgggacgtactgtgtgaacctcaccctgggggatgacacaagcctggctctcacgagcaccctgatttctgttcctgacagagacccagcctcgcctttaaaggatggcaaacagtgccctgatctccgttggctgcttggccatattttgttcactgtgatctccctcttggtgttacaaaaaacacaaggattacaacccaatagaaaatagtcctgggaatgtggtcagaagcaaaggcctgagtgtctttctcaaccgtgcaaaagccgtgttcttcccgggaaaccaggaaaaggatccgctactcaaaaaccaagaatttaaaggagtttcttaaatttcgaccttgtttctgaagctcacttttcagtgccattgatgtgagatgtgctggagtggctattaacctttttttcctaaagattattgttaaatagatattgtggtttggggaagttgaattttttataggttaaatgtcattttagagatggggagagggattatactgcaggcagcttcagccatgttgtgaaactgataaaagcaacttagccaggccttcttttcattattttttatgtttcacttataaagtcttaggtaactagtaggatagaaacactgtgtcccgagagtaaggagagaagctactattgattagagcctaacccaggttaactgcaagcagaggcgggatactttcagctttccatgtaactgtatgcataaagccaatgtagtccagtttctaagatcatgttccaagctaactgaatcccacttcaatacacactcatgaactcctgatggaacaataacaggcccaagcctgtggtatgatgtgcacacttgctagactcagaaaaaatactactctcataaatgggtgggagtattttggtgacaacctactttgcttggctgagtgaaggaatgatattcatatattcatttattccatggacatttagttagtgctttttatataccaggcatgatgctgagtgacactcttgtgtatatttccaaatttttgtacagtcgctgcacatatttgaaatcatatattaagactttcgaaagatgaggtccctggttgttcatggcaacttgatcagtaaggatttcagctctgtttgtaactaaaaccgtctactatatgttagacatgacattctttttctctcctgcctgaaaaataaagtgtgggaagagacaagc

SEQ ID NO: 323874 - DNA, 962 bp, Homo Sapiens
  misc_feature (222)..(222): n is a, c, g, or t
cggcgagagcgctgtgagagccgcccgccagtctcggcatagtccgtctctccgaccgctgagaagcgcgtctttggaccagtgcggcgcacggtcggacgcccgacggtcgtctgtgtggacgcctcgcgtaagctaccgaaccgtggagaggacgtagacgccgatgcgatcccgtaagcgatctacgttcacacagtgcgatgcggcggcagtacagtntctctccacatgtacgaccgactaccggaactctgatagtccgccccggctgacactaccacaggccgctgcaggcgactctctaagatggattggaatccatactgggtgcggctcgttctccatttcgactgaggcgcatgcgcaccgccccaccgcgcctgtcatagcggcgtccggcggcggccgccctacaccatgttcatcgcacgccgcgacgattttactagggcgagcgacgtcccaacgtcattcggccgatccgcacgtcttctccgcgcgaaggcgccacccgtggcccacagcttcatccacccttccgcgggcccgccgccccccaatcgaaatagggtttcggcaacgttgtgaagacggccgagcggggccggccagcgtcccctgtatcggaggggtgagtgaggtgtcccccctctccgttctctgttttcgctccttttcttaataaaatctctccccagaccatcatcacttttaatcctccccagaaggggcttcatcttcagacccttcatccccagatttctcgggtggggggcttgtagatgttttcttttctggcgggctttccggttcctcatcttcttctttgggagaaggagtcttttcctttgatgcctttgaagctgtggggcgacccactttccctttgcctttcactggacttggcgtcactgtagcctttagtctgggtttgggcattttcttttcttttctttccc

SEQ ID NO: 323875 - DNA, 541 bp, Homo Sapiens
  misc_feature (17)..(17): n is a, c, g, or t
  misc_feature (21)..(21): n is a, c, g, or t
  misc_feature (171)..(180): n is a, c, g, or t
ccatgtttttggttgtntttngcgcgcggttttttggttttaagtttttgcccaaaactccacatttggggtatagtgggcccagaaaaaaattgtttaatctagtgcataatgaatccgttacaaccaaattaattaaaactaataagtctggacatgaaaggcagaccnnnnnnnnnntaaagttaggcccaagaggttaggctgttcctaggaaagctctgaggagatggaatccattttggcgcgacatggtgtcaataaaaacccatttaaataaggaaaaaggaaagaacgacccatatatccctcctagcgagctccatcttctgcaacttccaagcttcgtcagtagaagttaggcgatcagcgagaaagaaattattctccgatattttgaagagacacaatactattaactggcgagtttctggacttttgttagtggactcatacttcggacgccttgcaacccccgtaaggacgcagtgattgcactccgtgcaaacgccgccatcttaagtcttccactagccctccc

SEQ ID NO: 323876 - DNA, 461 bp, Homo Sapiens
  misc_feature (27)..(27): n is a, c, g, or t
  misc_feature (32)..(32): n is a, c, g, or t
  misc_feature (76)..(76): n is a, c, g, or t
ggcacgagtggcggcgtttgcacggcntacanctgcgtccttacgggggttgcaaggcgtccgaagtatgagtccnactaacaaaattccagaaactcgcccagttaatagtattgtggtgagtgatgagcctcacgttggctagagaagtggccgttagcgaggctgcacactttgggatcgcgtggcctgagtcgggggagtaaccggcctgtattccatttttctctctccagtctctttcaaaatatcggagaataatttctttctcgctgatcgcctaacttctactgacgaagctagggaagttgcagaaggtagctcctaggagggatatatgggtcgttctttcctttttccttatttaaatgggtttttattggacaccatgtcgcgccaaaatggattccatctcctcagagctttcctaggaacagcctaacctcttgggcctaacttta

SEQ ID NO: 323877 - DNA, 814 bp, Homo Sapiens
atagagatatgtcgttcatttattttgaatcttatatggatagataatcccagaagatttcagcatagcagataaaatacagcaaatcctaccccagcccaggttttagtgacaaacgggccccgttccatggacatagatgacttcatcaggtaattacatttttgttttcctaagtgtttacatttctttactgtgacaccttcagattggagattttaaaggcttttaagcggtataaggtgctacctgggagagttattgcatagcacttccatggcatggaatagtatttggtgtagaagatggaggctagttagctgcagcagaatgaacattttctttaagaacagtagtaaagaacagtccgagccagaagattgcctttgtgttaatgtggtgtgcaggttccaatgtggtgtgcaggttcctcccttcctgctccttccccaactctcattcatagtcttagtcttaatagcttatccctccaaaatagtccataaggtagaaaaatcataatacatgtaactggatctgatttttaaaatttccttactgggaatagctgttgttaaatcaatcttaagcatacaataatgccagttagaatcctacctggttatccatttaggaataatacagttttgtagcctgaagcaagttctacacttctcaagtaaaaagctgtcataattatctaggtaatttagaccaaaatttgttttgcttgaattaagcaagtaagtcttatgaaaacagaataaggcttcaattaattacccaggtaattactaacctgtacttactgtcc

SEQ ID NO: 323878 - DNA, 514 bp, Homo Sapiens
  misc_feature (288)..(297): n is a, c, g, or t
ggcgtgggtagaagggaaggcagagaaacctttaaagattgtaagctaagtgctctatacctttatacaataccatggtgcttgagtctcccgttaagaggctgaaaactgggcaggcatacgcaagactgggtgcgagattcaatggaatgtcaaatgaaacttagaatttattaatgtatttacataatttataatctttaagcaatggccccataaatatagactacaactttacatatgctaagcaatagatacttgcttttccccaccaaaatacttgggttnnnnnnnnnnttgacagcatttataccaccttcttcaccttccactcttcttcctttttaaaccattgctagtcattttagaacatatgaaattcagtttattccgggcagcttctctaccatcaccatcttgatcatgagagcttatttaaaaaggtgccaataacgtgtttggtggcacacacatgacaaggtcagaagcaaacccaggatgagctaggcatccc

SEQ ID NO: 323879 - DNA, 420 bp, Homo Sapiens
ttttatttttttaaaaagtagatttattaaaaaacagttgaaggtctgagtgttgagaggcaaatggggtctctgggggatcctgtcctgcagcaggcctgactttcagatgactgtgcttataaggcagatcagtgccttcctggttgccttagttctttccatttcagacaccacatttggatcctggggcagctgctcaactctacccaactctaccatggctacctgggattggagaacatgtgagtattagctacttttacagtcaaatagggatcttgtagaagaaacaggtagacagacccaccagtctctcattctgacctagcaagctggtgaagtcactgtcggtcctagttcccttgtttgttgggctgcaggcccattccaacacagcccaactccccaccccccccc

SEQ ID NO: 323880 - DNA, 521 bp, Homo Sapiens
acaaggccctcttctttcctgttttgtcgttttgcaaagcaagttactttattagcattttaaacaatgtataagtgatggaatcattctaacaacacatctattcactgcttacaattccaactaatttcagttctttgatatctaatgacaagagcgaagacctgttaaagttccttccaccagtaaaactcacagctcaaagttgtgggagtgattaactgagccacaggccttcattcacatgtttaccacattaaaataccacacagtgttttcttataagggtcaaccaactggggaaggcaattaacattaggcattaaggatttaaactgttagggcacaggggcttaaatcagggcattatatggaaacttgtggttccctagtcaagtcaaacaaatccccaaatatttcagcttgtaacagttttgtccttcctctcttgagacaattatttgagtacttgcttttggaaataaggtaattaatgatggaagcttcctagctgtgatgcc

SEQ ID NO: 323881 - DNA, 496 bp, Homo Sapiens; identical to SEQ ID NO: 150734

SEQ ID NO: 323882 - DNA, 637 bp, Homo Sapiens
  misc_feature (454)..(525): n is a, c, g, or t
ggtttgtaggtattttattttcattttataggtgccacatggttcatgttatgttcattcttaagtttacaaatactcatgtacatagttactatttttaagtctaatgtatgtaggatctaaaacacttaaattctccatcgtttctcaatttctcttaacctgcagggagagtcccaaaaagcatatatatgtatgaaaaacattctagatagcatcacattttattactaattgcagtttttgattccacaaccctgtataacttggcattctggtgaattggacccgaacatctgtgaatcttaaaaatagtggttgactcattatggcttccttatgtataggattaagaacacagatcctggaatcagacagcctggcttccacactctagctgggtgaccatgaccatgaagaagttcctgaatgttccagtgtcagtttattcacnnnnnnnnnnnnnnnnnnnnnnnnnnnnnnnnnnnnnnnnnnnnnnnnnnnnnnnnnnnnnnnnnnnnnnnngtttgttagtgtgtgctcttgatatgacatgatgagaattgcacttcacttctgtgatattccccctggctttaacttcagatcactgaaagaaacactgaagaggtaggaa

SEQ ID NO: 323883 - DNA, 614 bp, Homo Sapiens
ttcttgatagcatcacattttattactaattgcagtttttgattccacaaccctgtataacttggcattctggtgaattggacccgaacatctgtgaatcttaaaaatagtggttgactcattatggcttccttatgtataggattaagaacacagatcctgggaatcagacagcctggcttccacactctagctgggtgaccatgaccatgaagaagttcctgaatgttccagtgtcagtttattcacctttacagagaaatctggccaaacactaccctcagccagggtgatccaagttcaatattcagcaataagtcatgttgtttgttagtgtgtgctcttgatatgacatgatgagaattgcacttcacttctgtgatattccccctggctttaacttcagatcactgaaagaaacactgaagaggtaggaaaagcagtcttgaatcactgatgccacctctcctgcaatccttggccgcagtggagagtgtttctgtgccatggggttggaagaacaaaggaagaaaacagtgtctctgctgcagtagaggaaggaccacaggtagaggtcggtagaggtcagcaatggaagcgctctgtgccgaaat

SEQ ID NO: 323884 - DNA, 716 bp, Homo Sapiens
  misc_feature (250)..(250): n is a, c, g, or t
gggggaggaggaagaggacacagaggccctgtagccaggcaccaagatccctcccaggtggctgggtctgaggggaactccgagcagccctaggtcctcaaagtctggatttgtgtggaaaaggcagctctcacttggccttggcgaggcctcggttggttgataacctgaggaccatggatgctgatgagggtcaagacatgtcccaagtttcagggaaggaaagcccccctgtaagcgatactccagnatgagggcgatgagcccatgccgatccccgaggacctttccaccacctcgggaggacagcaaagctccaagagtgacagagtcgtggttacatatggggctgatgactttagggatttccatgcaataattcccaaatctttctctctgttggaattgtgactatcttctcacacaagcggctacttggtcttgatgccttcccccgcaaaacagcaaccaaactgttctgggccaatatcaccaccttgtggtcatgatgaagaattgccccctttgccctcaacacctcttttcttcttgaaaattaaaaacaacccctttcaccccctctactgtccttattccagtttgtgtccgtagttgctggaggaaagaaaatgcctattgctcttttttttattctctttatctggttactcttctgcctttcttttctctccctgacttcatttccattaaaggct

SEQ ID NO: 323885 - DNA, 456 bp, Homo Sapiens
  misc_feature (31)..(31): n is a, c, g, or t
  misc_feature (37)..(37): n is a, c, g, or t
gaccatgttgtaatttctttggggggtttgntggggngtattcaagcatgttcttttattaagcgtaggatgcgaggcacagcaggaggtttaagtacaatgtgaaagcaagagaactgagactgtgattgacagacaaagggattaactaacgttttattctctgccccccaaaatatcctgtgtattcttaagtatatacgcttcccttcctgcctttcaaggtatctaaggaatgatttgaaaaatttgttataatctctaaagaattttttgtatagcattagcaaaggagtctatgacaagtactttgccacctggtagttctgcgtattctactccctctgggtgtcactgtcatcctcactggctgggacaaggttctgagatttgtctccccagcagttgctaagctggctcagtcttggtcaggatgaatgaaacaattatctcccc

SEQ ID NO: 323886 - DNA, 909 bp, Homo Sapiens
  misc_feature (160)..(210): n is a, c, g, or t
  misc_feature (590)..(590): n is a, c, g, or t
  misc_feature (597)..(597): n is a, c, g, or t
  misc_feature (604)..(604): n is a, c, g, or t
  misc_feature (610)..(610): n is a, c, g, or t
  misc_feature (658)..(658): n is a, c, g, or t
atttggtgaggaatccccagcccctagttcatgacccaggattttcctaaggaaaaccagctatgggccaatgttccgttttcctacatggggccccgggccgccgaaacgagtgggtcttagaaagcttctccgaggggccgaggccggccgacaaggnnnnnnnnnnnnnnnnnnnnnnnnnnnnnnnnnnnnnnnnnnnnnnnnnnnaataaaaccaacataacagaatgtagaaatctaaacgaacatttctccctcaaagtagttacatccttagctccaacaaaactactattgttggagacttatttagaactcctgtttgaggaaaggccttaaaaggtggtttatgagccacattagaaaatacccttctaaactttgggctgtttaaaaacagaaaatccatactcagaggatgacaccgagaaaattaaaaaggtgctgcagctctcacggaggttccctaaagacctctagcaagttctgagcaacagcatcaccattggagaaacgtgtagcctcccaggacagccactttccatgggacggcattcatttggagaaaagttctgctgtctgtttanaaagaanaaagaanaaaaanaaatcagccacactcctttatagtcacacttgcatttgattaaaaaanaaacaacaacaacaacactcacacgtggttcttgtatgaattctaattaagagacattatattcagaattatagcactcatagtgataattttcagaagactataacagcttctttgccacttaaggggtacagagggtgcagctgtttacctgaatgaattcttaaataagtgactactaccactctaattttcctagttgtagctctgttacaggttactgaccgccaagtccatgttccagacattcc

SEQ ID NO: 323887 - DNA, 741 bp, Homo Sapiens
  misc_feature (715)..(715): n is a, c, g, or t
gaaataataacttgcatttttattttttaatattgcaaatggcataaactccagggttcccacttcccaagatgtgtttttatttctcactgattgtatcctgaaggaatcacaggtcttggcaaggtcaagtcaccatcgctggttacacatatcctggatatgtgcaggttccctgtgtcaaggccttttgagccacttggagatgtaatttaaaaaggcaaaacaatgcacagaacaattggggaaaagttacaagtaaaataattttatgcagacagaaatgtttttaaagctgttcatgatttagtagaaagaatcaggagcttgaaacaattacttctgttgctctttttctgaggtttcattccaatgagagttgcacactgtcagcttggttttgtggctgctgatagtcggtactttcttgaaatggaatacatttccagttgttgtcttaaacgaatcttgcttatcgtgtcataaaagttgggctctgacaaagtttcctctgtaggtggcacactgaatatcctcataattctccttttgttccttttggcatacatgaagagaccgaagctaacaaggataactatcaagtaaacattggtggcttcattccaggcttcgtgaacagtataatcaatagaaccatcgtcacccatcactccataacccccagccatgggggctgccggctccggagccggcnacggggccagcggcttgtcggcttcg

SEQ ID NO: 323888 - DNA, 732 bp, Homo Sapiens; identical to SEQ ID NO: 132515
  misc_feature (330)..(356): n is a, c, g, or t

SEQ ID NO: 323889 - DNA, 1186 bp, Homo Sapiens
  misc_feature (668)..(669): n is a, c, g, or t
  misc_feature (675)..(675): n is a, c, g, or t
  misc_feature (723)..(735): n is a, c, g, or t
  misc_feature (898)..(906): n is a, c, g, or t
tcagaatgccaaagtattattttttttcccaaaatcagtctggacatttactactttttagactttttgacgttgaactttctgtataaaaattggctgggttttgagcttttggtaagaaataaaagccgattaagcactggccgccccgcgtgggttacccaatgcccgagtcactgtgggcagcattcgcactggtgtgggggagtcctttcaactcaagggagggctggggtttctggggcaccctcggaagttttctgggatgtctttttatcttttctcgtgtgaactgcactacaaaagagaccagcccgcttcccaagccagccagacacctgggtcttgagccataaactggcgtagttaagctttgcagcttccagtgtattttatttattcttttgttgggtttttgtttgtttcttcttgtaaaattgtacagaaactttttaaaagaaattggattcgaaactggatgtgtattcgtaacctcataatttttatttgtgtattgtttcttttattatttcagttaaatttttacattattttgcatgtatatttctttgtacagagaccttacatgtttacacagtatgatgtgatgtaaatattttattttgccatcagttattttaaaaaattaaacatatttgcctgaaaanntaatcncacaccaagccccacacaccaaaaaccgagaccaaaacaaacacctgnnnnnnnnnnnnngtggcgggaagaactcctgcccatcaaaaaagcctttttcacacccattgcccttggaatggcgggggcgccccagggggaaaaaggggacaattggccaaaaaagatgcttgtcccaaaggaaaaatgcggggggcgggtaccctaaagggcattcggaatnnnnnnnnngcaataaaaaaagaacgccccgggggaaaaaccaatactcgttttagtgaaacccctccccagacctggaagttgcccatgacccccattcacgggagaatcccaaccgaccgggtaattccccaagaaagacaccctcttatcaaaaataccccccctacgccaccggcccatgtaatatacgccgaaaaagtggggtcgcacgccccaaaagtgagttatcgggcgcaaccatgaggaacacattccccacccgcgggttggtcatgaaaccttttct

SEQ ID NO: 323890 - DNA, 470 bp, Homo Sapiens
ttttttacaatgtgtgttaagtcacttgtttatttctcaagatgtgcacactcaagtatgaagctggccgggacaactcatggctcctaggtatgtacaggccctttgatggcttgggttacagacaacctcatagctggtgcaccacacacacgagataaaacaggaagcctaaaaaccccaagccacaccaagaaaaatgagagaggggagggcggggtaacaatgcagcatcccgcggagggaacttaatgcacaaggagggagaacagagggtggaaggcaagccagcttcgtcttcgccgccgcagctgctgtgtggtggtcaggggactgagttcaacaggtccttcaggaagctctctggatcggtgatttctgataaaagaccggccacatcgaggaactctgagaaggtctccactggcatgaactcctcctggaaggttttcagggctttgtcggcagct

SEQ ID NO: 323891 - DNA, 287 bp, Homo Sapiens
tgctttaaataccaaaactacaaaaatcagtttataagctgtttttccaaaacaaccaccaaaacaagacaatcccccaaatcagggcaaagcaagatactgtcaaaagtgttaatcgcccttctcgtaaaataaaagtcatccacgctcagccacgtgattgggaagagaaagggggcttgctgtacttggcgaccgcatggccgggtggttcccaagagtagccatggtttatgattttgagaaccacggagtggggaacagctgttctgactgcccgctccccc

SEQ ID NO: 323892 - DNA, 595 bp, Homo Sapiens
gtgtttgacttagatggttgaaatgttttcatttttcatttataagcattacattaatttccatgcaaaaacccaagatcgcatatgtctgatttcaattggccaaaatccaacccttgagtttggacattcaagaccaaaatgaacacgttacttgccctttctatgagtagacatcatgggtgtcctttgaaagatcagcaggcctcctgacctcttaaacaccagcttgccatgagtccacaccaaaacagggagccaataccttccagcacctaatcaggcaagtaacttcactcatgaagacaggacacctctataccaaggctgccacccacagatatttcctgggtgctgctctatagcaatacctgcttttgaacagacgtggtatcttctatttggggattataagttcttcctgccagtttttctcaaaactctcaggaagagtagagattttacaaaaaagcttacctctatgaccccaaaagaaataaatacaaagacacctacttcatcaagtgtatattttccccagctttagatggggtcaacatgtataaagctttaacaacttctctcagtaagacag

SEQ ID NO: 323893 - DNA, 410 bp, Homo Sapiens
  misc_feature (360)..(360): n is a, c, g, or t
attatttttgtgtttgacttagatggttgaaatgttttcatttttcatttataagcattacattaatttccatgcaaaaacccaagatcgcatatgtctgatttcaattggccaaaatccaacccttgagtttggacattcaagaccaaaatgaacacgttacttgccctttctatgagtagacatcatgggtgtcctttgaaagatcagcaggcctcctgacctcttaaacaccagcttgccatgagtccacaccaaaacaggggagccaataccttccaggcaccctaatcagggcaaggtaacttcactcatggaaggacaggggcacctctattcccaggggcttgccacccccanggtattttccgggggtggttgctctataggcaatacccgcttttttgaac

SEQ ID NO: 323894 - DNA, 731 bp, Homo Sapiens
  misc_feature (154)..(156): n is a, c, g, or t
  misc_feature (158)..(158): n is a, c, g, or t
  misc_feature (160)..(160): n is a, c, g, or t
  misc_feature (162)..(168): n is a, c, g, or t
  misc_feature (170)..(171): n is a, c, g, or t
  misc_feature (173)..(174): n is a, c, g, or t
  misc_feature (176)..(178): n is a, c, g, or t
  misc_feature (185)..(194): n is a, c, g, or t
  misc_feature (196)..(234): n is a, c, g, or t
aattccaacgcccttagttcatggccccgggatttctcttgggaaacaaggttttggcccctgtttccctttccccttttggggggcccgcgccccaaaagccaaaggtttttaaaaaagtttttgaggggcccagggcggccccccaattttnnntntntnnnnnnntnntnntnnnggtgtgnnnnnnnnnngnnnnnnnnnnnnnnnnnnnnnnnnnnnnnnnnnnnnnnnttaaaattattaaaagctttatttacgattggaatcattcaacaaaaaagcaaaagcaaatgagcctgaaaaaggaactaagctgttgtctagaatgtcctcagaacattcgctacctcagtagctaagctgcctttgcacctggctggcatgacaacagtggctcaacatacacagcagttgcactaacagcagcacaaattttccccttcaaacttgcccagaataaagcaagaaaacaaggggagggtataaactctgccaaagtaaatgtatttaaatactgcatggaattgttaacagcctgaaccttttcccctcatttttgatagttgcagattgatgtagtaactgtcatttagcaaatgccgaatgcatgacgaagaaatcaggtggccttaaaaatccaaacacgaatgatactgatgaatgttcttggtatatcttcaaggacttctttcatgacttgacttttctttgtctaaggatagctcccc

SEQ ID NO: 323895 - DNA, 668 bp, Homo Sapiens
  misc_feature (361)..(361): n is a, c, g, or t
ttagcaattaaatgtaagatatttattaaataaaaaggttacactatgatttttatacactgttgaaaacaatgacttttatttacttaaagccagcagtagttcccattactctcataatgttatagttaaggcttgatttagttccagaaaataaatagggtaaatttttaatatttccctagctctgtctgctatagggaatttcagagtatgaaggtaagatgaagcagatatataagaacatttttagataatgacaatttttccttaaaatttggtgaaaatttagtttcttctcaaaattctgtacttctatccataaaagtaaatttctattttaggtagctctgttaagganctaggccagagaagagtattacccataatagtaaatagccaaatactttgggcaagtctgaattagagtacaagtgaagacattcacaaacacactttttacatctcctggatgtggtacgggctgtatgttagaattaaagcatcacaactatctgattgtagggtgctggtgggcaatgcaatcaatcaacacgtctaccccaacagatgtggagacgcatggaaaaaatacatcaaccaaagtggtcagggagaacaaaacacagaaaacaccataaaactgaagacattatctcttcttgtcc

SEQ ID NO: 323896 - DNA, 649 bp, Homo Sapiens
tttttcaatctaaaaaaaagtttatttaaccaacgtaaccatattgaataaaatcagcttgggagaaaattagttgcttgctaaatcatggaaaacaacaatatctttttgaacaatatatcccacagaatgttgtagagttcaatgcgaacttcagtccaggtcaacgtcccttggcttatgctctctcataaactctcgtggaagtgacgcctttcatgacgcattccaccaccagtttatcatcctctcgttttctctttatggtggttgattttccatcccatttctgcacatgtaccaggacacccccatctaaggttatggtgctcttgactttcctgtcatctgcagtgacttcgtcaaattcctggcccagtatgaaggaaatctcagtatttttaaaggtactttcagatttaatggtgatcacatccccattcacactgatgatcatgttaggtttggccatgccagccactttcctggtggcaaagcccactcctacttctttcatataatcatcaaagttttcactggagacaagtttccaggtacctacaaaagcatcacacattttgtgagttttctaggattattcttcaaggtgagaaggaagctgcagttttcaggagggtgctgtgacccc

SEQ ID NO: 323897 - DNA, 820 bp, Homo Sapiens
  misc_feature (51)..(51): n is a, c, g, or t
  misc_feature (59)..(146): n is a, c, g, or t
  misc_feature (153)..(153): n is a, c, g, or t
  misc_feature (163)..(163): n is a, c, g, or t
acgcagaggtaacgggctaagagtaactctagagggcgtacaggtgatganggaatccnnnnnnnnnnnnnnnnnnnnnnnnnnnnnnnnnnnnnnnnnnnnnnnnnnnnnnnnnnnnnnnnnnnnnnnnnnnnnnnnnnnnnnnnttttttnttggggtttntttttttaagggagaacagttttattagcatcacagggtccatttttccctttccatccaagcatccagagtctggtgtcctttaatcagttggcaggttcaacctggaggccactggagctgccggcccccaagtacatgaatgtgcagatgatacacagattgtgcacccagcttcccatcgttgatcacaagtcggtatccatctcccaggccctcagcctttgctgtctgcttggccacaaggagtaggtgtcctagaagctgctggtcttcttcttcagcctggctaatccgaggaatgggcttcttaggaatgaccaggaagtgcacaggagcctgaggggccacatcacggaacacaagacactgctggtcctcatagagaatgtcagctgggaggctcttgtccaggatccgggagaagatggttggggctgctcccccaggagttgcctgctgggccttggccacttcattcccatcagtcacacctgcagctcctcggacctgccccccgcgcacccccgtggccgccacggctctgcgcgccgcgcgcaacccagcagccagcaccacggctgccgccatcttccctgagccgcgggaacctctcacccgggtcagcactcggctccgcggccggccgtgggtccc

SEQ ID NO: 323898 - DNA, 908 bp, Homo Sapiens
  misc_feature (19)..(19): n is a, c, g, or t
  misc_feature (67)..(67): n is a, c, g, or t
  misc_feature (517)..(609): n is a, c, g, or t
  misc_feature (615)..(674): n is a, c, g, or t
cctttggcaccatggtgtntcttcctctggaaagggtctttcaattatcaaccccatcccattttcnaaaaggttgcatgtgctttcgttcccaaagacattaagttttatagatccaacccaggagtcgcatcctcccatgtcatccctactctttcaaatcacatacctctaccttttctgcactacacagaagggcctacacacggctttcatactttagcttagcctctccgaccatacctcctaagaccctgaggatcagggggcattatctcatagttctcccgcacttctctcccatcccaacacatacactagcaaggagtccgcacacaagctcctccagtaaaaacaacgcactgggcagtgcatctcaacacatcaaattaccggcgtgcataggagcctgatgcggcaaatatgtgggtccttcgggatccttgaaggcagccctataatttgcatttttctacgctccaaaacactttccgggccagatgcggtggctcactcnnnnnnnnnnnnnnnnnnnnnnnnnnnnnnnnnnnnnnnnnnnnnnnnnnnnnnnnnnnnnnnnnnnnnnnnnnnnnnnnnnnnnnnnnnnnntgagcnnnnnnnnnnnnnnnnnnnnnnnnnnnnnnnnnnnnnnnnnnnnnnnnnnnnnnnnnnnngacggcggtgagaccctgtctcaaaaaaataaaagccaccactttcccacttattatcccagggaaacgcacgcgacggaggagcgaaggagcgtttatttgtggaggcgctcaagtaagaaaccctgctcgctggccgactcaagggtctccaaagccttctctgggctgtatcccctccccaaaaggcaaagaaccgttaacaagtttacttccggcacaagcgtccgcccc

SEQ ID NO: 323899 - DNA, 464 bp, Homo Sapiens
taattgcgttttatttttccatcctttagatacacacagaatgtaaaagggagcatggggctgggggacgggaagcaagaagcagcagccaggcgcttggggaacacgcgagtggtaggttttggggctccctaaggccccttggtgccgctgctgggaaggcggaggctcaggagggcaggcaaccacagggttagtccagacccacagtccacaaagacagcattaaagagggcttacaaaactgcaagattttacaaagaccttacaatagcaacatagaaaaggggaggtaaattccagaaagctacagaacaggtagataatatccttttcatattgtacaaaaaaaccaaacctgacagactttcctataggtagtattttttcagtgttgaaaaaccaaaatttctcctttctccctccttaaaaaatgtttttaaactcctttcatttaaataggg

SEQ ID NO: 323900 - DNA, 979 bp, Homo Sapiens
  misc_feature (293)..(293): n is a, c, g, or t
cttgtagggcgggtgttcattataagatatgggagcgagtgtagtttgtttgagtgtgcgtgcgtgctgctcttatttcacggtctgggctgactcgcaaagcatgtatccaccggacagatgtacaggtatcggcgctctcgaacgtggtacatcctgcgtctctcatcgaggatgtcatcggcgccgcgaaggggtcaagttgagcgggcaggggtggtgaacaaaggtgggggagcttataacgttcgataaagagtacccagcgtcctgtgttgccgtggataccagtntttcgccttcgagggctcagtatttctctgcatatttagcagtggggtggtggggggatcctcggtctcatagggagcggtggtagggaaaaaaatttccgagtggctagaggggatgatagcaacaattacggtgacacaacgtctgggtcgacgcttgctgctcaggattgacgcacaataggtataggggacacggggtggccgggttagtgtcgtggggtgcagcgggcgcgcacctggagagtccatagatgttggactgaaatttctattccgcgtctctgaggggggggttatgtcttggtaggggtgcccccagggggacaaggagtcaggctggaatgagacctctgtgtgccaggcctttgtggatggcgtgggaggagaaaggccaaaggctttgatgcttgggacggatgcccggccactcagctccagacaccagggatctggcaagggggtggggcaagggccagacagaccaacagccttggggtcctggcgagagctcgccaagaccagatctgaagctggctgggccaaagcagctgaggcggcagcggcagacaggtgcgctgtggcagaagccagagcctactcggtgaccagcccttcaggctggggcttggggtgctgcactggacatgggtgtggaagctggcccttccctggggctgcactcc

SEQ ID NO: 323901 - DNA, 567 bp, Homo Sapiens
  misc_feature (391)..(461): n is a, c, g, or t
  misc_feature (487)..(487): n is a, c, g, or t
  misc_feature (504)..(504): n is a, c, g, or t
  misc_feature (527)..(527): n is a, c, g, or t
  misc_feature (544)..(544): n is a, c, g, or t
tagtttgtaatattttattgcaaaaagaagggcagagaacagtctttttcttcgtacctgttcaccgcagtaatttttagcggctctccctgtgcaaagaagtctcatcaatgaatcagcgtatgggccacaaataccttctcagtgcggtttcacctagaatacaagcactcagaagcacaaatttaactgaagtgagaaaccaggccattttgtagcttcagtttttctaccagtaatatattaatttcttgaaatagcctaataatttagttctactatcaaaacagaagcccaatctgggagaacaattattatagaagtcaaactaatttcaatcatattagtataggaattcatattagtataggctaataattcatattagtannnnnnnnnnnnnnnnnnnnnnnnnnnnnnnnnnnnnnnnnnnnnnnnnnnnnnnnnnnnnnnnnnnnnnnttcctttttttaaataaagaaattcngagaggagaaggaagcngactgatatgtggctatccaggnccaattttgtgtgcccnggacctacaacccaactatggac

SEQ ID NO: 323902 - DNA, 1006 bp, Homo Sapiens
tggtggtctgtcccacgggcgatcgggtttttcagtgggtcgtacacgacccgcgcctccatggggcgcgcagttctgtttctgcggtttgactctcgggtgaggcacatttaccccgcagaggggcgcggtctaacctcgcgccacgcggcctcgcgcatgggggtttcgattgcccttggtgcgggtaaccccgcggacgctggctcctcgtccctccacttggtgtttgtccagctgtttcataatcccattacgctgggggacccccctgcgaggcgtgtctcctaaaatattgaataattttatggttctttacgccaataaatccgtgtcctgttgcgactaggcggcccaggagaagcgagctcagtccctcataaccacacaggagccggtctgaggtcgatcggcgtgggtgcggccatccgtccagcgcgcctcgttcccaaaaacggagggttcgtagtgttttttaaatctgtcggacttccccgcggaatgcaattctgttcgccatcggccccttgtcttcccggaggggtgcttcgcgggcttggggcagccttgggctttgcgtggtttcgcggatggctgcttgccaatggtgtaaaggccagtaagtgagcttgctggtcacgccgccgcggccttttccccggccagagggctccaggcaaaggggactctcagatggtgggcaccggaggctgttcgggaaccggattatttaattccaagctggcagcaatacatctttgtttatgtccaaagggtccgaagaggccttccatcatcttcatttgcactcgaagaaggcaatgaaagatcgaagtcaaatttttcatcggccaaaagaagaatgtcttccttcttagggtcatccatgttcacgtcccctgcccggcagggtgaaggctcatcgcggccgccgcctccttccatggagagagctgtcagaagtcaccaaagcggcagacgatgcaggacgcgcctccggcacccc

SEQ ID NO: 323903 - DNA, 481 bp, Homo Sapiens
ttcaaacaggagcagagatggggctgaggcataggggaggcccctagcgctgccctgaggaggagggggtgagaggctgaggcactcagtctcccttctgcttgggtgcttgcacagtcccattggccagagcagtggggttgcctggggatgaggcatttggtgtctgggaggtgcctcgagaggtgtgtggggggcgcaggtaggtgctgaagagtttcccatagagtgggtcatggagggagaagttctggaactgacagagggagaggccttggctggatcctgcctggcacagctcagcatgcaaagctgtggcagcagggtggggtgaacccagcagcaggtgcaggatggtgctgaagccgtctttgtacagcaggcggttgggaccctctgcttgctcttcagcaaagagctcaaaggccagacgagttagctcttccaggctcctgcccccatccagagctgctagtgcacc

SEQ ID NO: 323904 - DNA, 433 bp, Homo Sapiens
  misc_feature (306)..(306): n is a, c, g, or t
  misc_feature (381)..(381): n is a, c, g, or t
  misc_feature (390)..(390): n is a, c, g, or t
  misc_feature (400)..(400): n is a, c, g, or t
  misc_feature (410)..(410): n is a, c, g, or t
aaattttaaagaaggtatatttatttaacaaacatgtatgaactattcattaacaatccaggactgtggaggacaggggacagaaacaagcctcgaagagatcacaatatggtggagtgcatgcatggcacacctggctatctgaatcagacgtttgcctctgtgtgtgtgatgaagacagtagtgagtggaatggacagagagtaactgtaaattctgtaggggagggaaaacgaacgtttactcattctctaacagtcttttgctttactatgggtcatatacaacagttaatctccccatccntcagttccccaggataccccacccggaaacccggggtaatttaccctctggggttaaacttttcactggtttacnggtgagggngccgagggcnacctttaggncccttaaaccatttttccccacc

SEQ ID NO: 323905 - DNA, 832 bp, Homo Sapiens
aattttaaagaaggtatatttatttaacaaacatgtatgaactattcattaacaatccaggactgtggaggacaggggacagaaacaagcctcgaagagatcacaatatggtggagtgcatgcatggcacacctggctatctgaatcagacgtttgcctctgtgtgtgtgatgaagacagtagtgagtggaatggacagagagtaactgtaaattctgtagggaggaaaacgaacgtttactcattctctaacagtcttttgctttactatggtcatatacaacagttaatctcccatcctcagttcccagatacccaccagaaaaccgggtaattaacctctggataaactttcactgattacagatgaggagcgaggcaaccttaagccataaacaatattcctacagtatgggggagccgcaatcatctgaatgccagttttccagagccagcctgtgaacgtttcatctgagggatgttttcccgatgatcatcttatcattatcgcatcttaaaagctggagaagccctcaaagccggtttggcacaaatgtcaactcaagggaggaatgccctctgtaacactcctggcagctacaggctttccacagcagcggaatgtatttttaaccaacaaaaagtattagaaacagcttcctcgtactgaactaaatcctcctcatattttccaaccatttctctaatggaatttaattgtttccatttggtttctgaagcaatacagaattagcctattctctctcccatttccttcaagaatttgaaaacaattatcatctgtatttctgaattatctccagactgaact

SEQ ID NO: 323906 - DNA, 403 bp, Homo Sapiens
cagaatcactaggcgccggcgcctccgaggcagtgtgtttccgcccagagctggagtctcccagctgccagccgaccccgaacccgcactcccgccaaccgcgctttttgtgggcggtcggaaaccacagcctccgttggatatgttcggtgcatgttataaacaaccacttaaaccctccggatctgagcctcccgcagaggaatgcagaatgacgccacggcacgcaggatgtgatgtcaccgagatgcagaggatactcagtcaaccaacatttactgagcatctacttcgtgccgtatgtacgaagctagcaaatatgtacagcaccagtactgattgcagggagcactgtagaagaggaatgaaggccaaacaattaaaagcggaggcggggaggtct

SEQ ID NO: 323907 - DNA, 474 bp, Homo Sapiens
  misc_feature (200)..(268): n is a, c, g, or t
  misc_feature (297)..(297): n is a, c, g, or t
  misc_feature (323)..(323): n is a, c, g, or t
  misc_feature (347)..(347): n is a, c, g, or t
  misc_feature (359)..(359): n is a, c, g, or t
  misc_feature (368)..(368): n is a, c, g, or t
  misc_feature (380)..(380): n is a, c, g, or t
  misc_feature (425)..(425): n is a, c, g, or t
  misc_feature (452)..(452): n is a, c, g, or t
ttttcagtttaattccatttattattctttaaggatacatacatggagataaagtgatgaaagacaagaaggctatggtcaacacaaagttcagtacaggggttccctctatcagacagggatagagataggttcaggaaaccgcacacggtacctcaaaggaaaggcaataaggtgggtggtaggcacacaggggtttnnnnnnnnnnnnnnnnnnnnnnnnnnnnnnnnnnnnnnnnnnnnnnnnnnnnnnnnnnnnnnnnnnnnntccattgcatgtatgaaattttttaaaanttcaaatggcttataacaaaaacaanttatgtataatgtctcaaatgggngattcacagccnggggggctncttaatttaccnccactctatccttggaacccggggctaaaaccgccgctttgtttncctttcccctcttacttgagggtaggngttttgccccgctctggcacat

SEQ ID NO: 323908 - DNA, 1027 bp, Homo Sapiens
  misc_feature (85)..(104): n is a, c, g, or t
  misc_feature (111)..(124): n is a, c, g, or t
  misc_feature (136)..(260): n is a, c, g, or t
ggggggatcccacccctttttttgtcccgggtttccttgggaaaaacataggccctgtttcctttcctttgggggcccggccccnnnnnnnnnnnnnnnnnnnnttttttnnnnnnnnnnnnnncccccaaaattnnnnnnnnnnnnnnnnnnnnnnnnnnnnnnnnnnnnnnnnnnnnnnnnnnnnnnnnnnnnnnnnnnnnnnnnnnnnnnnnnnnnnnnnnnnnnnnnnnnnnnnnnnnnnnnnnnnnnnnnnnnnnttgtaaaaatgaatttattaaaatgctcataattataaaagaatattaaaatgcacagaaattaacattaataattataaaagaatattaaaatgcacagaaattaacattaattacaaactttacatcttatgccacaatgtgtgaaaagcatcatgaatagttctacttcagttaagctgctcatacatttttaccctctcaaacataatatgaacataaaatggtacaagaagtgtttcaacaagagtacattctgacccccattgtgaattaatgttttatgaaattcaaggcacacatgcaataaaaaagggaagactttggtgacagtttataagatggccttgtttagttttaaaataaaaatgatagctttccctttctaatgatatatagctaaattatctgagggatgtttaatgaaaaatcccctgagtatttgctctaatgtttcaatatgctaaaattcacaggcattaaaaaaggatataaagctcaagtttcctctagtggttaacactggacaggctgaaggctagattctccctcttcacaggtccactgccacacccatcaatttccccagggctgctgcctctgaagccacttacagatgcagccaccattgtctgcagacacagctccatgcttttctttatcactgcaagtcagccgtggactcactaacaaacactgtggatggcatggggaaatgaccctgcatctccactacaactttgctcttttgggcatcttaacagtgt

SEQ ID NO: 323909 - DNA, 378 bp, Homo Sapiens
  misc_feature (208)..(208): n is a, c, g, or t
  misc_feature (226)..(226): n is a, c, g, or t
  misc_feature (242)..(242): n is a, c, g, or t
  misc_feature (288)..(288): n is a, c, g, or t
  misc_feature (307)..(307): n is a, c, g, or t
  misc_feature (313)..(313): n is a, c, g, or t
aagaaatgaatttattaaaatgctcataattataaaagaatattaaaatgcacagaaattaacattaataattataaaagaatattaaaatgcacagaaattaacattaattacaaactttacatcttatgccacaatgtgtgaaaagcatcatgaatagttctacttcagttaagctgctcatacatttttaccctctcaaacatantatgaccataaaatgggnacaagaagtgtttcancaagagtacattctgacccccattgtgatttaatgttttatggaanttcaagggcacacatgcantaaaanagggggaggactttgggtgaccggtttatagggttgggccttggtttgggtttttaaatttaaaa

SEQ ID NO: 323910 - DNA, 426 bp, Homo Sapiens
ttcgtgtgtttttccccatttgaaacctttcccccccttaaaaattggaacttggtacattcagtaggaaattcgtcactcaggctgtggcaagaccaagaaaagtgcaaagagacagaggaggaatgaaggagtgactcctctgtggttaacattcagggagcctgtctaaaacctccccttttgtatatgctgggagggtatgaggggtaggaggatggtcctggccctccctaaactcacctccctccaaaagccatgatcttgcccttggcagtgattgctgctagggcagccatcttggccccaaaaacagtagctggggaaaaggctgccattttgatgacagcaacttttccttttaaaactgcactcctctaattcccatttgtccaatttgctcccccatactgggtctcccctgtg

SEQ ID NO: 323911 - DNA, 693 bp, Homo Sapiens
tttttcgaacacagatcactttattggcatggctttgttttaagaaaaggaaaagtgacaaagccaagagacagactctgctaacagatgcctgggggtggctggacatttttgcctcatgctgtgcaaagagggggatcctggcccacacatcctgctgattccttgggacaaggttgtctgcctgggcctcactgcaccttcttgaatacttgcttgcagaccacaccttccactctcatctccaggtgcagctcatcaccctcgatccactgggtccagccacgcccctccttctcacccttctgcacacactggagcttgtctccgtcccagctcactgttgtcatgcacttgcggtcatctatgcctgtcagatcctcctcaaactccttcccaacctggaagtccatgatgtagttcctaaaagtgctcagcgtgcggatgatcatatggtcaccgtcctgcacgatctctttgtctggcttcagcaggttggcgattttgcgcaaggccacattgacgtcgagggcgcgcaggtactcctcgaaattctcgttgaccaacatcttccagtacccagtgaagtcgactggcatttcggggagtgactggaccagttggccacaagcgggcgggacggctggagactgccgggacagcggctgcctggtgtacgcgggtgctcgtgcc

SEQ ID NO: 323912 - DNA, 622 bp, Homo Sapiens
  misc_feature (256)..(256): n is a, c, g, or t
  misc_feature (261)..(261): n is a, c, g, or t
  misc_feature (454)..(454): n is a, c, g, or t
  misc_feature (459)..(459): n is a, c, g, or t
tgcacatgcaaaattttattgtaaaacggtagccatttgcatttataaagaaagacaccgttctcagcatcctcagaaggggcagctaagctttataggaggtttcggggattctgattgaacgtaacaaataatagtataaatgaggaagatttaatatggcaaaattcacataatttagaatccagcagagagcacgtgtggggctatttgggaatggacagtgaagggccaccttttgcaaaacggagtgacntggcnaagtgaccaagttgggaaatacttttctttccaaaagactggttctaacaaatgttgacagtgtggccaaaatcactcccacagctcccattgttgctaaggtgaaaacccttggagaggctgtttcaaggcttatctgtggtgcctgaaggcgtccctccttaccctacttgtccttcaccctaaacacttncactngcccctggcagcatccgctgggaccatccctgggacagagctggctcatgctccagccacatccccagggatgccctcctgtggaacaaatgccatgcatgtgtgcttgggctcatttccagtaaagatacatcacagtctatgtaataatgatgagaactta

SEQ ID NO: 323913 - DNA, 741 bp, Homo Sapiens
  misc_feature (159)..(171): n is a, c, g, or t
  misc_feature (686)..(695): n is a, c, g, or t
ggagaatggtggttcttgcgaaacacctgaagttttactcatggtacaaaagtatttaataagtgacacatcagtacagaaacacagagcttgtagcttgtcctttaaaaccagaatggccaagtgaaaagtcagtacagattcttatttttactattnnnnnnnnnnnnntcaaagggacacactggggaatttgaactactatgctttttcttcgttctagagatgacatatatgttttctgataagtaatctaccacacattgcactaaaccaaagcatacaaacagccagtaaagctgtgctctacctgctactcatgctgggctggacagtggaacaccatcttggtaggagagattttgacaggaagaaactgcagagtccctacctaacccagagaaccttacaaactggtttatacacaaaggattttcagcaaacatgcaaacacactaacatgctataggaatatgttttagtctatttctagcacacagcatacattcataggtgcccagtaaaataggaatgaatgtcaatgtagaaagcatttttgccttcacagtactaacaaacacctaaaaagcacacagcatataatactttgatctttaagtggataatcatggaagttccaagatcacatccactaggttagcctgagtattcatctataaaaatannnnnnnnnncaaaaataatgcttaaaagagacttctagaaacagtgggactaccc

SEQ ID NO: 323914 - DNA, 1099 bp, Homo Sapiens; identical to SEQ ID NO: 246293

SEQ ID NO: 323915 - DNA, 847 bp, Homo Sapiens
  misc_feature (219)..(219): n is a, c, g, or t
aaatcccaaagacccctttagtttcaatgggcccaggggttttttcctttaggggggaaccaccggtttttgggccccaatgtttctccttttaccctttacggtggggccccgggcgggcccaaaaaggaaaagggtttttagaaaaaggtttctttgggggggcccggagggcgggcccgaacaatttttatggatattcggttgactcggggtttnattttgggaccgttaagctatttcgcagggagctttttattattttaaaagcccttgtcataacaaataccttgtccccccttttgggagggaaaagtataacttttatttacaaataattattgagcatgctagatgctactagaacaaaagttacagtttccactgttaaggagaaacaatggagaaaccagcgtgagctccagtgctttcttcgatttggtgcactgaagaatcccattttgggagcagaaaaaccctgtgtgttgtgttagctgttccttatcaccaacgagagtaagtattgttaccctcactacatctatgggtaactgaggcacaaacgttgtgaggcagttaatgttcccagggtcacccatgggccagctgggagggcagcatcgccccgtgaacataccctgggcccacttttatgaatcttaaagaaataatcagacaagtatatgaagatattttttcctaggatgttccttgaagagttgttaatattgaaacattggaaataaactattcaaccataggaaattgattttaaaagtatatcacatatagtggaatcctatataccattaagcattttgacttagatatagttaatgaatttact

SEQ ID NO: 323916 - DNA, 919 bp, Homo Sapiens
  misc_feature (72)..(80): n is a, c, g, or t
  misc_feature (222)..(222): n is a, c, g, or t
  misc_feature (229)..(229): n is a, c, g, or t
  misc_feature (232)..(252): n is a, c, g, or t
  misc_feature (254)..(257): n is a, c, g, or t
  misc_feature (263)..(263): n is a, c, g, or t
  misc_feature (332)..(332): n is a, c, g, or t
  misc_feature (412)..(413): n is a, c, g, or t
  misc_feature (899)..(899): n is a, c, g, or t
  misc_feature (905)..(905): n is a, c, g, or t
gctcccacatttgcggaattgttttccagaaacccttttgggtttgccccccccgggccgtttttttaattnnnnnnnnnattcccaagcccccttggttcaggcccccgggttctcccttagggaaccaggttttggccccaggttcccctttcccttatggggcccccgggcgccaaaacgaaatggttttggaaagcttcttcgaggggcggagccggnccgacanggnnnnnnnnnnnnnnnnnnnnntnnnnttttanggagggaattatttaattatttagatgcaccaaaccagtcagattaccattaaaaggacacagcctganccagagttaagctaccttttaagcattttgtgggcgagggggagatctgtgcagggggaagcctattatagaaacagagnncaaagccagttatttaactgagacatgcattatattattttttacttttcaaggaaaaacatgttttacgacttgagtttatctgtctagtgaccttgcagctgcacagctagagaaacagggtcttcacaatgcctgggaaaggaggagagataaggctcactagccacagaaaaacaggcagttaatttttaaaggactccagctctttctctttctcagggggaattgggtttttcttacatacaactgagtttctccttacacattctttaatttcttttaattcctattccaataccataaaagcaattaaggacaggtctagagttagttaaagacaggtggaggtggtgatagagaggacagggttacattggtaagggtgacagtttagaagggggaaagtcccttttaagtggaaatagatgagaagttttagatctgcacaaccctttttccagggaagtcccacctttgcccccngggtangttaaaaggacgta

SEQ ID NO: 323917 - DNA, 885 bp, Homo Sapiens; identical to SEQ ID NO: 137363
  misc_feature (231)..(249): n is a, c, g, or t
  misc_feature (281)..(341): n is a, c, g, or t
  misc_feature (395)..(398): n is a, c, g, or t
  misc_feature (401)..(402): n is a, c, g, or t
  misc_feature (404)..(407): n is a, c, g, or t

SEQ ID NO: 323918 - DNA, 416 bp, Homo Sapiens
  misc_feature (371)..(371): n is a, c, g, or t
gggtttatacaaaaaccttttattgactgtatttcttctccccataacctggaacccagccagcatctatggcttcctgctttctgattcttgaaagtggggccttgggaacatgtttggaggctatggaaggtgggaatctcctcacccaccggctatgcaggttgaaggaagctttcttgcctggctgaagctacggcagcttcccagggtagcccctcaagtctagaggacccatcccccactaaatgggtgtgaggaagagatgatgcatctttcagaggctttgtcactcactggctcctatcccactccagactgaggccctagagctgaaccagtctctcctgtggagatggggcccagcagcnaggggagggggttagaggtgagtgtgtgcagcagctctgggtcct

SEQ ID NO: 323919 - DNA, 602 bp, Homo Sapiens
  misc_feature (389)..(399): n is a, c, g, or t
  misc_feature (456)..(457): n is a, c, g, or t
  misc_feature (459)..(459): n is a, c, g, or t
  misc_feature (468)..(533): n is a, c, g, or t
gagctatggacagcattgccagtaacacaggccaccctgtgcagaagggagctggctccagcctggaaacctgtctgaggtagggagaggtgcacttggggcacagggagaggccgggacacacttagctggagatgtctctaaaagccctgtatcgtattcaccttcagtttttgtgttttgggacaattactttagaaaataagtaggtcgttttaaaaacaaaaattattgattgcttttttgtagtgttcagaaaaaaggttctttgtgtatatccaaatgactgaaagcactgatatatttaaaaacaaaatgttatttattaaggaaatttgtaccatttcagtaaacctgtctgaatgtacctgtatacgtttcaaaaacannnnnnnnnnnactgaatccctgtaacctatttattatataaagagtttgccttataaatttacatannangaagaaagnnnnnnnnnnnnnnnnnnnnnnnnnnnnnnnnnnnnnnnnnnnnnnnnnnnnnnnnnnnnnnnnnnctcacaaggggactagagaacaaaaacaaccgccataaaccatgctttcctctataacaactataataa

SEQ ID NO: 323920 - DNA, 1120 bp, Homo Sapiens
  misc_feature (25)..(25): n is a, c, g, or t
  misc_feature (39)..(39): n is a, c, g, or t
  misc_feature (71)..(71): n is a, c, g, or t
  misc_feature (221)..(283): n is a, c, g, or t
  misc_feature (293)..(416): n is a, c, g, or t
  misc_feature (440)..(683): n is a, c, g, or t
gggcggcgggtagcgctctgcgcgnccgcgggggagttngcgtggcgagagggcgcgtggtgcggaccttncgtagcgtgcggcacgtgtggggcggcgtgcggcgcggtggtagcgggttgcgtgccaggtccacgatgtgcgcggtgtccggtgcgtgggggggtcggttgcgcggtgtgggcgggcgtcttgagggggttcgtggttggagcgcgtcnnnnnnnnnnnnnnnnnnnnnnnnnnnnnnnnnnnnnnnnnnnnnnnnnnnnnnnnnnnnnnntcaggacgtnnnnnnnnnnnnnnnnnnnnnnnnnnnnnnnnnnnnnnnnnnnnnnnnnnnnnnnnnnnnnnnnnnnnnnnnnnnnnnnnnnnnnnnnnnnnnnnnnnnnnnnnnnnnnnnnnnnnnnnnnnnngcggaggtgttggtggcccggtcnnnnnnnnnnnnnnnnnnnnnnnnnnnnnnnnnnnnnnnnnnnnnnnnnnnnnnnnnnnnnnnnnnnnnnnnnnnnnnnnnnnnnnnnnnnnnnnnnnnnnnnnnnnnnnnnnnnnnnnnnnnnnnnnnnnnnnnnnnnnnnnnnnnnnnnnnnnnnnnnnnnnnnnnnnnnnnnnnnnnnnnnnnnnnnnnnnnnnnnnnnnnnnnnnnnnnnnnnnnnnnnnnnnnnnnnnnnnnnnnnnnntgcggagttcaatctcagttttattgggttcgtgataacaggaataggatttgcagggagagcagggatatcagaaaggtctgtactggatgttttctgagaggccaacagagaagccgctgtctgaatagtttctgattgagttgtacttgtctctgtatcaagttgttcctttgcttctgttttatcatgtccactcaaagcaagacagttagcatcttcacttgtttcatcctcttctgttttggttttcttgggactctcttctttatgaggtgaggatgtcctcttgactcctactataggagtaggtatttttgttgctgcatttcctgaagttgctgcatttcctgaagatctaggtggtgggtttaccagtacgtgttgaaggaaacaactctgggagaccgtaggcttttgggtggttggagaaatgg

SEQ ID NO: 323921 - DNA, 979 bp, Homo Sapiens
  misc_feature (346)..(433): n is a, c, g, or t
  misc_feature (437)..(478): n is a, c, g, or t
  misc_feature (546)..(558): n is a, c, g, or t
  misc_feature (636)..(636): n is a, c, g, or t
  misc_feature (651)..(651): n is a, c, g, or t
  misc_feature (724)..(724): n is a, c, g, or t
  misc_feature (747)..(747): n is a, c, g, or t
  misc_feature (761)..(761): n is a, c, g, or t
  misc_feature (765)..(765): n is a, c, g, or t
  misc_feature (774)..(774): n is a, c, g, or t
  misc_feature (779)..(779): n is a, c, g, or t
  misc_feature (782)..(782): n is a, c, g, or t
  misc_feature (788)..(788): n is a, c, g, or t
  misc_feature (799)..(799): n is a, c, g, or t
  misc_feature (801)..(801): n is a, c, g, or t
cccccctctcttttcctcccgccggggggcaaatatattgttttggcgcagggagggcggcaagagggcgtgtgatatcgccgcgtggggggattttcgaggttcttctcccctccacgtcttgtgtaggggcgttttcacctttctgggcgggaaagtcgctttaatgaaaatttcaccaccatttttttcccaatctaaagtggccacgaggggggcgggggtttatttgtgtatattttggagtcgtcggttggcgggacttcctctgttgttagtagagttcccaaagtaaagggccgctctgtacaacctccccatttccgctatctcttgttaaaataannnnnnnnnnnnnnnnnnnnnnnnnnnnnnnnnnnnnnnnnnnnnnnnnnnnnnnnnnnnnnnnnnnnnnnnnnnnnnnnnnnnnnnngccnnnnnnnnnnnnnnnnnnnnnnnnnnnnnnnnnnnnnnnnnnagtacacgacagccggcccgccccccgcgtgacaaacaggacgccgtgatcgatataactgtcttccnnnnnnnnnnnnncggtgggataatgatattctcttcctcccgacctcccctcctccgtagctctgtagcactcagcctctcggctggagnacgtcgggggtcctncggcccgcgtgcaacccccacctctcttctgaagagtagcggcatccattggcgaaccagcgggcgcgagagncctctccctggcctcctcccatngccctgtctctccnactnctgcttctncgctnccnacctangcctcctttananggctagaaggtaaggctcagctttagacatactgagttcgatgtccctaaatctggagggtgagctatctaggaatgagttgatttggagctcaggaaagagatccagattggcaaaaaaacactgagagtcaggatgggtttgcaggcttgcctgagattgccctggggacacttcc

SEQ ID NO: 323922 - DNA, 522 bp, Homo Sapiens
gtctttcactccactttattattgtattctgaacatggcacctctgcaacttttgtttccatatcctttgagcgtcttctagaaagcaaagcttgattctgccttctgggcttgagcatgtgggcatagctgggttgtcctgcactgcctgaagagctgggaaggaagaaaatagtaattgggagtcttgtgtactaagctaatttccaggtatcggacctgctgagagtcccagcgtctctgccaggtaactgtcttcttcacaaatgtatgtgatgcaaatttggcatgcctgtgcccctttcggaataacggagtcaatcaaagctcgggtcttatccataactgtagcattttcacgttttactttctccatctcttcctggttcagcacccttgtctgtaataattcatccagtaagccatttattgtaccttcacccatggaatggataaacagctttttcttctccttcaggaccttgtcggccatggcttttctctcctacccttcttgtgtcc

SEQ ID NO: 323923 - DNA, 1003 bp, Homo Sapiens
  misc_feature (191)..(199): n is a, c, g, or t
  misc_feature (877)..(877): n is a, c, g, or t
tttgtctccaggggaggggctgtttgctggctcaggctgaggatggcccaaagtccagggtctggtggggaggagggaagcttaactcaagtttgggttagtgagttagcaagctctttgtgcagatggggatgtaggtaaatctttttaaaagtgaaattaacctcctgccaattttacaacccaagaannnnnnnnnaagggccttggagccatctctaaaacaaacctcaagggatttagtgccctgtctccctgtctctagaagccttagcctgggcacctggctcaatcttgtaactgcctgctagccatagattcctttcagccttgctgacttctccctataaaagtaaagcctttttctgccccagctctgagacacttgcagatcttaaggtctgagacttgctgattttctggttggagtgtttttttgtattgccatagtcccttccccctgaagcaatagcccctccccacctcctgcaatacgcctttccaatctttattggaagtctctccctgcctacttcctaatttattcttatttgacagagggtatggaagacttgcaatttgaaaactggggaccagttccaaagtcagtaattgtgttaaccacgtgtataacagctctgctggacacccaagaaagccatgggaacaccaactggaaaggtcccccttccccaggggagcctgcgaaggagaggttctgtagaatcccaagcccacatttccaaagtcacccccaacgcgtcctctcacacccgtccactgtgcgtttgtatgtgtctgggatcccaggcaaggtgaattttctttttatttgggagattgttcacggaaaacagatcttcttctctcttgtccncctattaattgtttacaatatttgtacatctatgcaaaataatttgaatgggccctgggggccctttttccctgccagcactttaattaaaaaggaattggtctgggcatttggcacaccccacca

SEQ ID NO: 323924 - DNA, 745 bp, Homo Sapiens
ggtcttcaggggtgaagttccagcccaccagatgccccctgtagggatttggccacagggaacccaggggagaggggcatcagcttgcctggttagcaagggctgtgaagattctttctacctatgactctcagtgctgttgcctcttcctctggatcttggaagcttccatgctgaggtctgaaggttcccatggctgtcctcttttcccaaaggggcaaactttccatcagggcatcttctgtgcctctgaggatcattttccaattataggcaatggtagtacgtgtttcagtgcagaatgagatagagttgtttaatttgacaataaagcgatgcgtcaaaaacctcagtcaacacagtaagtgttttcttgttttcctgctgaccaacctaattctggtttcatacagggcagccaggtgcccacctaaaagactgcacttctcaacttccagttgtttctatggataatggttggaagcagaaattgggttggggcttccagataatcccccctcacagggactgcttcaagagaaagggatgccctttggttctttctcctttccactgcctggaatgtgatgtctgacactgtggcagccatactggcataatgaggccaactctctgccatgctaagagtggcagagctgggaattgaaaagagcctgctagccttgggttgcttccccttgatcggctcattacttggaagagaacacacccttctcttattacc

SEQ ID NO: 323925 - DNA, 405 bp, Homo Sapiens
ttttaatcattttttggttatgccaggtgtctcctgtgtgtccctccagatccctctccagccctagaaacctgagctctataaatgttgcctctctccactcatcttctctttggcttcaggttgagttcagccaacagatgcccctgtaggatttggacacagggagccaggggagaggggcatcagctgcctggttagcagggctgtgatgattcttctacctatgactctcagtgctgttgcctcttcctctggatcttggaagcttccatgctgaggtctgaaggtggctccctgcctcccactgatgtccttagaatcccatcctcacctaatacctgggtattgaacactgcctttcttaggatgtcatttaggctctcgtttcaattcccagtatgc

SEQ ID NO: 323926 - DNA, 796 bp, Homo Sapiens
ttttagttacatagcatctaagttttctgatcactaccaggtaattttcaaccaataagaaaaaggaaccaacactcagctctgtagaaatctaccttcttttagaaacctcaggcctctgcacccctttagacaactcatttacaaccacaaccttccatggcttctcacatgccagccagggcagggtaaaaacggcaatttcttacaccgaaaggtcctttttatgtaacaaacagacctccccaaaccacaacttttttgtcctattgatgactcgcatgagatcaaatctctagtgtcccctgactgccccgacagggtctaggacaacacaggttaaaaaggacagcagggtcgttcaactcccacactgcctcaggtgttttctcaaagcacgacaattctgcaatggagacttacacgtggaaaagaatcaaactgtgcaggtaccctcagtcctctgccactaccagctcaatagcttgagctcagaggatcaagtcaagtctctgtctcacttttaatctagcacacaagaggcacaactcaggcagtacacggtattgaagcatgcaacaggtcattggtaacaaaactcagttagattaagagtacattaaataaatctttgtagttgagtagaaatcacaaaacagttggtgaggacaggtctgtaggctcagctttacatccaggtttttatacaccagcagccagattcacaattgatagatattgcaccggaaagatgtgtgcagggaaaagaaatcatcatcacatttaatgttcatga

SEQ ID NO: 323927 - DNA, 322 bp, Homo Sapiens
  misc_feature (127)..(127): n is a, c, g, or t
  misc_feature (198)..(198): n is a, c, g, or t
  misc_feature (201)..(201): n is a, c, g, or t
  misc_feature (253)..(253): n is a, c, g, or t
  misc_feature (273)..(273): n is a, c, g, or t
tccctagattaattcttgacattttttggatcaagtaagaacccactggagcctttccctggaaaaaagaacacatactcagtctcacacacaatttctgggggctcacagaccctcttgaagcctntccataaaccccctggtgaagtccccctgcccgatagcctgagggaagacatgtgagtggatatatgtgcnctnacaggggcgaagacagccctggatgctctgcaatcccagagagcatgaggcnccatgtcccaaagcttggtntgtggccctgggctcctccccctaattttatctctctgaagaagctgag

SEQ ID NO: 323928 - DNA, 1250 bp, Homo Sapiens
tttttttcagaactactaaacatttattgaatgtgtaaggtattaaaaacatttacaattttgttaataaaatgatgttttatattaatgtatgtattatgctttggaatatgctaagtcatgtagataactttacatttctttcaataactttattctttacaaaatatacaaataaataaaacaattcaacttttaaaagtattaccatatgcaagaagaaggtattgctatcaccattctaaattaccacaatgcattcatttcctgttcccttatctttcaactctagtggcaaagtaaagactgaattgaaattaagctgcactacaacatcattaccagggatagacacataaacaaagtcatttccaaataaggaatgctggatctccagagaagtgacaaagaggagtctactgagttttgcactcaggcacatccttgcctgaggaggcgtgccaaggacctggctgagaatccacactctctgctcctgcattttgcacctctggacaaaggcctaaacttgagttatcaaaatagcgaactggatgaggtgatggtaaagactttgatcggctatcaaaaaaacaagattttggtgattcctttggcacaggatcttgtaaattccgttccttgcattgagagggtgtaatttgtttctttttagaagctgttccagtcactttaggagactttggagaattctcacaagttacttgtttgtgagcctctcttttaagggttctttccttccaagttttgacctcattggaaagatgctgattattgcttaacaattcattcttttgttttattagctgttcattttgctgctttaacttagaaatttctttttctagccttatatgttcacttttcaaaataagagcttttgtgttttgtacaatgccgctgccacctccacaagttaagggtttatttgaaggctgaggatcagtatgttctgatatcactgaggtatcttgggcctgttgacttcttctgagattttctctcaatagccttataacttccttttgatattctacagtggcttttgtagcactgatttccttttcaaattctttggcatttttcattttctctaggtctattttcacaagcttcattttgagatcttcaatttcttctttatatggcttagctcctaaagcactttgtcctgaagtacttgcgacgcgtgggtcggacgatatcccgggaattccggaccggtaccc

SEQ ID NO: 323929 - DNA, 1215 bp, Homo Sapiens
ccaattcaccgtttgtggtggagtgtggtgtctcccattttggggcccaggaatgccttttaaatgaaaattccccatcccggttgtccttcgaaaagaatccggccagtgtcagggggccgttaaatttaggaaattgggagcgttccgctggcgatctcccctgtgtgaataggaattccaggtaaagtgcccttcagaaagtccccttgggggatttgtttcaagagacgcgtcgggttgcccccccgggccgttttttattggggggggaatccccagccccttagtccagttccaaggatttccctagggaaacaagttaagggccatgttccccttccctttcggggtcccgcgcggccaaaagaatgggtttagaaagtttctcgagggtcccggggcggcccgacatgttaaaatttttccttaaaccgttagtttttccatactagcaaaatactttatttttataatgataaaacaaggaaagtaaagatttctttttggtgtataccagagttaagggcagtagaagaatatggggattaataggacttttatgaacttttgatgacaataaaaagttaacaataccaaccgtttgccataaaacttatcatagctcccccaaaacacacatataaaggatcatagttttaaaatctataaaagtaaaaaatatacagttggaagctctagcgcttattccatctttcatataaaattgtaaacatttatttacacaaagcaaatgtgtataacaaaagtctgagcacccttttcttctgagttgtggctcctggaagacggggctgtgcacagaagcaaagtcatctcctcccctgactcccgaaaaccaggttcataaataaagccatgggcagctccctggggggaccccaagaatcacattttattgctatgacactgcagcaagtgaggagcccccactgtgtcgccggccccccaggactaaggcggagtgccagggccagcgagccccggggacaggggtgggagacggggcagcagccagatggggtcaggagaggaacaaggatccacaaccagccttcagccgatttttgggagaaaagccgctgaggtcaccctcttccccttcagattggggaactccctcagagggtgaaattttcactggctttatgattcaccccttctttgagagctaaactgagtacatgggaaagg

SEQ ID NO: 323930 - DNA, 1429 bp, Homo Sapiens
  misc_feature (61)..(75): n is a, c, g, or t
  misc_feature (427)..(427): n is a, c, g, or t
  misc_feature (464)..(464): n is a, c, g, or t
  misc_feature (909)..(1023): n is a, c, g, or t
cgtcctcggggagaacaacaaggttaggggcccaagtgtctcactttccctttgggggggnnnnnnnnnnnnnnnaaaacgaaaatgggttttgaaaaagctttttgagaagggcccgaagaggcggcccgaccaaagtgtgtattttagcgcggcacgataaaatgtggggggccataaggtttaaaattgttaatgctccaagaaaaacaaaccctaaagttaaaattgggatagcgaatactgctgggcataaggaaaatattacgcaaattggaattcaaaagggggttattatgtgaacctgggatgtaagagtacatcctaacaacctgttgttgaagccttttaataaagtaacagattttaaatcagatagatataaaaagactgaagaaaaacagtaacttttccttaagttctcttnatccataaagaatgacaaactccatatggacagtaanagttagaggtcatccaatttaccaaggcattttgaacacatgaaccttaaatacctactttaagcccaaacaaggtaaaaattaatccggcatttcattgtgctccggaagtttaattttacatatcatgttaacaaattatagaaaataaaataaaagcattttccatttttttgaaagtacacatcattacttctcccaggtacttcagtaatttaagcttaatactcgttttattaaacattaaacacaaaaaagaatttacaaaatcttgcactgttattaagaagagatggaaagttctcccaacttcagcaatgttaagagctgtttttaaattgtgaaaatgaatagaaacactagctctttaggagaatttcaaaatacatctgaagaagctaattgtctttcggatattgtttattcaaacaaaacttttcgctgnnnnnnnnnnnnnnnnnnnnnnnnnnnnnnnnnnnnnnnnnnnnnnnnnnnnnnnnnnnnnnnnnnnnnnnnnnnnnnnnnnnnnnnnnnnnnnnnnnnnnnnnnnnnnnnnnnnctggcctcaaataaacaattctttggctaattctggaatttgtgtcagatgcctgtgggatacttttattcctgatcacatttaacacaaaacttagtgtttatatactgtaaacaacataaattacatattgtaaaatctactaggattcataaattgcctacaattccatttactttttgctttcttttaagttctaaaagttactgataaagaagtgttacttggttttataagggaatacttgatgataaaattcttcctgtctgaaaagatgcactaaatatttctgatcactaaaaagtaaagcttctatcacctcttgaacattgacttcactttccaaagatgtatatatcatctctctcaatgcccaagtcaatagtcgagttaaaccaagtatttg

SEQ ID NO: 323931 - DNA, 864 bp, Homo Sapiens
aaacactgaccatgaagagccaagaaagatgacatgatgaagccatcaggggaagcaccaaacatcctcaactctgctcacccatggttttctcccgccctcccagagctcctcctgcgtgagtaatgcagtgtgtgctggtgcagtgtctcactgaaaaaagaaagaaaccctgatttgcagcattggccaatttctgtagtgtaaatactcccaccatagcagatttcaggttaccaagggtttcacaactggttcacaagtcttgactgtaatgaccagctcatgcaactccagcatctcatcatctccgccctgtcccagaaaatccccacatcacacccaggctgaatatcactttcagcttctcagtcagaaggagaagtggttaactatgccaggatggtaatgactaaatatcagaatggtgagtgtggagggtcaggatgtctgccaaattggagatgactcttcacttctcaatcttggtgtctcatctggggaagctggagggagacatgcacagcttctcatgaacagtcctggaagcccttaccccaaggcctcatggggctctctccagggcttgctctttgtcactcctttaaaagcctgtcattcattgccagagaacagaagactccatcctaaggccaagttgaaaacggcaggcttgggagctgtctagactctgggtcctggcttttgtcttggctggtgtcaaaatggactctttaaaaactgtcctcaggaagattccccatccaactctgaacagcctggactgatctttttctgatttttaggggtcttgtgaacaagagtcaggtgggcgggcagctcttgtaaagctgaacataacca

SEQ ID NO: 323932 - DNA, 840 bp, Homo Sapiens
  misc_feature (67)..(162): n is a, c, g, or t
  misc_feature (226)..(237): n is a, c, g, or t
  misc_feature (355)..(418): n is a, c, g, or t
  misc_feature (493)..(493): n is a, c, g, or t
  misc_feature (496)..(628): n is a, c, g, or t
  misc_feature (659)..(724): n is a, c, g, or t
  misc_feature (800)..(800): n is a, c, g, or t
  misc_feature (807)..(807): n is a, c, g, or t
  misc_feature (823)..(823): n is a, c, g, or t
gttataacggggggcgccaaatagtggaacacactttttttctccccccccttgtttctaccccggnnnnnnnnnnnnnnnnnnnnnnnnnnnnnnnnnnnnnnnnnnnnnnnnnnnnnnnnnnnnnnnnnnnnnnnnnnnnnnnnnnnnnnnnnnnnnnnncccccatgtgggggaaaaaagctttttaaaaatttcccacccctctttggaaaaaagtgtcacnnnnnnnnnnnnaattttattttgagacttcccttgggagcccctgtgtataaataccccaaaagagcccccagaaaccccccctgggggttttttcaaacacccttcggtttcccccccgggtcttttnnnnnnnnnnnnnnnnnnnnnnnnnnnnnnnnnnnnnnnnnnnnnnnnnnnnnnnnnnnnnnnncggtgcccttccctctgggggccccgccccaaataaaaaggtttaaaaaaatttttcgggggcctggggcgcccnccnnnnnnnnnnnnnnnnnnnnnnnnnnnnnnnnnnnnnnnnnnnnnnnnnnnnnnnnnnnnnnnnnnnnnnnnnnnnnnnnnnnnnnnnnnnnnnnnnnnnnnnnnnnnnnnnnnnnnnnnnnnnnnnnnnnnnaaatgaactgatttatttttatggcaaccannnnnnnnnnnnnnnnnnnnnnnnnnnnnnnnnnnnnnnnnnnnnnnnnnnnnnnnnnnnnnnnnnaaatagaacagaaaataatcatcccatgtctccaacaagaatagacatctatcagtggtcgtgatttgctgttgcngcttggngtggaaatgctgagcngggtgtggacaggacgc

SEQ ID NO: 323933 - DNA, 551 bp, Homo Sapiens
ccagggggggttatgtaaaggagggcggcgtttctaaagaagatagaagtttatttctctctcacataacagtacaaaagtaagtggataacctagggtggagagacagctctgctccagggaacccagactagccagtcagttctgctgtcttcatcaattggcgtccatctctggatccaaggctgctgctttaattctgggaaatacagttgcacttgtgtagtcatgggctagcttaaacttcaggcaggactagaaattttatttcttttaaatgaagctgcttctgacagcttggtatatgccttttgagttactaaatacaattcaacagaaataagatggtgtctgctctctcagaaatctatttgtcaagttgaaaaaggtcctgtctcctcccattattcttcctcctcttctcaactcctatagggaagaaatatgttctcagataccggtctcccagtcccgcggcgccgggcggcggcgcgccgaaaggcatccactgaggaaacaagtgcctgcaacgttccggctgcgaactcccc

SEQ ID NO: 323934 - DNA, 1547 bp, Homo Sapiens
  misc_feature (42)..(91): n is a, c, g, or t
  misc_feature (136)..(158): n is a, c, g, or t
  misc_feature (277)..(277): n is a, c, g, or t
  misc_feature (441)..(441): n is a, c, g, or t
  misc_feature (451)..(451): n is a, c, g, or t
  misc_feature (827)..(827): n is a, c, g, or t
  misc_feature (844)..(1020): n is a, c, g, or t
  misc_feature (1034)..(1050): n is a, c, g, or t
  misc_feature (1132)..(1203): n is a, c, g, or t
  misc_feature (1327)..(1336): n is a, c, g, or t
  misc_feature (1389)..(1403): n is a, c, g, or t
gggctaccacccaccctctcagtcttgtgaagagtctgggannnnnnnnnnnnnnnnnnnnnnnnnnnnnnnnnnnnnnnnnnnnnnnnnnggcctctcatttccttacactctgacatgaatgaattattattannnnnnnnnnnnnnnnnnnnnnnacattttgtatagaaacaaattcatttaaacaaacttattattattattttttacaaaatatatatatggagatgctccctccccctgtgaaccccccagtgcccccgtgggtgtaagntctgtggggcccattcggccaaggctgggattctgtgtacctagtacacaggcatgactgggatcccgtgtaccggagtacacgacccaggtatgtaccaagtaggcacccttgggcgcacccactggggccaggggtctggggagtgttgggagcctcctccngcaccccacngtcgctcacttcactgcattccagattggacatgttcccttagccttgctggggaagggcccactgccaactccctctgccccagccctaccctttggccattcttcctttgggaactagggggctgctggtgggaaatgggacgccagggcagatgtatgcattcctttatgtccctgtaaatgtgggactacaagaagaggagctgcctgagtggtactttctcttcctggtaatcctctggcccagccttatggcagaatagaggtatttttaggctatttttgtaatatggcttctggtcaaaatccctgtgtagctgaattcccaagccctgcattgtacagccccccactcccctcaccacctaataaanggaatagttaacactcnnnnnnnnnnnnnnnnnnnnnnnnnnnnnnnnnnnnnnnnnnnnnnnnnnnnnnnnnnnnnnnnnnnnnnnnnnnnnnnnnnnnnnnnnnnnnnnnnnnnnnnnnnnnnnnnnnnnnnnnnnnnnnnnnnnnnnnnnnnnnnnnnnnnnnnnnnnnnnnnnnnnnnnnnnnnnnnnngccgggtggtgggnnnnnnnnnnnnnnnnnaaaacgtcttcccacccccctcttttggggcggggcgcccccccaagggaggaaaggacaaaggtggccaattgggttttcnnnnnnnnnnnnnnnnnnnnnnnnnnnnnnnnnnnnnnnnnnnnnnnnnnnnnnnnnnnnnnnnnnnnnnnnacaccaccagggcgtttaataaacaaccccccagaaggggggttcccccggggggcccctttttgggcccctctcacacaggcgggtttccccccgcggcactcataacccacaaaaacttttnnnnnnnnnntcgcggtcatatatttttcagaaacaaggggtgggagaaattttctctataannnnnnnnnnnnnnngccttggtgggcacacctccacaaaaagcgcgggccttgtggacaaccctatatgttcctccgccgcagacacatcccacacttttggtggcgcccgtgggtaataaaatattttttcccccgcggggaaaaacacgcgggggg

SEQ ID NO: 323935 - DNA, 692 bp, Homo Sapiens
atgcatagattctttattcagggagtgaaagaaaagtgacaattgcacaggtgttagaagcccatgcccaggtgacagacagacacagaaaacatcaacagcattttttgatggttcccagggacagagctgctggtccttcttccaaagctctgggaactggcactgctgaggacttcctttctcagtctccacctggacagtggcaatatggcagcctcagaaaggaaaccttttgctatcagggatcatcatgggcagatcactggctaagaggaaagaagctaactgtgtatccatggtaggctttgatgagaagatgcaggtgaagctgtggaacaaggtgagccaattatccttatcctttcatgctcctgatgaattctgaagctgttacttgctcttgggtggacactttggctggcagggtggggaaggtgtcacaggaggacatttttgctggcagtgctgaggtgggcagggctgtggacactttggtggtgggcagggctcagggcacttcgggggtggacatggctatgggcactttggcgtggggcacacaggaggtggctggcagggctgcttgcactgctgctgttgataagacatcctgctggagtctcagaatatgaaaaataaacagcccctttgaaaagtgaacaaaagacaagaacagacactttcccccg

SEQ ID NO: 323936 - DNA, 503 bp, Homo Sapiens
tctatttgcgaggatttaatttttaaactgaaaaaatatggtaatcagatcttcagtgccaaaaattatttttaaaaacgtaggcatatacagaggctgggagtagataaaggtgaaattaaagtcataagagtatgaacaagaagcagcacatcactatgaaaaagcaattcagcacacgacaccctttaggaattattcaatgaaagccaatttctggggaccaacatcccagtgaactgttcctatttgttctcccactgttgttacctcctatttctctgtccatacagagtaaaactctgagcctaagtaaattactagccattgcagtagtggaaaataacttaatattatacacaaaagcggatgggttaacaaagataatgtaagaaacaactaaaaaaaatgtgctggagtcctgtcactcatattttcagaactttcttcttcagctgctcaaaaatcctcgatggaattgaaggtgcttctagaatatgccc

SEQ ID NO: 323937 - DNA, 547 bp, Homo Sapiens
  misc_feature (14)..(14): n is a, c, g, or t
tagtatccatggtncccattaccaggcctattaacatccatacattgtcattagtctttgaagaaaaaatatgtaaatatatatgtgtaacatgagaatttctctctaaagcagggcttaaaattttttggaaaagtttgacaaagcataccacatgaattcagatttacctcaatgctaagaattatgtttagttaggaaaaaggaaagtcattttgacctcaggtagaaaaatagattgctttgagttttatgtagctttagactttaaaaagttagaatttaattctgtaacctaaaaattatttgaaaaaattatgcctctggtttaattattggtgattacacactctttctcttacccttgtgtattgaactatgtccataatcaagttgatgtggatcctgaaaagtgttatgaacatctgattggtatttgtcacatttattttaaaattagcatctgaacacttcaaagctgtcagtgtgtattggtttcaccaataaccactgcttgatccttacaattaaattttttaactaacta

SEQ ID NO: 323938 - DNA, 1200 bp, Homo Sapiens
  misc_feature (542)..(554): n is a, c, g, or t
  misc_feature (921)..(960): n is a, c, g, or t
cattgagctttctcagtcattgttgctgtcatttgaaatgactccctcaaaacctagttttattagccagctgcctctgctgtagtacatggccaacttcaacataccctggaccaaaacatttttgaggtgcatacccccaacataagttacacagtcccacatccaggtgcacagagtgcgagtgcactccgcgagtgcggggggaggggcggccccctctggtgctcccagcccttcctcctgcagagctgcaggcaagagcagagcaataggcttctcccctgagcagagaccgcagcacagaaatgcaaggtctaaagttgctttttgcctaagaatcagcgagcgatttggcctacttcctcattggcttctattctgatatcagggatgctttttgtagtggtattgtttgctccctcttcgcgttttgactacccgtcattcaggggtaactcatcactcttcacacggggatttaaattaagaaactaattggctcatgtgaacattccaaattttcttggtttcaatacccnnnnnnnnnnnnngaggggaaaagaggggagaaaaacaggagtgatgtcatttctttttcatgtattccaattaaagaaacaagggcaggtcgtataatggcatattaatacattagacttaatctagaacccctgtagctttttgatgtgttttatttcttatctctttgaattcctggttggttacttggcttccaatggaggtgaacttaacaaccatacttgaatattccgtcttgactttgtaaactgtggctacttgaaatgaagtttatctgggggttgatggatgaatggtagatttttgcaatgtctcaaggcaataggatgtgtattaaactgtagatattcttagtacagtaaatttatgctgataatnnnnnnnnnnnnnnnnnnnnnnnnnnnnnnnnnnnnnnnnccttccactttattggtttgcctcctgagctacccctccttaccctcccttctccctcagtgtttcagtaaatttaatttagggtgcctagaaattgcaagtatgtatcctttttgatttgtattttattataatttacacaaacaactgggtttgtgaactgtattactcctggtatctttaaaatattgtgggtgttttaataaattttatatttatttttttggcactcaagagaag

SEQ ID NO: 323939 - DNA, 198 bp, Homo Sapiens; identical to SEQ ID NO: 246297

SEQ ID NO: 323940 - DNA, 866 bp, Homo Sapiens
  misc_feature (292)..(292): n is a, c, g, or t
  misc_feature (303)..(304): n is a, c, g, or t
  misc_feature (309)..(309): n is a, c, g, or t
cggggtttttcagtggaagaacctgttgggtggaggctgacaatgaggtcttgggagatggggaacgggcccatggctgggaccatccgggctcttgcagaagagggagggctgagtctgttcttcggacaccttaatcccctttggtccagcctttctttgggtgattttttcttttctaagctccaggagttgcttctgctcttcagtttttgacagtgctgcttgtgaggggtgcaggtgaagtagcatccacttccttcttcttctttcttgatagggctggtccttntactttaactnnttctnttttaagagtttcagccaggtcttcaagcgttggtatatcttcgaaaatttttattagtttgcccaaaccagcatcacctcggaacttttcttccatcaagtcagcaatctgaattttgtcatactcttctctcatttttaaattaagttttaaatcgttgctcagtaaggacttaaccattctaaaatgataatcattgatgacctctaatccttttagtagaacaatgttcttgtatttttttcccatctttacagacataagtgagcctcactggaaattttttcaacagtagtccagatcttgagatcttcagaaatgcaggaatcaatgcttatttgtgtgaggggggagataaatcagtaaagttcccagaaacggaaccgcaggatgttgtaatctccagaaacgctaagaaaatgaagtatctgcaaagataacaaggaaaaaaggccttggttgagtcacttagttagctgactagtgctggcttgctcctattctgccggacgcgtgggtcgacgatatcccgaggattccggaccgaccagcctgc

SEQ ID NO: 323941 - DNA, 806 bp, Homo Sapiens
atttccaagccggggttataaaaaaacctttttccaaaggaaggaattcccttttcctgtaggcccccgttagccatgaaaacctcttcctggcttgccttcttggggttttcaaaccgggaagggcttctttgcttttcagtcccatagctggcaaacagcgcttctgaaaccccttctctgatagattcctgctgggccaccatctgtttctgttcaggcttaacatgaggagagacttttggtgcagcacgttgctttgcgacatcatttctgatggctgcagatgcagcaggactcatttcagcttgacttagtggctttggttttgttaccgatttgtattgcttatcaactttctccttctcctcctgaagacgttttgccaaaagcatataattcaacttctgaaaaatacgaatggtcttcatcactgcagacaccgccccagcattttgaatcatcaaggtagctacttgtattctgtttgcagtatgtagtttgcctgtggcaatattaaactcgtctgaaagaaagaacttaaacctatccagttcctcatcagtgatgttatccaggcctgttagcaagagtatctccttgtatttactctccatctgacaactttgggatcagcctcctgatccctggggcgatcagcaaaccgggtctgccaccttcttttcagagagcttaactagcagaggactcaggagagcatgcccaaataacctaggtgactttcaaagctacaaagactctgacacttctggacggcttcacatgtacccctaataaacactccc

SEQ ID NO: 323942 - DNA, 808 bp, Homo Sapiens
  misc_feature (674)..(713): n is a, c, g, or t
ggggtaattttaggtttattgtatatagatttgcattgggcaagaacggaatgttagaaatctgtaatactgtatgctgatggtaaacttactgtaaggatctcatttgggtatctggaaggtgatagttctgtttctttgttatatacacagcatgttacagagatgtgatttttctccccattaaacagaactaaaagacagtatatttatttaaacgcaaagctttttccccttttatgtctcctcataaactccagagacagtctggaaggccctcttaaatttgtcaaagagcagtaaagtgtctcacgctcagtttttctagcagatcgtaatactctcagttgaccctgctgggatttgaacctgcagtttctattaagtttggtgtgtgaagtccaacaccttatcaactaggctttccctctgacatcttgaagcctccgtgtatatcctttggactctgcagcaaagtgcatcagttgttagtttactctgagcatggtattcttagattgaaaagaagtctctgaagatgtcaaataaaatgtaaacattttctccagcagtgtgaagtctagtgagttaatgtttggcacaagcaggtaatttacatccattctatagggtagtagaaatgtgatctgggcaagtcacagtggctcatgctnnnnnnnnnnnnnnnnnnnnnnnnnnnnnnnnnnnnnnnncttgagctcaggggtttgataccagcctgggcaacatagcgagaccttgtctctactaaaaattaaaaaaattagctggatgtggtggcccaccc

SEQ ID NO: 323943 - DNA, 294 bp, Homo Sapiens
gccgacagggatatatatttttgggcttgttagtcccgggttagaaactgattttaataagtcacatgatacaaaagaatgagaacattcaaagaatgagtaaaatactgctttgtcccaaaggacaagcagaaaatgttaaggcacaacggatgctcagaaaacgtaagaagctgaagggaaaacacatcatctgtgtactcagacacacacactccaacccatcacacgaacacaccctcgcccgcccatcagagaagaattcgcctggaatcagctgggggcggtggctca

SEQ ID NO: 323944 - DNA, 848 bp, Homo Sapiens
cctgattaagaaacatttatttggataagaaagaaggcctgaggctaggggccggggctggctgcgtctcagtcctgggacgcagcagcccgcacaggttgagaggggcacttcctcttgcttaggttggtgaggatctggtcctggttgggccggtggagaaccacaaagctctctggaggaaggacggggcctctgttctcttctacctggcccatcagcagataactgactcctttcttcatgggggggcactgcttgcaaggcacgtaaaacttcagggaggcaccagtgggtggagaaggcaggtccagtcctccagttttataagcaccaataagactgacagtcacggcaaggccctcccctggctcccgaaccatggacttcactgtcgcagtcaccacaaggctgctggcacagaagttgctctgcaaggtgcctgtccggcggcactgctttgggcaggtgggtgcatcaggggctgaaggagattcctctgttttctccggaggttgggacttggggggcagcttgactttaggctcagttccccgtttggggcgcggcccttgcccttctttggcagtgccccgcggcagggtcttgtaggaggctgagaagccatcagcggtgacactgagatctgagacgaactggacgaggagttcattccttcggaggagatggagcccgggattcgtcgccgcagaacttccccagctccgggagtcgtcgctcacggctccgttgaacacgctgaccgagtcatagcggcagtaggtgtccggctccaggtcaaacttctcgaaggtcagcgcgatgacctggtccgggggcgcgatgat

SEQ ID NO: 323945 - DNA, 849 bp, Homo Sapiens
  misc_feature (68)..(114): n is a, c, g, or t
  misc_feature (302)..(302): n is a, c, g, or t
  misc_feature (571)..(571): n is a, c, g, or t
ccctccacaacggaggattcataagagcaggggccctgtttgttttgttcatgctatatccccagacnnnnnnnnnnnnnnnnnnnnnnnnnnnnnnnnnnnnnnnnnnnnnnngaatggtagtcttttggttcccaggtttattgacaattacttcatctactttttgactccccggagtcccagttccccaaactcgctctccctactccaggcttcacggtagtcccagaatgtaggaagtgggacaggatagactttaacatcaccccaggcctcctggtttccaaagcatttttttntctttaatgcagtaaaaccattcctttaaaacccaaaatctctcatggaacccctacgtatcaaatatataaagcaggagctgcccttgttcagggataatatgtggggcttatggctctaagaaacacagtttgacattcactgctctccttacttcagttacctcatggtatagataaatggctggccccagagaggggcccatgacctgtcctgggacacgcagccgactgaagcctttagtccagtgctccttcccacagcaccnacactggattctggagtctttcccagccagggcagaggaagctgcaacagtgcccacgataagagtttctgggtcttctggtacctaccctctcagactgctggtcctagggtcatgtgaggggctggctggagggtggactggaagtgcatgggggttgggtggggaagccaggtgtctgtgttggaaggccagtggggctgggggattgggggctggatggctgggaaggacttcccaggcctgcagtggtctctcctttcctcaggatgaggctg

SEQ ID NO: 323946 - DNA, 522 bp, Homo Sapiens
  misc_feature (102)..(104): n is a, c, g, or t
  misc_feature (124)..(236): n is a, c, g, or t
  misc_feature (340)..(340): n is a, c, g, or t
ggcttttttctgattttaaattttatttacagaaaagtcatacaaatatataaaaattatatttaatcactcatttaacaaatcacattcatgaaaaagaannntaaaaatacataaacttggnnnnnnnnnnnnnnnnnnnnnnnnnnnnnnnnnnnnnnnnnnnnnnnnnnnnnnnnnnnnnnnnnnnnnnnnnnnnnnnnnnnnnnnnnnnnnnnnnnnnnnnnnnnnnnnnntgatcaattatagaatttagcttggtaagtaatagaaagcctcgaccatggacaaggtactgtccaagggttgccatgtgcgtctcctcctcttcttcctcccntggcctccaccctctggaccactggcattgcaaagccggttgacatcggtcagaaattcacgtgccagtgagttactgtcggtgctcatgaccgagcagtctttcaccactgctgtgacatttacagtctatatcatttggactcataaactagatcgaacaaatattcttagaacaaagct

SEQ ID NO: 323947 - DNA, 527 bp, Homo Sapiens
  misc_feature (47)..(47): n is a, c, g, or t
  misc_feature (70)..(70): n is a, c, g, or t
  misc_feature (79)..(79): n is a, c, g, or t
  misc_feature (123)..(123): n is a, c, g, or t
  misc_feature (152)..(152): n is a, c, g, or t
  misc_feature (161)..(161): n is a, c, g, or t
  misc_feature (168)..(168): n is a, c, g, or t
  misc_feature (185)..(185): n is a, c, g, or t
  misc_feature (201)..(201): n is a, c, g, or t
  misc_feature (323)..(323): n is a, c, g, or t
  misc_feature (340)..(340): n is a, c, g, or t
  misc_feature (517)..(517): n is a, c, g, or t
aagtcatacaagtatataaaaattatatttaatcactcatttaacanatcacattcatgaaaaagaatanaaatacatnaacttggctgggtgcagtggctcacacctgtaatccccagcacnttgggagcccaacgggggtagactgcttnaggtccagnagtttanggatcagctggtcaacncgggtgaaaacccatntctactgatcaattagtagaatttagcttggtaagtaatagaaagcctcgaccattggacaaggtactgtccaagggttgccatgtgcgtctcctcctcttcttcctccctggcctccaccntctggaccactgcattnaaaagcccgggttgacatcgggtcagaaattcacgtgccagtgagttactgtcggtgctcatgaccgagcagtctttcaccactgctgtgacatttacagtctatatcatttggactcataaactagatgaaacaaatattcttagaacaaagcttcacctggtttagtggcagctnggtcgccagc

SEQ ID NO: 323948 - DNA, 911 bp, Homo Sapiens
gtcaaggattttgacggtgtgttgcctagcaagtcccgcttattttgagagtgggctttcaccaggttcaggtccaagagagggcctgtaagggaaattggaccaaacactttcctcgcggaatgaaggtggccaaaggcacggcggtgggtaaatcttatgtttgcgaaacctgcgggtttggggtgtcccggtggatatagattccacgttgaatggccctccaggaagctccccttttggggattaggttcagggagcgctcgggtttggccggcggggcggtttgtttataaggggggagatcccaaaccgcttaattccatgggccaggatttttctttagggaacacagcttatgggccaatgtgccgttggcctaatggggacgcgggcgccaaaaggaattgttttagaaaagcgttttggagggccgagggcgacgcgacatgtctattttttttgtccactgtaccatctcggaatagaacatctgttttaattggccagtaagggtacattgcaaatcattagtattttataaacagaaacattaagttataaatccatgttaaaaattgcaggtcagtgcagccccaacagctgtgtgtccaaaagtgtatttttacaacattttcctccagtatttttgtgacaagaaagttcctatctgccatctagatcaagagcctgaactacagtattttcaaacaagaaccgggagaagtcggtacaaggatacgtcgtgctgtgtatttaaacggcgcttcccacacgcctgccgtctgcatcccgggaggacgccctttgggaaaggcctcctcgggcagtgtgagggtctgggaggggtctgcctgggccccatttttaggatgctcccctccccaataaaacagcagcccccgcccccc

SEQ ID NO: 323949 - DNA, 1036 bp, Homo Sapiens
  misc_feature (15)..(15): n is a, c, g, or t
  misc_feature (27)..(27): n is a, c, g, or t
  misc_feature (38)..(38): n is a, c, g, or t
aaaaccttaaggtgncctgaatgaacnatggaataaanaatgtgactcctaaaaaaataccctaggtggtgtttaaggggaggttaatggcttgttcactccaggaaactagctttttaattaacaaagggcttatgatgattttattggctgccagaggaacacagtaaataactcccaagtgtcttgttggaaattaatcatgtggaaattatcacttctttggtgcaataatgccttccagttgggccttcagctgctgatttgttcgcttcaggaactgaatctcctcattgtgcttcttctcctccacctgccgcctctcgctctcccgcttctcagtggcttcacattttgccttctgctcgttcacttgcctctccaggtctctcttttccgtctccaattctgcgattttcctctccatgtctgacttcccctgctcagcctgcagtgccttcctcatgccaaacgccacgctgctctcgtacagggtctggtaggcagcgatggtcatgcggatctcgtcccggactcgcagcagcagcagccccctctccgcacagttgatggtgacctcccggatcaactcatcaaaacactgtgagtagagttccctgcggacagggcagatgcctgtttccctggcctgccgctgctgcagctttaagtctaactgctcctggaggtgcaccacgtccatcctggtgctaggggtgctggacacctgctggatccatagctgcgtgtcttccacccactcccttgggggtagtatggcattcaagatttcttctgcctgctttgtaggatctgggacacagggagttgaggggagcttggtcttgggtggctgtggggctgaacctgaaggtccaggctgctgggggctgactttcagtagccgagccttggggctccgtttctccgtgttccggctcaccagcactggggtgtcgtacttgagcaaagagtctgcgggcggaatcatggcggaggcgagagtagcaacccagcagctgccctgtccagtccc

SEQ ID NO: 323950 - DNA, 836 bp, Homo Sapiens
cttgggggagggaaattacccaaggcccttttagtctcatgtgcccccgggggttttccccttggggaaaaccagctcttaggcgcccatggtttcccgctttccctttagcggggggctccggggtcggccaaaagcggaattggttttaggaaagggctttctctcaggggggcccgagggccgggcccgaaccacaggaataccgtctccctaccgttccggggccgccggggcgcggggttggaatttaaatttcccttcttagaagccttttcaagttttgcaaggcccggtccacggttccttctttttttcctggcccaattaaacccccacctccccatggtgtcagggcggctttttggtaagcgcccctgtttctgttcttcttggttattttctgattcaacctgagtgctggcgcacccctgtaactccattcctctcaggctcgccactttggcctctgaatcatgggcatcttcatccacgtcttcctcatcatccacgtcttcctcatcctccccgtcaccgtcgtcctcgtcaaactggaagctctggtggccaaggggagacaacagcgacctggtggaattgctgcagctcagcggcagcggcggcgacggcgagcgcaccacctccagcccctgcccacgtgcgcccgtcatagggactgagcaggagtccgaggagggccgagacctgggtctgcagtcagcagagaaaccggcgtaggaagagggaaaagtaggcccccagcgccccgccgcccacatctggcccgccaagttcaaactggcggagccgcggcggggacgcgctttcccagcccc

SEQ ID NO: 323951 - DNA, 1479 bp, Homo Sapiens
  misc_feature (38)..(38): n is a, c, g, or t
  misc_feature (42)..(42): n is a, c, g, or t
  misc_feature (136)..(136): n is a, c, g, or t
  misc_feature (434)..(442): n is a, c, g, or t
  misc_feature (587)..(646): n is a, c, g, or t
  misc_feature (817)..(902): n is a, c, g, or t
  misc_feature (941)..(958): n is a, c, g, or t
  misc_feature (1003)..(1003): n is a, c, g, or t
  misc_feature (1012)..(1020): n is a, c, g, or t
  misc_feature (1175)..(1197): n is a, c, g, or t
  misc_feature (1219)..(1219): n is a, c, g, or t
  misc_feature (1277)..(1277): n is a, c, g, or t
ttggacttatcgtacaatgacattcgatttatcccccntganattggagttctacaaagtttacagtatttttccatcacatgtaacaaagtggaaagccttccagatgaactctacttctgcaagaaacttaaanctctgaagattggaaaaaacagcctatctgtactttcaccgaaaattggaaatttgctatttctttcctacttagatgtaaaaggtaatcactttgaaatcctccctcctgaactgggtgactgtcgggctctgaagcgagctggtttagttgtagaagatgctctgtttgaaactctgccttctgacgtccgggagcaaatgaaaacagaataacttatttttcgttaaagtttgactgaaacacgcttctaccaaatacagtataaataattaggtagtcttaatgcctttcctannnnnnnnnccttttcacacaaaatgtacacaaagatcgcgtaaggagtatgtatttttaataaaaatttaattgtattttttcaatattacccaaaaaacaacaacgaccactacaagcccgcaaacgtgtcgtgccctcctccactgtcgtnnnnnnnnnnnnnnnnnnnnnnnnnnnnnnnnnnnnnnnnnnnnnnnnnnnnnnnnnnnntctccacggctaccccgttttcactccccttcatatcccttctctgattcacaccacgtctatttcccccccttttttcttacacgccttctagcccacgtctgggatcttttaaaccatccctccccaccccaatcgggcacccatttttcacttcctctgccttacttnnnnnnnnnnnnnnnnnnnnnnnnnnnnnnnnnnnnnnnnnnnnnnnnnnnnnnnnnnnnnnnnnnnnnnnnnnnnnnnnnnnnnntctatttcttatttcccttatacgccccgccattctctnnnnnnnnnnnnnnnnnngccctattatttaccgccgcttatatatattgccgctcgcccgtnttcacaccnnnnnnnnnatcagcgcccccctcgctctcgcgcttcaccttttccactacaacacctcccctgtcggcggtgcgcgccacgccgcctctctatcccctatatctctccgcaccccctgtctgtgccgcttgtataccgatcctgctatattataatccctcgnnnnnnnnnnnnnnnnnnnnnnnagtccacggagcataatatcgnatatcaacaccccccgccccacccggtttagtgagactaactgacaatatcccacctntccctccacttatccgccaccccctttatttctccccgtttctagcctatacaaaatacaaatacacctgcccgcgaatatgtgccccccaccattcgcctccctctttttaccgctcaccgctctctacccccacattaaatatgtccgcgcgcacgcccccgtttgttttattctccacgccccctgatcctatttattc

SEQ ID NO: 323952 - DNA, 506 bp, Homo Sapiens
  misc_feature (491)..(491): n is a, c, g, or t
aacatatttttgaacaatcatagacatgtcctatttttagcaggagctcaaagaaaatgtttgataaggtacagatttattatattttagtccaacccctatatttagcaaatacaaaaccacagtcatgtttacaatgtaaaaactgtagaatagctctgtatactaaaatattattaataatgcagtttttgagaaccaaaatatcagctggctgactttgcttttatgatgtatattaacatcttttagcatgacaataccactaagagaagttcaccattctttcagtatcttttgatttccaggtatggcattactaggttgggcaaatttattttaatgggcagtatgggtaaggaattcaggtccaaaaggggcaaaggattccattttggatggaacctatttggatccataccaacatggcggcggggcaaattttccaattccataaacctattttttaatccccccggtggggggttacntttatgggtggggca

SEQ ID NO: 323953 - DNA, 602 bp, Homo Sapiens
  misc_feature (245)..(254): n is a, c, g, or t
  misc_feature (554)..(554): n is a, c, g, or t
  misc_feature (579)..(579): n is a, c, g, or t
atcattccactttgcctttattttttataatatatttaagtagaacatatttaatatgtaaaaaactgttatctattagttataaagtataatgtattaatagcatatagtaaacacttgtaagcctaccaggaggaaccagaacagctgcataacttggcatctacctatgtgctcctgtcccttccacttcctccttctgtgggtaattactatgctcaattttggtttatcagttaccttcnnnnnnnnnnaatagcatagttttattgtatacgtatgcttagactacatattctttggttttgcttgtttttgggctcaataaaaatagtacgccccatgtggtctcttcaaacttgcttttttccttaatattttctgagattcattcttattgtgaggtatagctgtagttcactcatttccactactgaataatatcccgtaggaatgaatatatatatctaattattcacctattttcctgtaggacaggacatacatttcactttttccaggttattaactattataaatatggtaactatggnaccattcttacacattccccctggnggggccacatggcagggggttgc

SEQ ID NO: 323954 - DNA, 589 bp, Homo Sapiens
ttttgcagaataagagaaggatgttttatagtcctctgtttcagtgccttccccatgcccatggagctgtcccaaaacccatccctcagtatttgttgatgccaaagacacgaaccccatggaactggggcaacttcggcagcagtacacttagcaatgaggctgtgttgatgaggaagtgcgcagcatcatacttggtatagaagctggccaggagatagagcacaataggagagatgctgaggaacttgcgggaagaggtaaactggagcccatagtccatttgctcccagtgtgtcagtagccgagcctttccttggtcaggagtctcaaagggtgtccctttcaccgtatgaaggaagacatacgtagccaggttatggatgacgttggtcagggtccagacaacaggaatgctgaagaaggggatgctgagtagaaccatatgcagcaatcctaccaagatgatgtaggccagccagatgcctcggctattcatcactcgggtgttggggtttacttcgctgtgtgccacccccacattcatcctgccagctcagatccccgtccggctattgggcgcggcccc

SEQ ID NO: 323955 - DNA, 788 bp, Homo Sapiens
tttaccggtggagctgtttaagccaaggagttgtggagatctctgtgatgatccaaaatctgactaatataaaatcaactctgatgctaattaaatctgacttataacttgtctgctaaaagaaattataacaggaaactttggtgactggtaaggaatgttgaaaagggaaaatcagaaggaaaaacctggttcataagaaggaaggaaatattggtccaagcacgtcaagggctctaagtaaaaaccgatggcactacaattccacataatccattacatttggaaaaagaagctcctggtagacacagggcctctttgggatattgttctttgttctgattctgtgctcaccaggaaacaaatttcatctccgtagggggcccgtccttcagtaggaatggccctgctcctaggttcttggctcacttgccaagactacaatagcactcgcgtttatcagttatgcttgtgtgaagctggttattgcaattcattgttctcaaaatactttcatgaaaagcctgacctgagaaaaagccttctctgtaatcatattaattagaacataaatgtctactttgccataattatacaaagagcccaaatgggcaattaactccagttggttgcttctctctgagccttacttgccagctcttattaccgcattccagagagagtcaacctggatggagtttgtcccctaaataaatgtagcgacaaagaaaagggtgctccaaatcagtttcatcagaatgataaggtacagtactgcagccatgtcc

SEQ ID NO: 323956 - DNA, 864 bp, Homo Sapiens
  misc_feature (72)..(72): n is a, c, g, or t
  misc_feature (185)..(197): n is a, c, g, or t
  misc_feature (226)..(226): n is a, c, g, or t
  misc_feature (256)..(316): n is a, c, g, or t
tcgcgccgccggggggtgtgttattcttgggggcggaggagaaaacacaacccaactcttttgttgtgggcncgcggatgtctctttgtggggaagaaaaattatttacccatttgtttttgttttgtggtagggggggccgccccctcccaaacaaaaaaaattttagaaaagatttttttgannnnnnnnnnnnncgccgaaaaaaatagcaaagtataggtcnagtgaaatccgcgcgacccaggagagggcnnnnnnnnnnnnnnnnnnnnnnnnnnnnnnnnnnnnnnnnnnnnnnnnnnnnnnnnnnnnncaaggtggggaggaagggcggaagaaaagatgatatggggggtttgttttttacacttaatattttatttaacatgttatccaaccacttctaaaacagcctccatggcacggtatggaatagagcagtgattctggcacaggaaatggtctccaaaatctcaaaatatcagatctctaccttgtcaagtcatctattaagttcaatgttcaagattatcaagcatacagccccactcttctactgtaagcaatggatgggctagagagatgtcaaatcaacatgggtactgccatgcccttaggatagcatctgtcctcaaagctgaaagcagccattgcccctctttgctgtcttccaaaaactccccagacaggccaatggctgattgtggacaaattcaccagaatctggttccgtagctacagtagaaggctaagtatctggtttctgatctcaatggttcagaatcctgagcctgaggtgactctcccagagccttgctcacagcaacaatctcactacctcttgacaacgttccgtggccc

SEQ ID NO: 323957 - DNA, 884 bp, Homo Sapiens
tccgcggtaagggcccccgcgagacctcccttcggggtatgtttgaaagaccgctcgggttcggccatcgggccgttttgtttattgggggagaattccaaaggccgttgtccattggcccagggtttttccagaggaaacaaggcttggggcccaggtttccacttacccctatgggggcgcgcctggcccaaaaataatgggtttagaaaaaggtttttcagaggtaccaaaggcggccccgacaaggtaacgtttcgtataaagtggtcctggttttagccatcaagttaaaaggatttttattggatttcattaaagagggaaactggttgaaggcatttcccgccaggttcaaggaagaaattttgtaaatgttatatttatggatcagaaattactgaaaatgaatgtgcaaatggaggcaaaaactggcctcttccacagtggggaagaaagtcaacagaacctccattaggcataattttacatatgtacagactcaatcagcttttaatatagaaagatatttgaacccaaaatctttcattaaggtaaaaaatacaataataatttttaatgaaatcctggaaaattcatacaaataaaattaaaagcctccaatggggtataatccagcaatatcctaggcaaatgcctcctgaagaacaacagcttttttaaaacatcactgtttatcattcaaaattcagacgtctcctatctttggctatttttatctcttcaaactttactcctaaaattgcactaggaaagcgttccttattggaatcataatgggagcaaagctgaaaatgtttctttagaaacatctaaggaaattacttagacccagatacttataagtgactataacaagcccc

SEQ ID NO: 323958 - DNA, 519 bp, Homo Sapiens
  misc_feature (28)..(28): n is a, c, g, or t
acagggttttttgggttttgttttggtnggggggattatcaacagacaaaaaaagtttattgaatacaaaactcaaaggcatcaacagtcctgggcccaagagatccatggcaggaagtcaagagttctgcttcagggtcggtctgggcagccctggaagaagtcattgcacatgacagtgatgagtgccaggaaaacagcatactcctggaagtccacctgctggtcactgttctcatccaggctgcccatcagcttcttcagcccctcctcatccactttctcccccacaaagctgggcagctccttgtgcagaagttccttcatttcccccttactcagcttgaacttgtcgccctcttggcaggagtacttgtggaaggtagtgaccagcacagccagcgcctgctccagagaactgcacatcatggatctgtggcagaccaggtggcagagacagacccaggaaggagagcaaggcagccaggctcccagggtgaggatttatatgtgggcccc

SEQ ID NO: 323959 - DNA, 453 bp, Homo Sapiens
  misc_feature (430)..(430): n is a, c, g, or t
ttttttttattctgcagattaaagacactcaatctttaaccttgaagggcaggcaaaaggtcggctatgctgtcaacatagaagtcagggaccattttcttcttagacacgcagtcactttcctgattattcttcacatcccctagagtggagactccggtgagggtcaggatggtcttcaggccacaggtggcgcctaggaggatgtctgtgtccaggcggtctcccaccatgacggtgcgctcggggttgatgccgtattcctgggacacgcagtcgaaaatgaagcggctgggcttcccgatgatgtcggcctggcgctgggcggccatctccacggctcggaccagacacccggtacccgcgatgaagcggccgttctcaagcggaagccggttgtccatgtttggtgcccacgaagcaaggcaanccgggctcttgcaaggtaacgca

SEQ ID NO: 323960 - DNA, 1324 bp, Homo Sapiens; identical to SEQ ID NO: 246299
  misc_feature (250)..(260): n is a, c, g, or t
  misc_feature (426)..(472): n is a, c, g, or t
  misc_feature (510)..(523): n is a, c, g, or t
  misc_feature (569)..(585): n is a, c, g, or t
  misc_feature (592)..(597): n is a, c, g, or t
  misc_feature (601)..(740): n is a, c, g, or t
  misc_feature (784)..(792): n is a, c, g, or t

SEQ ID NO: 323961 - DNA, 676 bp, Homo Sapiens
  misc_feature (386)..(401): n is a, c, g, or t
  misc_feature (407)..(524): n is a, c, g, or t
  misc_feature (527)..(527): n is a, c, g, or t
  misc_feature (538)..(553): n is a, c, g, or t
gggactaaactcatgcttattgctaaatgtggtctttgccaactaaatttaagatgcagcattttagaaatttacatatcaatgtttctacagtattgtttgctaatttttaaataaagtcatgatcagtgtgcatttgtgattatatgtgtactcattctcttacctagcgaacaagatcttttcagagtggtgtttctaaaagagcatgtacaaaagtggcctgtggacatttaggcctgggtgatgcatttgctcttcctgtttgtgccaatgtatcaatgtagagttgctctgttttcttcaactgtatttattgctgcatttctcagcataaacttatcccattgtattttttataaataaatattttttttgaactttcnnnnnnnnnnnnnnnncaacannnnnnnnnnnnnnnnnnnnnnnnnnnnnnnnnnnnnnnnnnnnnnnnnnnnnnnnnnnnnnnnnnnnnnnnnnnnnnnnnnnnnnnnnnnnnnnnnnnnnnnnnnnnnnnnnnnnnnacnctttcaaacgnnnnnnnnnnnnnnnnaaaaaacctttttaaaaactccctttttcgccgcggcggcccccaagccaaaagcccaccgccccaatgacctctccaaaaacaaaactcgggccacaccccccgcggctgggtttcctcccc

SEQ ID NO: 323962 - DNA, 543 bp, Homo Sapiens
aatatttgaaatgttttatttaatgctgaaaattttaccctaagggacagtaggatgtgtaaaaagaaaggaaaaggcacagtaattaagtcatccttagaaatgatgaggttctctttctttcaaataacttcactttaatgtaacttcaagcccaaacattctgggaggtaaacagtctcttggtacctacggggcccgagaggcaagtcaacctccttgaagaacggagcgctggagtctgagcacgccaaagactctctttaaagcagggtcttggaccagagaaccctgagcagctggaagacaaaagacttcctcaagtttcatgagggaggtaccgtggacatccttgaaagaggaccccagagaaaaacttgtaggcagggctgggaagaagccatttctgagtctgattcaagacagtgacagagagcagctcgaggctcagggcaccacccgggctccctcgtgctccaccagaaccaccgccagccaactggtcagacggctcttgcctggctagtctgaggcctcagctgg

SEQ ID NO: 323963 - DNA, 1013 bp, Homo Sapiens
  misc_feature (72)..(72): n is a, c, g, or t
  misc_feature (119)..(119): n is a, c, g, or t
  misc_feature (339)..(473): n is a, c, g, or t
ccaatagtgagaaattgtgttttggggagaaaggctttttttcgaatgggtccgtaagagggggggcccganccagaggaatgagtgggtggttgtgccctctatttactattgttganctaagggacccaagggttcgttggtctctgggtgggcccccacggttgcgggggtgccaaggggattgccaaaatttcccaggttgcagctggccaggctttggaaagtgggggctccaagggggattccttgcccccactttcaacttttcctggaagccatcctggggaaccccccggatgttgttgccctcttcgggcctgggtagatttttgaaannnnnnnnnnnnnnnnnnnnnnnnnnnnnnnnnnnnnnnnnnnnnnnnnnnnnnnnnnnnnnnnnnnnnnnnnnnnnnnnnnnnnnnnnnnnnnnnnnnnnnnnnnnnnnnnnnnnnnnnnnnnnnnnnnnnnnntgaagctagaggctgttttcaatatgtcattattctcatttggttaggataagattgaagggaggggtagaaagtttcaaaggcggagagtttcaaaggcatcatgttaacaggcagcaacacgatcaagccccacacgaaggaaccaccaagactggagtgtgcattctcattgtaggaagtcttctgctaacttgttgaattcatctgcaaaacgcaaatgcaggttgtgtttgccttctggcatcaaatgcagccgtgagcctttcacgtgcttatgaatgaagtcggcatgaaaccgtgggaccagaggatccttctcaccgtgcacaatcaaggcggggcactggacccggggcagcaggtgccggcagatgttaccatctgggagatgtttaaactgtcttatgccatccacccacttttcacaggttctggcaagtagtcatacccatagagggcttctagaggctttcttgttctctcactccatttgcgaacgcgtgggtcgacgatatcccgaaattccggaccggtacc

SEQ ID NO: 323964 - DNA, 1026 bp, Homo Sapiens
  misc_feature (446)..(446): n is a, c, g, or t
aattgtaaagtattggcaccaaattaaaaatccccggtatataatgaaaatcctggtgaaaaatgttcagatgcctaaatattttggattaaggaaaggtaaaaccaaggatttggttcaggtacaaaacaaaggcatccttatcagtcactagcagtacttttttgcaaaatcaacagctttttatttatcagtgacattatctccccctccaaaaaccctccccaaatatcaaacaattatataccaaaataattttaatttcaaataaaaggattttcaataaatatataagcatttccatcctccatatacaaaatttcttaaaaccattcaaaacggaggctagatagaaattttcataactgtgcttaccaaccccacaactggcccttaaaggtggtgccttttcaggcaatgtcaactggccagttctgttggtgagnccccctacccccaccccacccatcccagtactgttgaatgctcatgttaatgatttgccaggtgtgtgcataaagttgtaaaatggggacacttctggaacaccaacaacaaactcaacaatatggatgatcatggcattgatttgaaaggcagcatttccaaattgatattttccagagaggaacatagcaggtagaaaattccaatggttaaaagctgaaaagaagtcccacatggaagcagtaagaggtcaaaactgagtatcactagagtttctgggtgggagcttttttatttttaagaatggcaagttatgtttagctgagtaacagtggcaaggagaggtcaatgctgacattcctgaaagtcaacttctttacatgatgactacttaggctgctattttaggatacttaaagatctctaagacttggattagacttaacttgaataccttattctgtgaccaaattacatgaaaagaagatacatagttattatttccattcccttttctggagacagcaagttctttctaattaaccatagggttcatgtgaataggagctttgtaagacc

SEQ ID NO: 323965 - DNA, 627 bp, Homo Sapiens
  misc_feature (47)..(63): n is a, c, g, or t
  misc_feature (66)..(66): n is a, c, g, or t
  misc_feature (69)..(99): n is a, c, g, or t
  misc_feature (103)..(119): n is a, c, g, or t
  misc_feature (126)..(126): n is a, c, g, or t
  misc_feature (128)..(252): n is a, c, g, or t
ctttgggggcccccgcgccccaaaaaaaggtttttaaaaattttttnnnnnnnnnnnnnnnnnccncannnnnnnnnnnnnnnnnnnnnnnnnnnnnnnaaannnnnnnnnnnnnnnnnttttttntnnnnnnnnnnnnnnnnnnnnnnnnnnnnnnnnnnnnnnnnnnnnnnnnnnnnnnnnnnnnnnnnnnnnnnnnnnnnnnnnnnnnnnnnnnnnnnnnnnnnnnnnnnnnnnnnnnnnnnnnnnnnngagatgtatgattcctttatttttgacctcaacttactgagcaatgccgtagctatggaatagaagcatttgttgcactctttttgtgagccaggccctgtaggagggattgtggatggcaaaacctcaggttctgcccaaatcctccccttgggggctggagggtctctagttaattggcattccggtgcttaaggccacttttgggtagaggtttggcaaggatggagtgtccagacctatgatcctctaagaactttactttttaaaaacagccacccaaatggtggtggcgtggggagcaggtggtggtgaagggactggggtgtctggccatggccacgtacagaggagactctgtgagccctctccccc

SEQ ID NO: 323966 - DNA, 807 bp, Homo Sapiens
  misc_feature (103)..(103): n is a, c, g, or t
  misc_feature (106)..(106): n is a, c, g, or t
  misc_feature (141)..(141): n is a, c, g, or t
  misc_feature (153)..(153): n is a, c, g, or t
  misc_feature (159)..(159): n is a, c, g, or t
  misc_feature (163)..(163): n is a, c, g, or t
  misc_feature (165)..(165): n is a, c, g, or t
  misc_feature (168)..(168): n is a, c, g, or t
  misc_feature (170)..(170): n is a, c, g, or t
  misc_feature (174)..(175): n is a, c, g, or t
  misc_feature (323)..(323): n is a, c, g, or t
aaacagtctatgccccagtttccattaccctaatggggcccccgccccaaaaggaaatgtttagaaaagttttttaaggggccgaggcgggcccgacatgtcnggnctccggggcctttcggcatttccccctgttgattngtttggtgtggnttggtntttntngtntntttnnttatagttggattattttttattctaatgttacttgaataagaacaaaattaaaataaacacacaaaaaaatgcctctgtgaatcagtcacagggttcctgtaagtctgggctggtgtcctttctcttctgctgcttgcatagctctntgatgttctctatctctgcaggactaaacttggaggttagcatcacattgtcataatcaaattcttcatcaagtgaaaaaagttgaacttcatctccaagtatctcttccgtctgtttgtccattcttttaacactgggctttggcttcacttcacaggtaggaggctgggccacaaaagggatacaggaaggaatgctggtgcttacatcctgctccacttctcctggaagcagcagcaaatcttgtgaaagatgagtaaaagtgttcagaaattcttcatcatatgtttgctcatgacaattaaggaatttatccaagacgtctttgattaattgatcttcatccattatttccaatcctgacatatgggcagacattcctattcatgaggccacagtatcttcggctagtctttattcacagacacattccaggagtcccctctcccagagcaacaaagacagatttccaaagctacaccc

SEQ ID NO: 323967 - DNA, 861 bp, Homo Sapiens
attcaagagttactcacaggcagcactttaaaattaggctttttaaattaaaggccaaaactaaaaaagtttgcaaatatgacattactaaaagaatgatagccttaataatttaaactttaaaaatttccgtccctgtggagttaagggtctttatacccagaatgtgtaagttcgatatcatttaaaataaacaactgaaaaacccacagatggtgggtaaatttgtcaatgaagataaacatcagtttcagccttttagagtatgaaaaccggcaattaattaatcctgtgacagaatataaacggtacttcagaattttgactttaaagtctctttctccagcagcaaatcagcatatctatgttgaagttccttttctctttcttgttgtcgctgaacgtcttcttttagacactctagcctccggggaatagcagaatcttcatgtttcttgagttcttcaaaagtgcgtaactccaagtgagcctgttcaatttggtcccataagtcattcaactgtttcatgagccccatagcacgagactggtaacccccaagcaaaattttcatcttcttttccatctttgcagccctcttggcttctgtcgtcatgtgacccctgtttatctcgagcctcttttcaagtgattcaattctgtcctttttactagccagattggcccgtgtgtagcggctctgcccaggaagatataaaacttgactgtagcattcttcccacacctggttataagcttcacttgagagctctccatggctcattccttgtttaaccacttccatctcctgcaccaaaacatcctgggcctttttcagctcttctttggagaacttttccc

SEQ ID NO: 323968 - DNA, 732 bp, Homo Sapiens
gtattcaacttggatcccatattgtcatccaatagatggccaaactcttcagcagatacagataggctggaatcagtgtaagtttcttttcttttttgcttggcccttgaaatggagccagcaaagtcgaaatcatctgtaccttttctcttgcttttcttagtactgactttggagtggacttcaagttctggtacactgctcactttcatcatctaacacatccatgaatgttcctccatcttcatcaacttcagcaaattcttcatcatccatacttcctaaagaaacttcatcgtcatccaggttaccaagttcatcatcactaccttctgaatcttcatctaatgtgttatccttagctccttttgttctctgttttcacgtttccagcaaaatccatatcatcctttccagagctgaaacagttatcatcttcaaatgtgtcaatcagctcttcaaattcttcatcatccacgtcttctatactttcttcatctgcatcccgtttttgtttctctttaacagcaacttttttataatacctgtggaaaaacacttcatccactggtatttggctttcttcttttgcaaggaactccttactgttcacaggaagatgacgaatatccttaataaaatgttttcttttcggctgcatcacaacactatctgtgttttctttgcctttatggggctttggatttcggtatacaaatcgatccaaaaatc

SEQ ID NO: 323969 - DNA, 973 bp, Homo Sapiens
  misc_feature (241)..(241): n is a, c, g, or t
cgacaacgccgataacatacaacgcgtcgcacagagaacactttgagaccacagtcgcgcggaaggcggacgggatataagctgtgacgtaatacagcgctgcgtagtcccgaggttaacgtgatagtaagaggtgcgggtgggaggtggaaaagcaatatgggctgataaagagtcggcatgtgcgtgtggaaatataatgaggagggggaagtaccgagtacaaactagccataggtgncaggcaagatacgaatcccaaacgccagggcaaaggagtaccggggaggcgtctaaggcgcgaagggaaaggggaggcagaatggcgcacaaaaaatcggccgtgaaccggatgatgtctctcggatctctcttaggtgagcacggccgtggcgtatggatctcagacgggggccaggtttcaagagtaactagctagaggaacagaggtattccacatgggaagagcatcgtcatgaccgatggttcatcttttcctacattggaactagggcacccgcacaggaaaagtttctggaaaagagtactgcgtgcggtccgttggcagcccaaacaagagggtaaaaagaacacaactctatcactttctattggcccaaaagaaggaaggatttttaaatacaaaggagggtgcggcataagcctggggaaagcacttaaattaaggaggattaagagtgtcaggaaccaggcagctgggggtacagggaccctgcggagtgggatgatgcagacagaattccgagcctctttgattctccaccatcggccaagcctgtgctcctgccctaccccagccaccagggaagtccccagagctggagaacttgaggcttttgataaaacccaccagggggatgtcacagagaaggtcaagctgccggaagcctttccccacactgccaaagccgcacacaggagctgtgggagcctgtggccacaaggtctgtcc

SEQ ID NO: 323970 - DNA, 636 bp, Homo Sapiens
gcatctgcaaagttggcatcgtagctttatttgtgcgctgtgagggtgaaggcaatctatcatcaacttttctttccctgatatgctccagaataaagaggggtgggtggaacagccgtgaacagggccaggtgtgggctgtgtggtctggcagtagtccttagggctatgggccatgtgtgcacatcctgtttcagaagaggggggccagaggaaaaggggccagcaggaccgggcaactgttaagctgaaaggctgcaagtctgatgggacacagacttgggcagaaggagagatgaagtcaggacaggacaggacagggcagggctgcggcttcacagacttagggaggcagagctgccggggagaagttgggatccattcttcaggcaagcttgtgctttgctctcctcaaagtgggctcctctgcttaatgagcgcttaatctctccccaggaaagcaggagaagagaaaacccaaaatgagaaggaaaagttctgggctggactgtcggaacctggttgtctgaaatagtccacaaagaacatgatttctcagttatctggcattgcttgttgcagtcccgctcccacgaccttagtgtcctggaaggcttaagggcctgctggtatccc

SEQ ID NO: 323971 - DNA, 648 bp, Homo Sapiens
  misc_feature (89)..(107): n is a, c, g, or t
  misc_feature (115)..(128): n is a, c, g, or t
  misc_feature (140)..(140): n is a, c, g, or t
  misc_feature (142)..(142): n is a, c, g, or t
  misc_feature (148)..(149): n is a, c, g, or t
  misc_feature (151)..(275): n is a, c, g, or t
  misc_feature (576)..(576): n is a, c, g, or t
  misc_feature (614)..(614): n is a, c, g, or t
gggggggatccaacccctttgttttggccggggtttttttgggaaaaacgtttggccctttttcctttcctttggggcccccccgcccnnnnnnnnnnnnnnnnnnntttttgtnnnnnnnnnnnnnnccccaaattttntntttttnntnnnnnnnnnnnnnnnnnnnnnnnnnnnnnnnnnnnnnnnnnnnnnnnnnnnnnnnnnnnnnnnnnnnnnnnnnnnnnnnnnnnnnnnnnnnnnnnnnnnnnnnnnnnnnnnnnnnnnnnnnnnnntaagagtcagtatttattctgattaatattttacaaaattttgacatttaatttatgtaaggagggctaatttattaaacactttacaggtttttctttccacagaataacacggtaagtagcaaaataatacttggcacagttataaataaagaaaatataaaataaaaacatccatagcttaagtacaatgatgctgttttacgcccattaatatcaaataaattcctgggaaacaacaaaaatatgattgaaaaaaactccaaggaagtaattcatgttcagtgctgagaattaagtncctatttgctaaaagtatccaattaagttgataagganctattcccaaaggttcaccatcatacacaacttt

SEQ ID NO: 323972 - DNA, 1312 bp, Homo Sapiens
  misc_feature (141)..(141): n is a, c, g, or t
  misc_feature (427)..(458): n is a, c, g, or t
  misc_feature (1280)..(1280): n is a, c, g, or t
  misc_feature (1291)..(1291): n is a, c, g, or t
aatgacactaatagctttatttaacaaacactgagtgactactatgtgcaaagcctattgctaggtgcatgaaagatacaaagatgaaaaaagacacagtccctgcccacaaggagcgtataatctagtgagggagacaantacacaaataactagattacaaggcagtaaacaagagtgggcaagtgctgagtgtggcctgagtgtgatactaactagcctcaaggttccaatttgaaacacgatgaaatagtgttgtctgcttcgaaaatcccatcccaagtttgggcataatggaagttaaatggccctacccaaacaggtggaaataacagagtaggccaggtggaggcgctgtttgaaagtactatcacccctacatacatggtgctgatataagtacgtaggtccagctaaaaaagaactnnnnnnnnnnnnnnnnnnnnnnnnnnnnnnnncatcggtcctttgggttatgggctatagctactgttttaaaccaatatacttttatataaaaagggaatttgtataatcccagaaaaaatcaattaagggattaatattaattcaagaaagaatcctgccataggcaattttatttactaattgattaagtcttttctctaaatatctataaagctctgtagcaattaaacagttagacatctaagtattgctgagtagaaacctcttatgttcagccttctgaaataaatggtcacatacctgatatatagcactattctaacagcaacaagaaggccttaaagagattttaagaaaaataatttttaatgcttcaatgcaaatggagtacacgctgattaaatacaactcaatgttctttgaaaacatctcaatgacagcgtttgataccagttaaggccagcaaaattgtactgaggaaaatattattacatgtactgtctttcattggtttcatgtatcattgcttatgactatggcaaccaaatcttttctttgacaactgcatttatgggaactgatgagctttgatttatgagctttgatttgcttttagttcataggccaataacaagtgctgaccacctcctcttgggtaggtgctggtctgaaataactgggcaaagtaggaaggcacatttcccggggctccttttcccacttcctgaattgggaggggttcaccaccttaggcccgtttcctttcgtgtgtcactgtggtcctgggtcctctgctgctttctctcaaggaaacgagcccgtgcatcagatatggatttgtcatcatttcntctttgcattntctttaagacgtctttcgata

SEQ ID NO: 323973 - DNA, 434 bp, Homo Sapiens
  misc_feature (188)..(188): n is a, c, g, or t
  misc_feature (333)..(333): n is a, c, g, or t
  misc_feature (409)..(409): n is a, c, g, or t
  misc_feature (417)..(417): n is a, c, g, or t
tttattttggaaagagtttaatatattctctattgttaaagtgcaccagatagctggacttctgaaacaacaattatgcttctgcataataagctttttctacatatttctgttcatgttgcttgttcctctgatttacctggaatcaatgaatctgaaaaacaaaaaggttctttaatcacctgggnaaatttcaaggtcccacattagaaaatgagcaatcatcaataatattgatggggggtgaaaatatgacattgagactttcggggtaatgtgcccgagtttactttcatagtttactagggctcaggtttcatgcccgaaggattnatttgaaaggactcactcacctgacatgattttcctgattttaaattcggaacactctcaaaggcataaacaggtncacctccnggccaccttggttaaaa

SEQ ID NO: 323974 - DNA, 630 bp, Homo Sapiens
  misc_feature (23)..(23): n is a, c, g, or t
  misc_feature (82)..(113): n is a, c, g, or t
  misc_feature (450)..(512): n is a, c, g, or t
aactgaacatgaattttcctganttttaaattcgaaacactcctcaaaagcataaaacagatcacctcccagcaacattgtnnnnnnnnnnnnnnnnnnnnnnnnnnnnnnnngtaacttgtggcagtacttagtgttcaacagaaaacactccatctgctaaacaatatctcgactgcaaagcttctcttactgttggcggatagataatgacatagcccagtcattatcaccgtggcaacagcgaccagaaactatcagaggaaaattgcacatggaacagctggctctcgagcaggcatgcctcagcttcctctggagtatgcctttttcctgcaagtctggtgtgcctcgagggtacccaccaaccctgtgcggctcccaagactacagattatgtagcaagtccactggtcctgctcttccggatttattcttcccgccaatagnnnnnnnnnnnnnnnnnnnnnnnnnnnnnnnnnnnnnnnnnnnnnnnnnnnnnnnnnnnnnnngtgctgggtaggaagtcaataaccaagctagtaaataactgtatattgtcaagcactggtaagtacaagggagagcagagcaagcaatgggcctgatgaggcttgctttgtctcctcc

SEQ ID NO: 323975 - DNA, 1272 bp, Homo Sapiens
  misc_feature (398)..(685): n is a, c, g, or t
gggggttctgtctactgaaatttaatatcctcagtgaacagactaaaaggaatttagaatcctaacaacttaccagatttctcctgttttaaatatactgggactttaaaggttatatgtccggtcaccgtatgttttaagtcggtgttaatgctaacagtgttgaaaacaatatttcatgagatctaattgtggttgcccctataggtagcaggaaagtaaagttgcatttccctctcgcacattctacacccaagtgcctaaaagatctcattgtaagtgggtagtgttaccggaagccattgtgttcacacgggggaaatgccgtatatatttttcaacaaatattaacgtttatactttcatgtttgagaatttaattaaaaatatttgttttnnnnnnnnnnnnnnnnnnnnnnnnnnnnnnnnnnnnnnnnnnnnnnnnnnnnnnnnnnnnnnnnnnnnnnnnnnnnnnnnnnnnnnnnnnnnnnnnnnnnnnnnnnnnnnnnnnnnnnnnnnnnnnnnnnnnnnnnnnnnnnnnnnnnnnnnnnnnnnnnnnnnnnnnnnnnnnnnnnnnnnnnnnnnnnnnnnnnnnnnnnnnnnnnnnnnnnnnnnnnnnnnnnnnnnnnnnnnnnnnnnnnnnnnnnnnnnnnnnnnnnnnnnnnnnnnnnnnnnnnnnnnnnnncatgaggcggttagccgggcaccctctccgcgagggacttcccccggggggggtttttctaccaatttaatagcccggccccctggccaagaaaagtcgccaatcccggcctcacactctatataaaggtttttctcgcccgccctcatttacacacccctctccaccagaaggcggggggtgaagtcaaactctagagaattccctccccacgcggaaattccaccccaccccccctggcacaaaactgttgcggtgatataaaaaactgtgtaccactacgcgccgggaaaaaaatcgggcgctgtaagaaaacaccccgcccgcgatataacgcatccaccgccccgataagtaaaaaacccgtggggaaaacgaaacacacccagagggcatttgtgtgtgcccaccctaatataccataataattcctctgagtgaaagaaaccatcacgcgagggcaacatactgacatcaacatctactcaaccccctgtctccccgccccgatattactcccgcgcaagagacaggccgcgcccaccaccgctgttggcgagcgagaacgagccacgcgctagaatatt

SEQ ID NO: 323976 - DNA, 771 bp, Homo Sapiens; identical to SEQ ID NO: 246302
  misc_feature (158)..(239): n is a, c, g, or t

SEQ ID NO: 323977 - DNA, 341 bp, Homo Sapiens
tacacaatatatgattttattaataaatagtgcaaaagcatcagtgataactgtttgaacattaaattttttaaacagccatgtcttggcattagttaatattgtgcatattggcctctatggcactacaagtaaacagatgaaaatattgcccattttcatgcacaggtattcagctataacaccatttacaaatcattatgaacaagataaattctgcaataatattcatttggatggccacaattaaatgagtgttatatcaagaaatagcctatgttcaatatactccagatgtcagattgtaaaatgtaatgttatttaaaacttaattctttacc

SEQ ID NO: 323978 - DNA, 731 bp, Homo Sapiens
  misc_feature (229)..(245): n is a, c, g, or t
  misc_feature (373)..(385): n is a, c, g, or t
ctatatatattttttgttgaattctattttatttttaattctctcttctcctccagacacaatggcactgcttatctccgaaatggtgtgatcgtctcctcattgagcagcggctgccaccgcgctgtgggtagtgtgtgaccgtggctgtactgtatagtgaacatagttggcatatctttgtttgaagtttgttggtgactccaccaaactgggtgtggaaacaacnnnnnnnnnnnnnnnnntcccccataagaccacacctacgaaaaaattcctgccacgaatattcacaacgaccctcacccgaccgtctttgtcgggcgccttcgatcccctcgagaaccttctttaacaacctatcgctttgggnnnnnnnnnnnnntatccaggctcagttaagaaattggttcttacctgtctaaccaagagacaactcttgggtttatgaactaccccgcttggggcattccccccacctcaaataaccccccccggctgccaaccctcaagctgtcttccgtccgagctctcatgcctcctccgtcctgccatagcccagccacgggcccctgtttccactagaggggtttccgctgcctcggcatctcaatatacgacagatgtacggtccgcccgctcccgtaatcatgctatagtaaggtatgtgttccgggcggggtacaggcaaggattaacacgcgcttgctgccttgctccttgtgtcatat

SEQ ID NO: 323979 - DNA, 1185 bp, Homo Sapiens
  misc_feature (285)..(297): n is a, c, g, or t
  misc_feature (463)..(472): n is a, c, g, or t
  misc_feature (643)..(735): n is a, c, g, or t
  misc_feature (1002)..(1002): n is a, c, g, or t
  misc_feature (1030)..(1030): n is a, c, g, or t
  misc_feature (1074)..(1074): n is a, c, g, or t
  misc_feature (1089)..(1089): n is a, c, g, or t
  misc_feature (1099)..(1099): n is a, c, g, or t
tgtttgtgtcatagccgacacagggggggtggaaaatattatttattcgtttacgcatgaagctaccctgaggatccagtgtgtttgtagttattatacgcacggcgggggcagaggaagatatggatgtggtgtgctttatacagtacacaccgcctggtggttgaaggggaaaggtttttcccccacaacaggggggggcgagaagatatagtggtgcgaaataagggaattccccccacgccactttttttggtgaagggtataggggacccaccgagggannnnnnnnnnnnnaaaatgatggtaaaataataggaagggccgcccccgcagggaaacacccccccgcgtgtgaggggggacttccccgggaaagggaggcccctgaagagaggcccccctttttggggggattttgttatcaagaaacaggccctgggtgtacccgccccggggcggnnnnnnnnnnattggggggggaagtcccaaccgccgttgttccaatagcccgaggtttttttcttgggagaaacgattggggcccaagggcccctttaccccttgggggggccggggcccccaaaaggaaaggtttttgaaaaatttttttaagaggcccgaggggggccgcccagggttnnnnnnnnnnnnnnnnnnnnnnnnnnnnnnnnnnnnnnnnnnnnnnnnnnnnnnnnnnnnnnnnnnnnnnnnnnnnnnnnnnnnnnnnnnnnntttttaggattacacactttaatctgattgacactgaggaagtagggaggacatgaaagaaatttagttttagctctgctttatgcataaccagatgctccttttctaaaaagtatattgaggttttaaaaaacacatttatcagaatacttcaggaaaccatactatgtgtaatccaggaaatacactatttgcagaataggaaaatcatcactgggcaacaaaagattaaaacaaaaataaagcaccagggttctgagcagttcnaaggtgagtatatcagcagaaataagtntaaatgctcttgactggttgctatgcaaacatgctaaatgaggnctagtccatgtcctnataatttttnttttttaacatggtttctttggaaaaaatgggcaatattgagtgggaagagaagctgtccctttagacaccccggcttattgggcc

SEQ ID NO: 323980 - DNA, 380 bp, Homo Sapiens
ggggcacagcaaatctccatatctggtagagttaatgatcataactcttaagatcttacattttgcttttatttttaaaaagtaaacttctaaaaatcttatacactggtatgtgtacccatgagtagagctatattatgctttcttgtctaattacagggataaatgaaatatgattgctaatagtacatgtatttccattcaagtatatatcctaacataacccaatataaccatttaatatattctctaatacaatattattaattttaaagtaaaatggttctgatcattactggcctcctctaagagtacatgacaagtacttaagtagtgggtagaactgaaagtgaaattccttaatgtctacaattcctgcc

SEQ ID NO: 323981 - DNA, 1528 bp, Homo Sapiens
  misc_feature (134)..(216): n is a, c, g, or t
  misc_feature (700)..(700): n is a, c, g, or t
  misc_feature (1208)..(1208): n is a, c, g, or t
ggggggaatccaaccccttttcctgccccggttttctttggaaaccgttttggcccggttcccttccctatggggccccggcgccaaacgaaaggttttaaaagttttttgagggccgaggcgccccccaagannnnnnnnnnnnnnnnnnnnnnnnnnnnnnnnnnnnnnnnnnnnnnnnnnnnnnnnnnnnnnnnnnnnnnnnnnnnnnnnnnncaatgctaaggaaaaatttaatgatggaaatatcgacaaatattcaacatcatttaaaaacaaagtagcttctcttatttcacatagcttagtttgggatagaaatagaactaatgtttacaatgattcttacatttagcattaatcagaaacgagggtttgttaagtgcccttgctgggtcccaacccccagagattccgattcagcaagtctgggatgcggcttgagaatttgcatttctaacaagtttctagggtgatgctgatgtcaatagtctgtgtaccgtttgaggaaccgctgggattgattctttgacagtttttgaagtccgctgctcaccatatcacttcatcctcttataaactttcactatgtgattgcctaagagcccctgcttgttggctgctccacattttcacacagttgtactatttctttctgaaatgacattgtttgagggacagtgggtggaacgtgtgagcntcctcactgaaggctgcctccagaattccctgaatggactgccttgctttcttcctaaaatctttccccaagagggcataaaggaagggattaaagcaactattggcagatgctagagcaatgcatacatgatcccaggacatcagagttttccccaagggagtttctgggtcagtaagcaatgacaggactccaaaaatgtggtatggagtccagcagacaagaaagacagccaccaccaccacggccactcgaaaggttttgctctgagacttggcgaagcggcccctttgcattcggaagacaatgaagctgtaacaggctatcatgataacagagggcagcaggaaacccaccactagcctagtgatcgttattgcccacgaggggtgttggcacttgatcgtcatctgtgaattggcctaaattgtaataatcctggaaaccttgtggtagctcagactcgtagaaggaattgctagaagcgctagggaacagctttaaatgnagtagagagaaaagcatcagagttatccagtgggctggtttcgtgatcttcaataggaaacccactggggattttaggtgagaccacatcagcaggtttaaatacattagaatacagattttgacttgttaacctagcagaacccctagggagtgaatctgcagaaggtctttgaaatgtttgaggttggaagacagtggggactgtccaaggatgatcatttgtttggaaagaggaaggatctaacctatcattcatttctccaggcggctgaacaatgttttcaagagacctgttttctagtggatctccataaaagt

SEQ ID NO: 323982 - DNA, 1119 bp, Homo Sapiens
ttttggttcagaaacacacagctttatattattacaaaaaagaaaaacacctcaccttgtctttgtttcgcagcacagacagaaatcattttaagacagaggatcacataggcagttgtacacccagctgacaaacactttgggtctggatttcctcccccaaccacattacatcagctttgacacatctgtaaaacatcttctctgcagaaagtcagaccctaaagatcaaacccaggggagggcaccctctccccaggggccagctactctaactcattaaccctctgaagacacttggtaaaggcaacacagctgacgagagcagtgctgcctcagcagtagtgggctctggccccgccaaggcagggaggactagggccgagcttctgagaagccatccaggataggcaagggagaagggtagggggtgcagtggggataaaagaacctgatgaaaatggaagaaagcattaccttgggagttaccattttgaattattaatataatcagactctagcctggcatcacggagactcccaagagcccacggacaatgggaaagaagtgtacttcttgaatgcaattcaaagttatctgaacttttttcactgtttctagattccactttgcttgggaaactacaagaacttctttaatcagccatggccttccaaaaagtagagtgatgtggcaggcaagacggggacaagcaggcccacctggtaaaggatggctctgacattagaacctgttggctgccctctccactgccagggaaggaagctggccatgcaggtgaagaaaggcaccagccctgtttcctgcctgaagggcagcatcaaggtcatagtgtccaaaggcccggaagaggtcagtctcagatgggtgctggcagagtcctagccaagtggccaggctgaatccttcctgagccacctgcaggaagagtcaggagggcgaggctctggccactgccttgcagctcacagctggttcacacatgcatgcaaagggcaggtaactaagtaaccacccccagaaagcagtttcatcgtttttgtttttatcgacgcgtgggtcgacgatatcccgagattccggaccgtaccagcctg

SEQ ID NO: 323983 - DNA, 345 bp, Homo Sapiens
taagtggaaactgtttaataaatttctacatttagattttcaaaaatatatcctagcaaaatgctgccaactttcttctgatgtgaaggactgtcctttattctaattatagatctctcttggtgtaaggtaaaaatattacttttttgacattaggttgatagtaagatagtagcagtttattttgcccagtacatattaaaaactgtcaaccttaggttgggcccgtccttttaattttttaatattaagagtccatattaagtggtccaaaagcttggagaccactgaaacacagtgcaggttgaacaaatttccattcccagtgcccgccgtaagttagcc

SEQ ID NO: 323984 - DNA, 1279 bp, Homo Sapiens
  misc_feature (727)..(766): n is a, c, g, or t
  misc_feature (770)..(770): n is a, c, g, or t
  misc_feature (984)..(1034): n is a, c, g, or t
agaagaattcctctgaagggaacaagcatcacaagagtacacctctactcattcactgcagggatggatctcagcaaacgggaatattttgtgctttgttaaatctcttagaaagtgcggaaacagaagaggtagtggatatttttcaagtggtaaaagctctacgcaaagctaggccaggcatggtttccacattcgagcaatatcaattccctatatgacgtcattgcccagcaccctaccctgcctcagaatggacaagtaaagaaaaacaacccatcaagaagataaaattgaatttgataatgaagtggacaaagtaaagcaggatgcttaactgtgttaatccacttggtgccccagaaaagctccctgaagcaaaggaacaggctgaaggttctgaacccacgagtggcactgaggggccagaacattctgtcaatggtcctgcaagtccagctttaaatcaaggttcataggaaaagacataaatgaggaaactccaaacctcctgttagctgttatttctatttttgtagaagtaggaagtgaaaataggtatacagtggattaattaaatgcagcgaaccaatatttgtagaagggttatattttactactgtggaaaaatatttaagatagttttgccagaacagtttgtacagacgtatgcttattttaaaattttatctcttattcagtaaaaaacaacttctttgtaatcgtnnnnnnnnnnnnnnnnnnnnnnnnnnnnnnnnnnnnnnnncganagacagacaaagagagagaattctttccagtgaaactaaaaagcttttgctttttcccttggcttttatggaagaaacaataccttttacattacaactggtcaacagtaccccgcccggacctggcttttaaaaatcccaaacactgggccgaccaacccctaacataatcaaggcccctttttctgtcccccccacaagtccttatacctannnnnnnnnnnnnnnnnnnnnnnnnnnnnnnnnnnnnnnnnnnnnnnnnnnttgcaaccctatgttattactcaattgtccctgccgagcagaccctgcatcctcagccttcgtactaacaatagattgcaagtcgcacctcatcccacccattctccgtacccacatttccttatttcctcgcgacctccacgcgtgcatatcctttatcctaacacgcccgccgtctatttataccacacgcgcgcacctccaaccttgttgactcaacccccgtgtcgcctcgcgccacaccg

SEQ ID NO: 323985 - DNA, 421 bp, Homo Sapiens
  misc_feature (195)..(208): n is a, c, g, or t
ttttagttaaatacgcacaattttattgattgaagattaggacaaaaacattaaaccaaatacaggacaaagcaccagaggccatagatccccaccatgcatgtcaccaacctctcctcctccaaggtacttaaaaaataggggagaggggaaaaaaaaggtccttcttgacacagcaccatcttcagaatgttnnnnnnnnnnnnnnccttctctcctttctatcttccattagcaaaatagaatcaagggcaaatccatggccgccttgtctcctggttacgaagggtgaagccgccctcctgggaacgtgaggacagggctcctgctgcgcaggcataaagcatccaagagtctgcacatacatgccacacactattatgaagcacagattcaagtaacatttacatactagagtccc

SEQ ID NO: 323986 - DNA, 820 bp, Homo Sapiens
ttgctaggtgattacaacagctgatttttatttttcttcttgattctcttctacagtttccaaattctctacaatgaacatgtacttctttttaatatcaaaagacaaaagaattggtacgtaaaaagaacatccttcccatcttcaaggtcaagattgaacgctgactcctgcaggaagtcttccaggattcccaggcaggaatgatggctccctgtccctgtagctccaggagttcttgcttcacgcacgcctcacataccagactgaatgttggcaggaggagtgaccaggtcggtcatctgtgtccctaccacctacaacaggccagcaatctacccgtgtgtgtttgttggacagaattaaccatgatgggcggccgagggcgcctggagctatttgggggcttggagagaacctcttaggagagtgtcaggccctaggccagtgtcaccagaggaggtcagtctcagtccttggagtggtgggatggaaaccagacgggactggcatggtccacagttcttgccacaagagggcttcaggagaggctgagggcccctctgaggcgtgtgcttggtcagggtgagcaagggcaatgcagctcatacaaaggcccagatggacagagggacctagcccagcccacgcatcggtaccgagcctggctcaggggcaggccgaggcttgtgcagtagacaaacatttacagcagacaccaggcagctcctggaaaccactccccaaaaaacagcattggaatcggggacccccagctgtgaacgaaggagcaaggaggccctgggagaggaggagaacc

SEQ ID NO: 323987 - DNA, 1087 bp, Homo Sapiens
  misc_feature (194)..(194): n is a, c, g, or t
  misc_feature (409)..(409): n is a, c, g, or t
  misc_feature (435)..(435): n is a, c, g, or t
ttggtcaaggcaatggctgtttcagtgtttcagctttaacaagaatgctggattacaggtcctcactttctaccaaggcagtattcagtgtcaggtgagatgggttggcctcaggttggaacgctgctttgatgtctagtccctggtccgaaagtgctgcatagcgactggctgagggccgtactttttttggncttggtgcctctgtgactgctgatgcccactgggtgtaaacgtcccagcctggcagtacaggacacaatccctgcttcattcttggctgacacagtataccacccagcatcttcttttgtggctccctgaatgagcaggcagatgtagccgtggttgtcctggtgcatgctcactcggtcagtgctgtgagtgagtgattcattttctttcttcnaaaatatctgaggtggtggcactccnaatacacgacattccagcccgcactgggtacccatcagcaattcctgtgttttggagcttctcaataaacacagggggtttgtgtgcttctttagcagcaaccacaagctccaggctgaatgagttctgtcctgctcggttggtagctatacatgtgtagatgccggcatcacgtgacgtgactggctctatgatcagagagtgcaccccgttctcacgcaccagcatcttgtgagcactgtcagggcgtacgggctttccatctagttgccagcttagatctggggttggtaacccactgactttgcagtccattctgcagagttttccttcttgaacagtcagatctccaggagcctgcaagaagtgaggtctgaagaatcgctcctgaattggttcattttcgtctccactgtcccttgatctagaacgaggccttctgacatgaggatggcctgagggagaccggggacttcgacctctttggttgacagcctgtaccattagccgtccagtacaactgatgcggccctgagggtttgcagccataattgtataattcccatcatcatctagggtggaggctgtggtatggagggagcaggtcccatcgagatctctttgaatggtgtagtgatcactctttggagcc

SEQ ID NO: 323988 - DNA, 416 bp, Homo Sapiens
aaaacacaacaaatacacaacacaaaacttggtaaaaataactcactatatggtacatatacgcagatggtgtaatatatttatataataaaagatgaaaatagtcactttccataataaaaataagttctattttttgtttattttacaatatacttaatattctcttcttctttaccttcctctccagcttcatttccttcatgctgaatcaccagggggtcccacatggctgtcccaactccatcaagctggagtccgagaggtggcaggcaggcgggcaggggcttaggaacacgcgaggcagccgcactctaagtgtctctccacctcttctacaaacgaggagccgtccgtgcactggaagacgtatttccgccgcttgctgcgggtgggctggcagcactggggccccc

SEQ ID NO: 323989 - DNA, 1022 bp, Homo Sapiens
ttcgggggctcaataaaaacttttaattacatttcagagacttcgtacagtgcaacagtgaatattcactgttaattttcacaagagtccatttcatcaaacgttcagagagtctgccttttcattcccttgttcctcagtgctccaatcaggtttccagtctcccagaggtttcttttagttttgattaccgaccaaaactccagtttagggagaatggaagtccaccgtcccatccccaccaaaacatatttcagtcaaacccaatcccagtccctaaagaattaggaaagtatgggccaagggtccttttaattatacacacatcacccttaaaactgcgtgtgtgtacgagaaataaagaaaaacacaagaggggctgtaaaatactgcacaagacaacaaaacagaaggaaagtcttgagggagaaacactaagacgcgagcggcaggatcctacctcctgtccgtgacactccccattgacaccttccccactgtgccatggcggggaaggactaaagtcgagtctctagggtctctagaggtcttgctaggatgagcttaaagagatggggtgagggtggggggaactgcttccattatatttgtggttctcagggttaagcagtgaggaggggcaggaagattcagaatgatccgtgggtccaaccctttggatgtgaacattcctggatagaaactggaggactctcttgacaaagtgcaggaagggataaacaaaaataagatcaagtgaaatgggaaaaccctcaaagagatcaagatgggcagtggtggtggtgaaggtagagaagtggttttcagaacctgttctggccaaggtggaagaatgtgcggcagccatgaagaaatatcaaggcttcaggtagctagcacctttcaaactggcaccatggcctttcccagggggtgggaccaatagggtttggaggatcatccaggtcacacgtctcagcgaacgcgtgggtcgacgatatcccgtaattccggcgcgtacc

SEQ ID NO: 323990 - DNA, 482 bp, Homo Sapiens; identical to SEQ ID NO: 150605

SEQ ID NO: 323991 - DNA, 530 bp, Homo Sapiens
gtacaagccatggcacctggcgagatgacattttgctggaggaaagggagatcttctaagagcaaagagctttccaggagctgggaccaggactgtctgggcagggggcccaggccccacattttgacccctagggctaggcctgagctcttccaaggggttccgaggctgactgatccccaccaatctttgtgatgtctctgcctggtgcctggctttcggcctggggcctgctgaatcaacgagggggcgttgaatattgagcggtggtttctgcacccatctccgtggatcttggttctcctggtccacggcgcacgatgtaacagtggggaaaggcgtgcgtttctgagagcgtaccggaatcttgctaggggtaggagatacaccccggaggaggggatccttcgtggcttgccgggtggtcatgatggcttaccgaggcccctcagggcctacccagcttcctccgcttttctccttggcctctcgggtgctgctggagctactttctcagtttgtaaaaaccc

SEQ ID NO: 323992 - DNA, 692 bp, Homo Sapiens
catgtgtaagtatacttttgaaaatgagctttcctaaactattgagagttctttccacctcttgcggaacccactcttggaggagaggcccatgtatctgcacgagcacttagcttgttcagatctctgcattttataaatgcttcttaccaggaaggcatttttaggtcattgcttgtaccaggtaatttttgccggggatgggtaagggttgggttttctggtgggagtggggtggtgggtattttttgttgatgctttagtgcaggcctgttctgaggcaataacaagttgctgtgaaaacagcatgtgctgctgcctttgtaactgcatggaaacttttcacatgggtttttctccaagttaatacagaaatatgtaaactgagagatgcaaatgtaatatttttaacagttcatgaagttgttattaaaataactaacataaaacttaattactttaatattatataattatagtagtggccttgttttacaaacctttaaattacattttagaaatcaaagttgatagtcttagttatcttttgagtaagaaaagctttcctaaagtcccatacatttggaccatggcagctaattttgtaacttaagcattcatatgaactacctatggacatctattaaagtgattgtccacaaacaaaaacccccccactacacaacccttgt

SEQ ID NO: 323993 - DNA, 366 bp, Homo Sapiens
ttctggttaaaagcactttattgattacagtatcaattcacaacatttcataaagccactgtacaaatagaggaatgaatcactgtgtaagaaagatctaagaacagttaaatcatgatacaagtccatagtttatatggtttagagctttaagagccttaatctaacacgtttacccttcccataattagactactactgacattcatgttcagttgaccacgagtgtgtacaaatcattctaggtaaagacaaacactttcagaatgctttaacagaaaaataattttaatcaactttaaaaacacacttagatgtggatgcctttggataggaaaatagaaatgcaagtgttcagatgcttcc

SEQ ID NO: 323994 - DNA, 633 bp, Homo Sapiens
  misc_feature (203)..(203): n is a, c, g, or t
aatttgggtgagggaatccccaaacccccctaggtccatgggcccaggggttcttccctagggaaaaccaggctaatgacccattgttccactttaaccttactggggccccgcggcgccaaacggaaatggtctaggaaaagtttcttcgaggggcccgaggccggccgaacaaggtcttttttccctttctttctctcccncccgaggaaggggaggcaggagttgctttttattgacttggaagtgggctcttcagtgaagcccctttgggtttaagagcattttcctgcttcctttgttcttcctgcaacttctgctgcctgagctgccatgcttgtaatccagcgtccatttcctgtgacagcagtacaactcgtcttgcaaacgtctccctttcagcttttcttcgaagctggcctttcattgggggagcagggcggccatccgcatatgaccagtctgggagctcggtaaggggcccgtagccggaggggttggcagccagtccctgctgtagtcgccactggccgcccgcccaagcggctgcgctgcagtgcagcctccggacacctgtgaagagaacagtcactaaagcagccatgctgagcaggagtagccggggtagccccc

SEQ ID NO: 323995 - DNA, 1206 bp, Homo Sapiens
  misc_feature (71)..(145): n is a, c, g, or t
  misc_feature (154)..(339): n is a, c, g, or t
gtggggggggaaaaaaaccccctcttattttcctccgggggttttttcaaagaaaaaaagatttacccccnnnnnnnnnnnnnnnnnnnnnnnnnnnnnnnnnnnnnnnnnnnnnnnnnnnnnnnnnnnnnnnnnnnnnnnnnnncccaaaacnnnnnnnnnnnnnnnnnnnnnnnnnnnnnnnnnnnnnnnnnnnnnnnnnnnnnnnnnnnnnnnnnnnnnnnnnnnnnnnnnnnnnnnnnnnnnnnnnnnnnnnnnnnnnnnnnnnnnnnnnnnnnnnnnnnnnnnnnnnnnnnnnnnnnnnnnnnnnnnnnnnnnnnnnnnnnnnnnnnnnnnnnnaaaattaataaaaatattttattgaatttcaggaacttggtacttttttaaaacttcaaatctttgcacacaaatcaccactatactttctagaatagtggaagttaggacttcaagattgtcacttatctccttgtgtcacacagcacagaaaccccaagtcctcacactgcccccaccccccttctggccatgactaccaactactctgttattctagcggaggacaatgacggaagtgggtagacgactgaaggagatcagctgtccaccgcgtactctactaaagtgagaggaggagcaaccgaggatcatgccgcacacactctgagtgcaccacgtgacgtgggttcatacgggagttcccttttgttttctcgtttggttcagggcaaaagctactgaaattgttcctagtccctgaggagctcagaagttgggcaaaggtcacagcagacttcctgaaaagcagacactgaggaacacagtggagagcgggagttcacagcgacgcagctgaggacgacgcaggacctctcccaaaggtgctgcagctccagcaccaggggccagggctgcggcgacagcagctcagcaacccttgctgtgctcaagttcttggggattcagagctaagttcaaaatttagaaacagtgccttaaagacgggcaagaaaacccggtgtgggagtctgctcatctatggtttgttactactctcgcttcgatattcttaaattcctaggtaccaatgaaaaagccaagtgaacgtggcagagtgaggaggagacaggagcgtgtgcaccttccatctgtgagaggcacacttcagtctgggttcaagatgcagaatggtgcctaaagcaa

SEQ ID NO: 323996 - DNA, 377 bp, Homo Sapiens
taaaattaataaaaatattttattgaatttcaggaacttggtacttttttaaaacttcaaatctttgcacacaaatcaccactatactttctagaatagtggaagttaggacttcaagattgtcacttatctccttgtgtcacacagcacagaaaccccaagtcctcacactgcccccaccccccttctgggccatgactaccaactactctgttattctagtcggagggacaatgacggaagtggggtaggacggactggaagggaggatcaggctgttccaccgcggtacttcttacttaaaggtgaggagggagggaggcaaccgagggattcatggcccgcacacattttggagttgcaccacgtgacgtggg

SEQ ID NO: 323997 - DNA, 756 bp, Homo Sapiens
  misc_feature (240)..(250): n is a, c, g, or t
ttctgcgtgctatcgcccgccacgtgggctgcttgttcacaccgcgggcgggcgggacgaccgcccgcacctcttgttgtaccccgtgcgcgtgcgggattttggtccgggtggcaccccagcgatgacgacgcggcgccgcgtcccacatcttcccccactctggggggctcgcgcccggccctcaaacgaaacgggtctcctggaaaagcctcttttcccgggggcgcccaggcacgnnnnnnnnnnngttgttttctcgccaggggatgcgccacccggtcgttggcagccacgccccagtagagtccagaggggatttaaaaaaacctttcttgcccccccgggattgaccaaacccgggtttgttaacccgttgatttccttcccccccattcccttcttccccagggggcttcctttggccggaaattcgaattttagttggcaaaatccagtgatgaggtctgtagaaaggggggtcccgtgtcacagccaggaaggcagactcgtccctttaacccactccagcccaggggtgctggccaggatgtgctgttctgtcatgacgtggtcactgagtctggttcgttggcagccccttccccaggaggagggagactctttggcagtgcggcagccctcccgggggcacgggcttctcagcagcagacacaggcaggcgaaaagcaggcagctgagcctctccagcgagcatggtattgctagggttgcaggtgccctggcaggtggccc

SEQ ID NO: 323998 - DNA, 848 bp, Homo Sapiens; identical to SEQ ID NO: 150830
  misc_feature (12)..(12): n is a, c, g, or t
  misc_feature (58)..(58): n is a, c, g, or t
  misc_feature (76)..(76): n is a, c, g, or t
  misc_feature (151)..(151): n is a, c, g, or t

SEQ ID NO: 323999 - DNA, 469 bp, Homo Sapiens
ggcgtcagctgtggctcctttctggatatcttccctccccacccgtatcttccgccatcctggcccctgtgtggcccacctggaccccctgcccaggccggcgggctccagggtgggtggcgggtggggagtgatgcggttaaggcaacgagttatttgaggtagatgtggagggtgtggacagccccgctggcccagcctggccgccgctggttccggtgtttcctccccggccgcctgcgttgctgctgctgctgccgccgccgccgccgccccctttgttgggagcagaggttggcgtgggggccggcggctgagcaaacagaactcctgtgtacatgatgccgttgatctccaccgacatgctgatgctgttgctgccgttggtgcccgtcagtgtcacagcagagtcctggcggctttcggaggcttggctgttgatccgaatgctcatgggcagctgggccgc

SEQ ID NO: 324000 - DNA, 786 bp, Homo Sapiens
cttgtgtgggtggggaattccccagaggccgcttaggtcctattgggcgcagaggatgtttctctgaggagaaaacaagcttgtggcacccaggtttccccttaccctggcgggggcccgggccccccaaaaggaaagggtgtagaaaactttctggaggggccgaaggcgggccggcaagggttgtgtttggcgcgagttggggttttcgggaggaggagactttatttggccccagcccctagccccacagccaagacagtttgacataacaggcccccggggccctggttgggtagaggcagggtggcctggcctcctgattagtggctgtggccgtggccaccatgactgtggccgtggccgtggccactgtgatcttggccactgtggtcttagggggtgccctccccgaggcctggcttatggtggtggccagggccctcgtcaccctcgtgcatcttctcgtgggaggcccaggttagcctcgccatcagcatgatgaactcctcgaagctcagctgcttgtctgcatttgtgtccaggtcctccatgatgtgttctatgaccttttcattcttattctccttcttgagaaaattttgcagatcttttcgcaccagctctttgaattccccctggttcagggtgtctgggtgccccagcttcacagagtattggtggaaggtgttgatgatggtctctatgttgcgttccagctgcgacattttgcaagtcatcgtcttgcactctgtcaaagccgaggagccacacagagtgtttccc

SEQ ID NO: 324001 - DNA, 673 bp, Homo Sapiens
  misc_feature (561)..(574): n is a, c, g, or t
ttttttttacagaaattgacctttatttgttgtactaaagcctgtttaacttttgatacaaagtaacattttagtacagaaaatcccagtctgtcagctcagtacctgtctgtgcacactgtaccatctcagtcccactctgcctgtaacttagaaaacagcccctacccccagagggtctgcgagttaataccttgagaatagtctacagtttttcatagtttgtctgagctagaaaacttgtacctgtaaaacaaaggacagcattgaggactgaaacttgtctcttttttgaacaactgtgcaagaaaatatatccctttttaaaaaacatcagttatggctaaactacaatctagtgtctagaattacaaagaataaaatgaaatcaaagatttctcgctagtaaaatgaaatgttaggaacagtattaaaatataggtcctaccccaacgacacttacacagagcccagtacagtacctattattaacaggacgcatagcttaaggaggaaccacatcaaatcttcagccagacatatctagcctcagaagtgccnnnnnnnnnnnnnngcccccaaacgaagacacccacactgagtagggtgcatgccgtgagtgctgtaatcaagattaaaaagacctcagtttttctttttagactgttgatag

SEQ ID NO: 324002 - DNA, 577 bp, Homo Sapiens; identical to SEQ ID NO: 246305

SEQ ID NO: 324003 - DNA, 611 bp, Homo Sapiens
  misc_feature (553)..(553): n is a, c, g, or t
gattcaacaaggacaagttcaagtattctttattcaaagttgaaaaatgtaccatactgcattattgcaaaaattcactggtacaaaacactttgcagctggtgagaaggcaataaaaagttgatttttaaactcattactataaattattcttacagtactttgcaaattcagaatttcaaactgcatgttctttttctaaattgcccacagtactcgaggttcctgaagctaaggcagctgtttcagaggagggggaggaggtagcagatgtcaagggatttccatttctctttcgatgccgacatacttcagggcatcagcctggctgtatctgtaatcaaaaaacagctcttcgccagtctggatggctctcttggcaaaaatacctatcctgtgatcaccgttaaccatcataacttttgcatagcagtttggatttaccgaatgatttgcaaaacgaattttgttacccttgcgggttgcatccaccacaaaatcattgttcaagttgaacagaagctgcacatgtatttatcatacacttccctcntctgtcagcttcatcctgagaaataatctctccacagtattctgagatggattcattt

SEQ ID NO: 324004 - DNA, 1474 bp, Homo Sapiens; identical to SEQ ID NO: 64816
  misc_feature (264)..(407): n is a, c, g, or t
  misc_feature (598)..(606): n is a, c, g, or t
  misc_feature (683)..(768): n is a, c, g, or t
  misc_feature (849)..(857): n is a, c, g, or t
  misc_feature (1365)..(1365): n is a, c, g, or t

SEQ ID NO: 324005 - DNA, 831 bp, Homo Sapiens; identical to SEQ ID NO: 64817

SEQ ID NO: 324006 - DNA, 1594 bp, Homo Sapiens
tttttatagaaaatgggaaatgtatgatttttttaataaaacaattctgcttcagtgcaaatatgtagtccaaaacaacaaaaaaagaaaatgtcttatgtgacttagcacgaacagtttccacagcctttcacactattgacaatttcttcttgtagtttctttctttcctcctctttggatatattttctttctttgcttcccatttggggttatcatggttctgcacacggctgctctgtgtatgccacatttctgaatagatactatgagggttagcaagcaaaccatggtgggtaccacgttcggctaccttaccctgatccaagacaatgatttcatctgcatcaaccactgttgacaatctgtgtgcaatgaaaatagaagttctgtgtttgaccacatccttcatggcaccaagaatagtctcttcagtaatcgaatctaacgatgaagtagcttcatcatagagtatgactggggggtccttcaaaatggctcttgcaattgctactctttgcttttctcctcctgaaagcttgagtcctcgttcccctacttgggtgtcatatccatgtggcattcgaagaattgcatcatgaagtccagctaattttgccactgcatacacttcctcaggtgaagcactgatgtttccatataagaggttgtaataaatagtattatggaagaggacagcatcctgaggtaccactcccactgccctccgaaggctttccaggctcacatcttgtatattttgaccagcaagataaatgctacccttttgaggctcatagaagcgaaataatagcctcactattgtgcttttccctgacccactacctcctacaatggccactttctttcctgcagggacttcaaaggatattccactaaggactttctggccctcaatgtattcaaaatgcacattatcaaaggccacggtagctgtctgtggtgtgatctgaaggggagatgccatcactttgtctttaatttgggtgtctaccttgagtagagtaaacaaggtgttcatatctatgagtgcttgtctagtctctctatatacagttcccagaaagttcaggggtaatgaaagctgaaaaagcagtccattcaccattactagatctccaacagtaagggtacctgccacaattccctgactggcgagcaccattatagctgttaaaccgacactgaaaatagcactttgaccaagttcagcatagccagagtagaggtacttttcaatgaagcagtctcatacgtcttcaaaaatccatcatatctctgtgcttcatatctttcattattaaaatacttcacagtttcataattcagcagtgagtctatagcagcattacctgcatcattatctgctttgttcatttctattctaaatctagttctccaccgtgtgactgcactgtgaatgctgtgtatgtaccaagtgttccaagggttaccaagcaactgggcaccgcatttgtaatacaaacaccactgacagcatcacttcaacatgatgggaagaagattaacggacgcgtgggtcgacgatatcccggaattccgggcggtacc

SEQ ID NO: 324007 - DNA, 511 bp, Homo Sapiens
  misc_feature (288)..(288): n is a, c, g, or t
  misc_feature (474)..(474): n is a, c, g, or t
  misc_feature (497)..(497): n is a, c, g, or t
tatgatttttttaataaaacaattctgcttcagtgcaaatatgtagtccaaaacaacaaaaaaagaaaatgtcttatgtgacttagcacgaacagtttccacagcctttcacactattgacaatttcttcttgtagtttctttctttcctcctctttggatatattttctttctttgcttcccatttgggggttatcatgggttctgcacacggctgctctgtgtatgccacatttctgaataggatactatgaggggttaggcaagcaaaccatgggtggggtaccncggtttcgggcctacccttacccctggatcccaaggaccaatggatttccatcctggcaatcaacccactggttggaccaatctggtggtggccaatggaaaatagggaggttctggtggtttggacccaccatccttcaggggcaccaaggaataggtctcttcaggtaatcggaatctaacggntggaggtaggcttcatcctaggnggtatgactggggg

SEQ ID NO: 324008 - DNA, 807 bp, Homo Sapiens
gaaagtggtttcttagaaaaagccttttttcgaggggcccgcagggcgcgcgcaaaccaaggtgatttatttggagtggggcgtgggcgcttcttttcccgagggtgtaaaagagggaggcagatagtgcggttacgggggttgtttctttgaaaaagtgctttatttcagtaagatctaagtcagatgcattaaaacatatcaaaatgttacaaaaatgtatggctcccttgctgagggcctgtcagattatgttagatgagtaaacgcatcagtgtgtaagttcagaaccaaacgttgaatcaagtcatgtaccatcgctgaaaggcaagttataattaagaatacttcacaaggctaaaacaattgggaaaacccttcagaaacgctagcaattacacaccagaaacatcagcctggaaacaggtctgcgatctgcagggaagactccaaaggtaaactgagggtttcccaccacagcttgtgcatcttgtgctcagttaaatacagttaaaacacaaggggcgcttcaacaccccccttgtgatagggcagagctttctattacatctggaagaagggggcgccacattcattcttatttttacatctctaggaaatcatatctcatctcatctgagcgaagcaagactttgtgcaaaacgatttaagtggaaacgtgaaaatgtgtgctgctatatcagggacgcttatggtgatctcctgtctcctatctcattcttcacgtcatggtttggccgctgtaagacactgaaattgccttgttcatgtagaaatttctcttcc

SEQ ID NO: 324009 - DNA, 1473 bp, Homo Sapiens
  misc_feature (348)..(348): n is a, c, g, or t
  misc_feature (970)..(1032): n is a, c, g, or t
tatatggttcacgcggcggaggggaatgtgttgcgcgcggagtatatgagtagggaatgagaatattctccgggcgccgacgaaatgtgtacccgcgcgcgaacgggcggtgttatttcgttctgtcggacgacagtggttaaaatagacggtgatagtgtcttgcggagggaggcaatatattttctggtgcgggggagaggggttttttatgtcggcgcacgcccggtcggtggtggtgactatcgaaagatagtgtgtggggcgcgcccgattattatttgggagcaactggcacagaggtgtgtattatgcggcacatacaccgcaggtgtgtgttactaaacnacccacatatacgcggccggccacgatcgtggtcttgtttataccgaaccacaaagggtggcgtcgtattaataaaacggaacgggttattaagagtctaccgcgcagtcgtttggggcgcggaaaattataacagatgtggatgtttccatacacagatattgtcacccgtatattcatatcggtggtgggggctatataacaaagggcgggcggggagcaagagaaaatgggccctggacaacagtgtggtttttggaaacagaaggtttgatcgccgagaagaaagttggcccacaaaagttagggtgcccggaaaatatgggcctttggggaggctctcctcctagagaagggtcctcgcttgagaaagaccctccggggaagacccccctccaggaaaattcccactcggaaaatgttgtgttacgaaacacctctgggttttcgctcccggggggttttgttgtgggcgcgacgattgcagagccctagtttctatgccagagggcggcccaggaacacagaggaagtgcccagttcgttttcgctgggtgggaccggcggggcaaaagaagtggtttagggaacttttttgaggggctagggggcttgacaaggnnnnnnnnnnnnnnnnnnnnnnnnnnnnnnnnnnnnnnnnnnnnnnnnnnnnnnnnnnnnnnncaaagtcaattaaattttatttcaaccaagaatataaaataaatgcaatgtaatttattttagttttaacagtcatttcaagaaggaagtcaggtcaactcaaaagcaggaaaccctcgctccaaagcagtagctcgtcctgcactccatggagcaggcctcgctggggtgcagcggctctgagcacaaacctcgcagtggagcacgaaaagctacagtcatctctataaccatataaagggggatgcgtgcagaaaatgactgaaaaaagagacaagaacaggtacacttcacaaataggaattataggaatatacaaactaggcagtttagaaaggatatactacataacatatataaaaagtactttaaattgttgttaaaaaggacaccttcagtccagattttgtgtaatacttttagtgtctacacagacaaatc

SEQ ID NO: 324010 - DNA, 856 bp, Homo Sapiens
  misc_feature (51)..(51): n is a, c, g, or t
actttaacctcataacaagtctgtgaggtagatagggcaggcatcattatnccagcggagcttgtggctcagaaaggttgacttgggggtctaaaaactagtacaggcatctggtttgaattaagacctgtaaacgctagtacggagcagagaagctgagcactggctttgaaagttattcagttcccagggttgtccctgatcttcctcattccttgtgcagtcttcaggagtccggggcaagattccatgcagaggcagccaaagccacaccgttctctgtcccaggggctgccagcatggctctgaggaggaaagctcagtaactgcccactggggaataaaggtcagttccatccttctgcagtgacctcccccagaatatcaaccctttggatgcattatttcagaagagatggttggatccagccagcttgcaacactgacagtcacacagagatatgcataccattgcgcataaatacacatctgcaacatgctgggcccagacaggtcaccatgccaaaaacactccacggacacctgacaatgagtgagttccacattgtggaagccccagggatttctggtgaggaggaagagcccctggagctgcggcatcttgggggcctctcaagaaaccaaggttcctgaccagactgcttagaggagaaagattcagccctcgactcaagagaggagggcaggcgtcagcagcttttcctggcaatgtggagaagcagcaagagggcagagggcgaggaagacttcacagcaagtcccctccacccagggtcaccaggtgcaccgagaggtctcagcctacagaaaggttttttgctcgttgcttcttacc

SEQ ID NO: 324011 - DNA, 1223 bp, Homo Sapiens
  misc_feature (49)..(49): n is a, c, g, or t
  misc_feature (499)..(507): n is a, c, g, or t
  misc_feature (608)..(718): n is a, c, g, or t
caatgagagaagcggtgggggtgtgtgtatgccgcgcgcggcgggttgngcagcgagttttgggcggcgttcgcttgtgttcggtggggtggtggctcttgtggcggtggaaggaatgatataatatgtgacagcctgccgcgcgcatcggatcgggcgggcgggggcaagtagggggggataggttcgggatactgggtatggacggggaggattgtcggggggcggggtgggcggtcgcgggaaagggatgggtgaaaagcgctccttgcgtggaggaggggttggggaggatcctcggaggcgttgcactcgcaggctcataagtggggttgaaggggggggaggcgaagaaggctatgtgtaagatcgggcggtatgttgtttttttatagaggggacggtatctgtgtgcgttgggtgccgttgcgtctgcattatcgggcgctggccgcaaatcgaaagaggatttggtagatatattggtttaatggcggannnnnnnnnagaaagaaaaagaggtttaagaggatatgtttttaaggggtagttttgggaaggtgttggaggggtggtaaaagagtaggtggtagggtatgtgttgtaannnnnnnnnnnnnnnnnnnnnnnnnnnnnnnnnnnnnnnnnnnnnnnnnnnnnnnnnnnnnnnnnnnnnnnnnnnnnnnnnnnnnnnnnnnnnnnnnnnnnnnnnnnnnnnacagaactcagggtctatttattaggaaggagatgtcagtgctttatcaaagatgaaggggtcacagagggacaatgggacaaaggccctcagctgggacatttcttggccacaatgagaacagcagaaggcacgagtcccagctcctgcagaggccgctccatgtcagcttctgagaaggcccgtctggggaagccactgagcaattgcacagggtcctggcccccacctagttcctcccacggtggagctcacatagagctcacagctgcagctgtttcccggggccggacgtctggtcagtaagtccatctggagctgactgtatgcgaactgtctactccgcttgtgggaggctctgctggagagagggaaggactgctctgtgcactggggtgtgagagcacacgcacatactcttgtcctcgcttgtctccgacttctcaaactgtcggccggcgaatctgccaggcaaatcaaagtagcgattatcgatcgtcaacgt

SEQ ID NO: 324012 - DNA, 893 bp, Homo Sapiens
  misc_feature (450)..(450): n is a, c, g, or t
  misc_feature (582)..(582): n is a, c, g, or t
ttggatttgaagaaacctttatagatatagattccattttacaagaagggaaaattgaggcctggagcagaaggaagcagtggggtagagtcagaaccagcatccttaagccgggcagacttggccttagacagacatgccttacttaggtccagcagatgctaccaggaaggtatggctggcagtacctgcgtctgagctcaggacttcagaccaagatggaagtcccttagaccaataacataaaaatcactttttaactcaggtgctgtgggtagggagcaagggcagctatactgtcctttcagaagctctcctgggctgtggaaagtgcccacgagcctggcagatcacggaggaaggaggcagaagttccaggctcagaacctgggtcccaggctgcattcagagaggattccttgaggccctggcagccaggaaccctgtttnatgtgccccgaaggctgtaatgaaaacattgatgaccacagtgaagaagaccaagatggtggctgcgttgttgagctggttgagtcgccactgcttttctacctcattcaggtttcagccgtgcaatgaccnacgagcaggacaccgatgaccacctgcaggagcagagagaggctgatgagggtgaccagggtggtgtagtagtgagaggatggtccctgctccagcaccgcctttcagccgcatggcgttggacatgaacagggccacgtccagcatgctctccgccacgctcttcttggtggcgtaatggttcaggttgatgggctggctcctggggtcggagcttccaggctcatgtcccctcacttaatcctcccaagacctgtggggcgtgtcgtcattttagggctggagatgaggaaaccgaggctcggagagat

SEQ ID NO: 324013 - DNA, 984 bp, Homo Sapiens
  misc_feature (218)..(231): n is a, c, g, or t
  misc_feature (252)..(344): n is a, c, g, or t
  misc_feature (367)..(378): n is a, c, g, or t
  misc_feature (450)..(462): n is a, c, g, or t
  misc_feature (483)..(503): n is a, c, g, or t
  misc_feature (510)..(524): n is a, c, g, or t
  misc_feature (532)..(574): n is a, c, g, or t
  misc_feature (576)..(581): n is a, c, g, or t
  misc_feature (583)..(585): n is a, c, g, or t
  misc_feature (590)..(591): n is a, c, g, or t
  misc_feature (595)..(642): n is a, c, g, or t
  misc_feature (645)..(647): n is a, c, g, or t
  misc_feature (649)..(649): n is a, c, g, or t
  misc_feature (652)..(675): n is a, c, g, or t
  misc_feature (677)..(690): n is a, c, g, or t
  misc_feature (692)..(694): n is a, c, g, or t
ctgcccccccttgtgttctcccccgcgggggaaaaaatatttattttccaccgggcgccccccaacgggtgtgtgtatatccccccgcgggggcgattatacgggttttccaacacccccgcgtgttggggaggggggtcttcccccctcgccggcggagagaatgttttatataagatattacccacaccctctcttccccataaaaaaagcccccnnnnnnnnnnnnnntaatattaattataaatgagnnnnnnnnnnnnnnnnnnnnnnnnnnnnnnnnnnnnnnnnnnnnnnnnnnnnnnnnnnnnnnnnnnnnnnnnnnnnnnnnnnnnnnnnnnnnnactgttgttttccccccgggggnnnnnnnnnnnngtgggggggaaaacaccacccctctttttgttgggccggtgtttcttttgaagaaaaaaatattaacccacnnnnnnnnnnnnnccttgggggggcccgcgcccnnnnnnnnnnnnnnnnnnnnnttttttnnnnnnnnnnnnnnnccccaaannnnnnnnnnnnnnnnnnnnnnnnnnnnnnnnnnnnnnnnnnntnnnnnntnnnttttnntttnnnnnnnnnnnnnnnnnnnnnnnnnnnnnnnnnnnnnnnnnnnnnnnnttnnntnttnnnnnnnnnnnnnnnnnnnnnnnntnnnnnnnnnnnnnntnnntttcagttgtcaaactactaacatctttattttgtcaagatatttaacaatattaaaaagttcagatttcttcatggtcatgtcttttaccagcttttcaaagattcattcagtagtagaaacagccaaatgctgctacaacgcagaataaactgtcattcatgaaaacatcatgagtatagttgtcagtgtcagcatcccagaaacagcgagaagccatgaatactccttcacctctttgttctccaatcactacttgcaccaccattttgtatcggtcaaatcccacc

SEQ ID NO: 324014 - DNA, 978 bp, Homo Sapiens
  misc_feature (535)..(535): n is a, c, g, or t
gtctctgctattaccggcgtggtataccgcagcgacgtgcgagcattacactgttatacgatactctcctctggtctctggtgcccggtgttggtttgtacgatgtagggcaggaggcggcaggacggttatgtaggggttggggcggggcactccgcggattagatgtcccagatccgcgcttctggtagactgcgtagcgtgacgttgatatcagcctgcgcccggttcgccgggcggtgagcgtccacgggaggggcgcccggacatcgtgctggtctgcaagtgtgtctgggtgtaggacggtcgagggccagggctagttgcgctgtgcgtggcgtcgcggcctcctcccggtcaggtttggggattagggagtctttgggggcggggaggcggccggcggggggtgcgcggtggttctgtttttgttttctctggagggaaaagtgttctgtttattggtctggcttggtcttcctgtgcgtctctcagaatgctgctctgcccttgtgggtccaggggtcgcagtggntgtccccctggggcctgcctctgctgcccacctggaagtggcctcagtcagtcttcctgaaccctgtcagcctaaacttctggaagagggggatgaagccttggaggacgctgtggatacggtacactagtccgaagtagatgccaacggtttccaggggaggcgaaggtgagcaggccgaccccaagagacatgaaccagtctgcgtaatagtgataacacaccagcaaggccccgatggcaaagcacaggaggacgaaattggaaaaactcatcatctttctttatattcagtcttcttaactgagaggcctccacttctccacttgctgggtcagagcctctccttcggagtcctgattccccagagggtaccacctctccaggagcatctccatagagttgaagctcatccttcaaaacgtcaggctccccatgccccc

SEQ ID NO: 324015 - DNA, 465 bp, Homo Sapiens
  misc_feature (376)..(376): n is a, c, g, or t
  misc_feature (420)..(420): n is a, c, g, or t
  misc_feature (434)..(434): n is a, c, g, or t
aactatgtttattgtgcacttagtaggccagatactcttctgatatttgagaatacagtggtgaataacacaaactccatgctttcaagattcccacacccagatactaagacatattaaaatttacagcaattaaaacagtgtagtttggtacaataacacatatagcaatgatacaaattaggggaaaaaaccctgggcttctataacaagtgagtatacattaaagacagtattgcagaatggcttcaggattaatttgattaatttagagagagcctatttcaggtcttcctaggctcatccacacacatcacctttcagtgttctttatagggtacttaaaacttaaaaaaagggcccgggggcggtgggntcccgcccgttaattcccagcattttggggagggccagggaggntggggtcatgaggncaggggtttgggggccttcccggggtaaaca

SEQ ID NO: 324016 - DNA, 639 bp, Homo Sapiens
  misc_feature (582)..(582): n is a, c, g, or t
tgagatttgagggggttttattcttaaaacggcacatttgtagagaatgccctttatatatgttctaaagaaaagtgtacaaatactcaatgattaaagtgtctctgagaaagtggcttcggaccacaccagcatctggtccttttgctgtgacccaccccatcccggagctggtcgggtctggctggatgtgctgcccagtgagtgcctcgctcggtaactgcttggtcctgaacattctctcgtttcaggaactgatgaggttctcttcttttgactgatggagattacaaaactcttggattctctgaattatacttctgtaggctaacgtggctggggaatctggggcgtcaatgaaaaaagactggcctttgtcacaattcttacctatgagcggatccaggggcactctgccgaggagagggacctccaagtcctggcacatgagctccgcgcccccggttgtgggagggaatatctgagattctttcttgcacttaggacagatgaagccactcatgttctccaccaccccgatgatgggcagcttcaccttgcggcagaagttgatttctttcncggacatcctggagtgacacctcctggggagtggtgatgatcactgctccatcgacc

SEQ ID NO: 324017 - DNA, 1294 bp, Homo Sapiens
  misc_feature (134)..(134): n is a, c, g, or t
  misc_feature (509)..(510): n is a, c, g, or t
  misc_feature (514)..(514): n is a, c, g, or t
  misc_feature (525)..(525): n is a, c, g, or t
  misc_feature (529)..(529): n is a, c, g, or t
  misc_feature (531)..(532): n is a, c, g, or t
  misc_feature (535)..(535): n is a, c, g, or t
  misc_feature (539)..(539): n is a, c, g, or t
  misc_feature (541)..(541): n is a, c, g, or t
  misc_feature (543)..(549): n is a, c, g, or t
  misc_feature (691)..(700): n is a, c, g, or t
  misc_feature (726)..(741): n is a, c, g, or t
  misc_feature (756)..(756): n is a, c, g, or t
  misc_feature (775)..(775): n is a, c, g, or t
  misc_feature (802)..(877): n is a, c, g, or t
ccctcgttccgacgcatcccgcaaccgtcccgcacgctgtgagagtcccgtacgtaaggcgcgcgcagctggtgcctctcacccgcgcctgtccagtgcgcacggcggtgcgcctacacgccgtgccgctcaancagaggcgcgccccgtggcgtcgatgtcgcagctgatctcatgctcatgagcactccatcggacggatgatcgtgtggcttccactcatccaatctcagtctcgtcaatcgcagcaaatacaaacccaccaacgtgcgaagcacgattggcgcccttcaggcaggactcagccgtcgccccggcgatataccagcccgggcggcgcgcgcagggccgtccgggccggctagagcgcggtcatggcagctcggctcctcggagatgccacggaccagcccgggcgtcatggagccgcgcgtgcgcgggggcgcgtcgaaggcgagcagccggcaagggcccgccgcgggcgcgccccccccgatcgcaccggcccnncgcngcggcggtccncccncnngcnccgncntnnnnnnnattgggttactccccggtaccaacccgacccctgttttcgaccgggtcccggggtttttttgggggggatccccgcccctttgtctttacccgggttttcttgggaacccagggttggccgcgttcccttttttttgggggnnnnnnnnnnaatcgaatatttttgaaaaatttttnnnnnnnnnnnnnnnncgacgaattttttgngttgggtggttagttatgngtaaaagtttgtggtggtttggtgtgnnnnnnnnnnnnnnnnnnnnnnnnnnnnnnnnnnnnnnnnnnnnnnnnnnnnnnnnnnnnnnnnnnnnnnnnnnnnctgctgtagacatttattgaatcatctgttgcaccaacagcacattgtatttcacagaagattggccacaggagaaataaaataacccaccacaaatccgcttctgggggccttcttcagctccttagtcatccagtgttcactttggcaaacagaccagtttacagacttttgttgcaaatctaaggttccatttctctctgtagcattccggctagagagagacacgattgtactttggtagtttgtctaaggcggagttttcccacatgtaaacatttcactatacaagtgtgtgccagctgattgaaggaactgacgggcacccctacccctgaagagtgtacagtctaaacaggaggcgaacactgtcatccggacaggctgagaggaggcggggaaaggggctcgaaggag

SEQ ID NO: 324018 - DNA, 762 bp, Homo Sapiens
aggcgcttgtttgagcaaaagaacagacaaacaaaatgtttcccagcatgaatgctgctctttcagtatatcagaccatattatttttatatttaaaattcatagaaaagtgccttacatttaataaaagtttgtttctcaaagtgatcagaggaattagatatagtcttgaacaccaatattaatttgaggaaaatacaccaaaatacattaagtaaattatttaagatcatagagcttgtaagtgaaaagataaaatttgacctcagaaactctgagcattaaaaatccactattagcaaataaattactgtggacttcttgctttaattttgtgatgaatatggggtgtcactggtaaaccaacacattctgaaggatacattacttagtgatagattcttatgtactttgctagataacgtggatatgagttgacaagtttctctttcttcaatcttttaaggggcagaggaaatgaggaagaaaagaaaaggaattacagcaatactgttctttctataggaaggattagatatgtttcctttgcaaatataaaaaaaataataatgtttactactagtgaaaccaaggtattaggaaaataatgtacaagcatctcttgcaagaaagggtaagattgttatgagtgaaatcgtgccttcctcaaatttatatgttggagtttttattcccaatacctccaaatattatcttatttggaaataaggtctttgtagagaatataatgttaaaatgacc

SEQ ID NO: 324019 - DNA, 528 bp, Homo Sapiens
ggtcagttaattcacttgaggaactaaccagtttttactttctgtctagaatgatgtacatgtagtagacgtaagccataatgctcccaaagtgccttgttttctctgatacaaacatatttataaggacatattcctgtgggttcttgggtgtgtttgccacatcaagattttagggaaggggggtatatgtgtagtagggatgccgtttgaaaacaggcactcttcccctgaggatgggaaaggagctcttcagttggagatctaggcagtgggttaagccagacccctaaagtgaccctttcctcttctgccctattcttctcagaccctcagaaagacatccaatttttttaaatccctgtagctccaagcctggtctcatttgcttccctgccaggctcatcgtgtgtataccacatttgtgccccactgacctgaaggttccatgtaactgtatacacatgaatacttaaatgccaacatttaaaataatttgataaagtctttgtagccactcagccaaaa

SEQ ID NO: 324020 - DNA, 433 bp, Homo Sapiens
  misc_feature (21)..(21): n is a, c, g, or t
  misc_feature (41)..(41): n is a, c, g, or t
  misc_feature (47)..(47): n is a, c, g, or t
  misc_feature (55)..(55): n is a, c, g, or t
  misc_feature (84)..(84): n is a, c, g, or t
  misc_feature (121)..(121): n is a, c, g, or t
  misc_feature (127)..(127): n is a, c, g, or t
  misc_feature (255)..(255): n is a, c, g, or t
ccccaggtcccccggggaacncctccaaacaggcccagccnttggancgggcccngtatagggtagccgtgttttaaattgggnaaccctgtgggtagagcccacaaattccaaacctacntccccnttgccaaagtgactggagaaaaagaaatcagcttaaatgaggtattaagtaatgtttagagttgtaggtattaactagaatataaatccttagaaattgtctttataccttcaaaaattatactatgncatttatccatagaaatgtgattacaaagaagtctgactaccatgtctttaaacatatggcatctctcaacttttcttccttatggggctacatttgttcatttcccagcagtagcataaacttacggtgacatggtagacttgtctctaaataaaatttttaaatgtttaccaaaaa

SEQ ID NO: 324021 - DNA, 687 bp, Homo Sapiens
  misc_feature (662)..(662): n is a, c, g, or t
gaggactgaatgcgaggatttaataccaatgcaggcacaagaattttcttagaaaaggtcagtggggagggatcatggacaccttggtttcaacaactccaactccttcatacatcatcttcagttaggctggctgatcagtgtgctgatactttcttctacctctgacagcgtcttcagaatttggttgactttgacctcatcaaattccaaacacagaaattcagattcctgtccatatttgcctaattccagctctataatggcaacaggtgtgtgtatttgagctgagtgccttgactgagacttgccatcaactctccagctcaggccccgaagcccgctattccagcggctctggttcatgaggctctcacggatttttgtcttgtggctcttccagaatttggaaatgacagcagcttggtcagatgtgatcccaccttgctttttggtttgagcagtcaagaatgcctccagctggttgaaatccatgtctgcagacgcaatagacttaagaatccccctcatctttgccagaaaggggcggaactcctcgggtggcacctctggatatagctggctccgtagcagctcctctgtgatgccggggtacccgtggaaagtgtccctgggccagcgcattcagcagcccgctcagnggtttgccaccctcaagctcgtgcc

SEQ ID NO: 324022 - DNA, 533 bp, Homo Sapiens
tttttagctagggggacctcaggaatctactagttgaatttcttcattttccagaagaggccctgaggcttggagagggcaagcagcctactgaggctgcacagcttgttatatctgcttgggggtcatggataggggcagaggggctgcagtgagcaatacaatgcaggggaaccttgcacaccacatggtgagttacattcagacccccctgcaaatgaaaacttcccacccctgggctgtttcccgttgatttgtcacagaagtggacaggtcctgggcttgagcttgtccatgggcttccctcaggaggggaggaggaattgcaggagtctctttactttcccagttcgggaggccatctggatggctctgatccactctgtgcgctccttgggggtggctgcttgcaagaaatagtgcacttcatctgctgtgatgatctcaaaaaggttctcttcctcactcttcctgccatttgagttgctctccactgaagtcaccacacagcctctcaagtgaattgctccccc

SEQ ID NO: 324023 - DNA, 546 bp, Homo Sapiens
  misc_feature (346)..(346): n is a, c, g, or t
  misc_feature (524)..(524): n is a, c, g, or t
acaatttaacaaataattatataaatacatcctctaatgtaagaaacccgtatttacgtggggtgtataattaagacatttcttgtttgtttacttaaggcatttgcctggtcattaaagaatacccaaaaccgtgcaatcccatcaggtggcggtcacccctcctcccagggtaagtcaggggtgggagtttacgtaggaagagtcgagggagaaaaaggggttctcccaggtgaaatctgtgtatctgactgcaaacccagccaagtgcagccagggagggctccaaatctcgggttctggaaacgccgcagagtccaccctcctcagccaacagaaattaaancgtggcgggaggagctccccgcacatcaatggaggaaaaggggctgggtctgggaggcttcaatgccaggtactttgttctaagtgagtcatttaagtcccagccaatggataccattaagagttcattatcatgctaatagcaatcaacactgtgaaggggtgggaacctcagcctntcaagtgtcccttcgctgcact

SEQ ID NO: 324024 - DNA, 598 bp, Homo Sapiens
  misc_feature (430)..(430): n is a, c, g, or t
tttcctaaaatgtcctggactgggtggggagggtcagccacctggggtttaaggagcaatcccctccccacaccgacgtgctgaggagcagatgtgtgtgagacagacacaaggggcaaagataaggacaagagggtgccctctccttggaatctgttatgagggctgagggtgtccccgtccagctcctggactctgggggatcttgggtgagatgggggccggaatgggctggggcaggggtgaggctgggcgctcagcctaagaagccatcggggtcatcatcctcaaagtggccttgctgaagcaccttgatgtggtgctcgtagattttcagggctggcccgaggcggatggacaggccggtgagcacatctgtgcgctgcatgagcagcaaagatttgccatcaatttcctgctcttggaaaantgtcgcctgctccgggaatccagcctcagtaaaatattcgacgacatccatcacggtccactcgacgggatcagatggcttctctttgcgcccgggaggacagccaaaggggtcccgtcggccccaggtagggctggctttcctgggggcaaaggcacgggggacggg

SEQ ID NO: 324025 - DNA, 1063 bp, Homo Sapiens
ttatattcttttttagaacaaccaatctttattagaaagttgtagtcacgtttacaataaatatcaacaatataatgaaaaagtagaacaaattagtttccaaatactgaactcctgtaaccaaaacacattttggatttgggaaaacacagtaaacacataccaaaaacacagccacaaataccaaaaacaaaaaccagctcaagtatagggattgaactggctgggaaaacacttattgtgttactgccttaaggaaccccacggagcaccttgtagctcattaactgcacattttccttaggggggaaacaaggtcctctctcagtcacatatgcataaggaaatctcaacccaaaggcccatcaggtggaagggtgatttcttgtttttctgggtagaatacccggacatggtggtgggcctggctgaacctgaggcattagtattatctgcaaaggagcatcaggaaccacaacaaaaagcctcaataagttgaagcataatgaggtttcagccctctaccttgagaggatgacagaatatataagggcatgtcactatttagggcttttaaagctgattcctttggcccacttcccattactttcattactttgtcaggcccagagcacatgaatctccgacctcgagagtcttcatattcaaagcccacaaaagctcgagctatgtcatctcgccgtcttcctcttcccattacaaccgcacttctctttccaggaatagctttatttggagcaggccaagagtttgtgtctaagtctccttcatcttcagctctagtcctgatgacaatgtcccaaggcataagataatttgttcctggaataaagccctgttggtccaaacctgtatgaaagttataagacttagcagggcctagtttaaccaaagaccagctggagaatttgggtaggagacctttagggcaatttgaatgtagcatgcctgggagatactcaactgtggatgcctgtcgatcaacgaagtttggcctcttctcagttttcacttctacttgaccatgaacttctggattacc

SEQ ID NO: 324026 - DNA, 614 bp, Homo Sapiens
  misc_feature (13)..(13): n is a, c, g, or t
  misc_feature (65)..(65): n is a, c, g, or t
  misc_feature (529)..(570): n is a, c, g, or t
aataatcccccantcctcgcaggtctcagtgtcatgctgtcttggggcagggtgaaagggtagtngcagcagggcgcccactctggagatcctcaaaaaaggccctcctctgtggctggcagcctctgacctttccctgggcttcaaaggaaggctatggagtttgctgtgggccctgcaaccttcccagccactcctgctgcactaaggacttaggatccttttatcacaaatcgggattctctcccccaccccgaattctgtctgcttaaactggaatacacaggagcccttcctggcctggatggtgtctcccagcttccccgcccagcttgcccaccccatagttggtgagatgcgaagtttggtctgagttgtgaccccttcagagtagatgcccggcaggctggggttggcccctggagggtcaggggaccatcttcttattccctcttttctcattcctccaacttcctcccctccttcaattatttttttgtaaagttgatgccttactttttggataaannnnnnnnnnnnnnnnnnnnnnnnnnnnnnnnnnnnnnnnnnaatgtaaggttgttttgggggatggagttagaaccttaatgata

SEQ ID NO: 324027 - DNA, 763 bp, Homo Sapiens
gggaagaaaactggcagacctcgaaaagaaaacaaattcagtgctaagaggctgcagaccacaagactgggaaaccacttggaagaccgagtgaacaaatttttgcggcgccagaatcaccctgaagccggggaggtttttgtccgagtggtggccagctcagacaagacggtggaggtcaagcccgggatgaagtcacggtttgtggattctggggaaatgtctgaatctttcccatatcgaaccaaagctctgtttgcttttgaggaaattgacggcgtggatgtctgcttttttggaatgcacgtccaagaatacggctctgattgcccccctccaaacacgaggcgtgtgtacatttcttatctggatagtattcatttcttccgggccacgttgcctccgcacagccgtttaccatgagatccttattggatatttagagtatgtgaagaaattagggtatgtgacagggcacatctgggcctgtcctccaagtgaaggagatgattacatcttccattgccacccacctgatcaaaaaatacccaagccaaaacgactgcaggagtggtacaaaaagatgctggacaaggcgtttgcagagcggatcatccctgactaccaggatattttccaacaagcaactggaagacaaggctcacccggtgcccaaggaactgccccctattttggaaaggtggattttctgggccccaatgttggttagaaaagaagaagcattttaggggaaaccttagat

SEQ ID NO: 324028 - DNA, 541 bp, Homo Sapiens
  misc_feature (274)..(274): n is a, c, g, or t
acggcgtggatgtctgcttttttggaatgcacgtccaagaatacggctctgattgcccccctccaaacacgaggtagttttccagctccttccagggcgtgtcattcagtgagccgtgttaggatagaccagggctcttaagtgtcccagaggagcctgtgagccttcataggggattaaagtaaatgaaaccacaattaactaaccaaagtagttagttttgttttccattaaactagcgggaaatgaactgttgagatgactgcagtgagcngtgttttgtgtggcgagtctgtgtgggaccccgctcttacctaacgcaggtaaacctggggagttgggattgggacagcctggccacctgaaccagaggaagtaagctctgccacgagggcttcatgtgcagtcaggaatctgggcaagaaggaactaaaagtggcttttctcagtttgccttaactgtggctctctgtgccgagtggtgccattcatccttttgttcagtgacgaaaactgaattccatttaactgattggcagca

SEQ ID NO: 324029 - DNA, 379 bp, Homo Sapiens
  misc_feature (181)..(195): n is a, c, g, or t
  misc_feature (204)..(204): n is a, c, g, or t
cattcttcatcaatatttattgggcgcctattatgtgcaaggccttacactaggcgctggggaagatacaaagataaatctgacagactgccctcaaagagcttacagtctagtataggagcatacagtctctggagaagatattttaagtgtaactaacctcccccatcccacccccacnnnnnnnnnnnnnnncctactagnacttggtttcttccatttacttttagtttagcagcttcacggtaaaagggcataaatctgaaagtcttttaaaatgcatacttttactggtaaacaaaattcattttcattagaaaaaatgctgaatatttattgcaattaagaaaaatcttcagccgggcacggtggctcacac

SEQ ID NO: 324030 - DNA, 393 bp, Homo Sapiens
aatttaaaaacaatacaagctgattatacatttgacaaatacaaggaatttctgactgcaggaaaaaacaaagcatcaactacaaagagaagcagaaattcttcttgagctgctgattttactatacatttgggctatattttttcttaagacaatcactacaaagtaataatataaataccttttttaatgtgaaaaggtataaaatctcctttaaaaacttttcacttatccatcatataacatcaaatgtacctgtaatcccaagtatgattcttttgagaaggaaaaaagtcagatcaaatacatcattaaggaaaaacatgcacactaaatagactatgaactctactgggacaaagaccattattttgtgtattttttcattccccc

SEQ ID NO: 324031 - DNA, 479 bp, Homo Sapiens
cactttttagaaaaagtttaataatagcaggttatcatcatatgtaaccataaaataaaaacaataagttaaaatcttctctcaagaaataagtatatgccacacataaaattcattacagaatcttttttgaaaacagacccctttctctgataaatcattgtttgaagggtgcaaatttcaaaaacccacattgtccacaaggcaaagcaaaaggtatcatcacagtatgagtcatttcttgttggcagacatctggaaaacctgtgacttacaagcagctcaaatctagccctaattaaatttacaggaacctttgctctttcaagaatagtcttgttggcatcatgctaggttgctaaaaagagtaatatgtgctctattcacagtaacattctctgtccagtgcttttgaatgaggataaccaaacaggttttcctgaaaaaaatcattaggaggcagattccaatgagaccaa

SEQ ID NO: 324032 - DNA, 344 bp, Homo Sapiens
  misc_feature (287)..(287): n is a, c, g, or t
  misc_feature (309)..(309): n is a, c, g, or t
  misc_feature (328)..(328): n is a, c, g, or t
ttttagaaaaagtttaataatagcaggttatcatcatatgtaaccataaaataaaaacaataagttaaaatcttctctcaagaaataagtatatgccacacataaaattcattacagaatcttttttgaaaacagacccctttctctgataaatcattgtttgaagggtgcaaatttcaaaaacccacattgtccacaagggcaaagcaaaagggtatcatcacaggtatgaggtcatttcttgttgggccggacatctgggggaaacctgtggcctttaccaggcnggctccaaatctagggcccctnatttaaattttcagggggnccctttggctcttttc

SEQ ID NO: 324033 - DNA, 410 bp, Homo Sapiens
ttttgtttgcctcaagctctctttccaattttgccttaatggtaccagagtcagcactttgaccagttttagcatgaagctgcagctgaatagagtgcagctgtaaaagctgatcatgtacttctttctccaaaacaactttctctgcttgggtttctgtcagttcagatttcagatccaccaactgtgcctccagcttgtggttgatttgagacacagactgggctttgtggcaaagctgtgcaaagcaggagctcaggctggtcatcttctgtcgcccctcataagtgatgtccgcttggtctggatcgatctctcccaggagcagatccacatccacaaaagctttgtcgaactccttctccagcacctccagccaccggaacatggataccccgccaggggccccc

SEQ ID NO: 324034 - DNA, 979 bp, Homo Sapiens
  misc_feature (269)..(277): n is a, c, g, or t
  misc_feature (407)..(407): n is a, c, g, or t
  misc_feature (414)..(499): n is a, c, g, or t
  misc_feature (512)..(524): n is a, c, g, or t
  misc_feature (900)..(900): n is a, c, g, or t
  misc_feature (932)..(932): n is a, c, g, or t
  misc_feature (945)..(945): n is a, c, g, or t
  misc_feature (958)..(958): n is a, c, g, or t
  misc_feature (963)..(963): n is a, c, g, or t
cccttcggccccaattttttataccccgggggccattcatagtttggccaatgcccgcccaagggatttcaagtgtccccccaggccattttgggtttgggcttccccgttggcgagaaattttcaatttagcaccaacccttattgaattaataccagggcggggggtaatttaagatcgggcttcatttgatttcggggtcggatggccttcatgcgcttggaaccccaatgggctttggtccccctcttgggttggccccgggggnnnnnnnnnggcggggatttttagccctgggcgaaacccagctttccttagaaacaggtttttcccgggtcccgttcctgccggggccccgtgccaaatgggttgttttgaaaaattttttgggggccgaagcgtcccnaaggtcnnnnnnnnnnnnnnnnnnnnnnnnnnnnnnnnnnnnnnnnnnnnnnnnnnnnnnnnnnnnnnnnnnnnnnnnnnnnnnnnnnnnnngctcataaacaannnnnnnnnnnnnctcagtatgtgcccttgaagattccaaaatgttggagtttctgattctcctgggatcaaaggtaaaagcattgtatggaaacactcaaccttggctcattaccctcctgaggagctaagtctggaggcctcagagagagggagctgacattcacaacttattccaagatgggtaacacagtgaacaaagaattagtaaaacatagactcagtctgtagagggcttcaaatatacatattctatatatataaacctgttatatagggatttcaacttattgggtttccttgtggatttgtaattaaagtaccaaattataaagatgttgcacactgctgatttccccttctcagcccccctccctccccaacataantaaccattacaagggtcaggtgatccctaggnttttttgttggtngtaaatatttggnttttnaaaatcatattccccc

SEQ ID NO: 324035 - DNA, 432 bp, Homo Sapiens
ggttaacaattgtggttttattgtgtccaaccaatgcatcaataaatgaacttgaagcccaagcctgtgtgtgtcctaattccactcacccagccccgggcacctgccccactcacctctggctttgagaaggggcgtgtgtcggtggttgcctggctgcagtgtctcacctaggctaggtgtgcaccttagaagcacaaagcgggcacagttgtgggtaataagcttactctgcaggccgctgggtgtgtgcccaccctcctgagccccgaaagaggacctgtcagctcctgagaggctgctacgggtttgccttgttctgttcaggcatctgaggtaagaaggaggggccagaggaccaccttgtccagccttcaccatgagagcgggcatataaatataaatacaggtaacttataaatagaagtcccc

SEQ ID NO: 324036 - DNA, 322 bp, Homo Sapiens
  misc_feature (56)..(56): n is a, c, g, or t
aaagtaagctgtctttaatttcagaaaatctgctattatacaacaaattatttttncattcataaaaaacagtccacagcattcataaaacagggtggcagaagaaataaaaggacacttttcaggtggattctttaagaacagataagttagcaatttaatacagatgaaaacaaatacaatccatataaaaccagaatctgaatgggagtgggagcgaagatgtatcaaccaaagtaaattcagagttttcacacatgcaactcaacacctgcattctcttcgcttaaaaagcaaactaagggccgggcgcggtggctca

SEQ ID NO: 324037 - DNA, 422 bp, Homo Sapiens
  misc_feature (330)..(360): n is a, c, g, or t
tcctgcaaaattcctaagatttattggagactaggcctcttctctggatccacaaccgtgtccagcccagaatcaggacccccaaacgtgtctgggaccctgtccctttcattctggtctagacaagtccccacacgtggccaaaggacagcacccagactctgcccctgaccagtcaatgtgcagcaaacccacttcagtaggcagaagagtctacccctagggagaaggcgccaggagcaggcaggtgggagggaaagtgttcggcagggcagaaaccctgcctggctgtatccaactgtcactcccactggaggcgctgtgtatgcnnnnnnnnnnnnnnnnnnnnnnnnnnnnnnnccaaggcccagcgacagacatcctccttcggtagcagcagcagcctgtcctcctccagccgg

SEQ ID NO: 324038 - DNA, 1169 bp, Homo Sapiens
tttttctatgtcaaacattttatttggtgtttcatgctatgttgatttaaacaaattaaacaagtttgttgaacagctttcttttctaatataatgactatgtgtacatggacaactgaaaacagggaaaacccccaaattaatgttttcacaaattacaagccattactaaagaccatatgcctggattaaaaaaaatagtccaatagatgaagtctctcattcaacctagcagttcaaccaatttctcttttaataaatgctgcacattacagtggtataaatttatcttttttaacactccacataaaaacatgtgcatcctctccttctacatttaatcattagtagtctctaaaatggtaaaataaaattgaatttatattagcaaatgaaagtgcaagtttgtacagctaggctcagcagcaaaagtgaagaataagaatgaaaggtgaaaagctggtgggatgccatgcagagcgaggacttccataaaggtctgtgccctgcggccaaacacagtcaacacaccaccattttcttgttgctcttaaatgaggcaaaaccaaatttcttttttatttaatgaaatattaaatctttatttccccctaacataatttgtgatcaagtaggacagaggtaagtcccaccatcactggggacagtagcaacacacagacttcagaaacagccttgaatcatcagtaacatcctcctctggtaacgttagaaggaatgcatctaatgacaaatttgcaatgttgtcacattgttctaatttatttgattagtttatctggaaaaactttacacattattgaagaccaacagtaaattattttcttgctctgaaaaaaataatgttttttcacattttaaaaccttttagtatgcttttgcaaaagtagttgcaagaatatgacagctgggtttgcagaatgtccatgtacaagtttgtatttataagaaactggtaatctgcctataatttgcctctacaaatagagctctttaaaataatatttttaaaaaaacaggcttaaacttttccctattcattctacttgtagcaaagaggtacttacttttcaagtattacatggtaaaaggcacaagcttgtttttgccaattttaagctgttaagctttaagaccaaactatgtga

SEQ ID NO: 324039 - DNA, 744 bp, Homo Sapiens
  misc_feature (46)..(46): n is a, c, g, or t
  misc_feature (52)..(52): n is a, c, g, or t
  misc_feature (85)..(85): n is a, c, g, or t
  misc_feature (222)..(222): n is a, c, g, or t
cccgtgtccctgtgtgcccaaacacagtctaacattcccatcattntcctcnattgctcttaaacgagcaaaaccaaattccttnttcctatttaaagaaatattaaatctttattttccccaacataatttgtgatcaggtaaggcaaagataagtccaccatcactggggacagcagcaacatacagacttcagaaatagccctgaatcatcagtaacantctatcgtggtaacatcagaaggaatgcagctaacaaattaaatttgtaatgttgtcacattattctaatttatttgattagtttatctggaaaaactttataaatacattatgtaagagggcagtaaattattttcttgctttgaaaaaataatgttttttcacattttaaaacattttagtctgcttttgcaaaaggagttgcaagaaaaatgtgacagctgggtttgcagaatgtccatgtacaagctgtatttataagaacctggtaatctgcctataatttgcttctacaaatagagctctttgcaataatattttaaaaaaacaggcttaaactcttctcctattcattctacttgtagaacaaagaggtacttatttttcaagtattataaaaggtaaaaaattttttttgccaattttacatgttaagctctttaagacaaaaaaatcatgcctagtcagcccatttcttttataaccaaattctcttgtgctttaaagaatgcagaaaaatat

SEQ ID NO: 324040 - DNA, 960 bp, Homo Sapiens
tgggcgtttgaatatcctcccattttattttcctggcatcctggttgagcattttctaaattgttctggattttttctcccactagtttctccggctagcagaaaggctcatcaagtttgggcacgagtctcggttaagtttcctgattgtaaatggtatattccaggggctggtctcattttatctcccttctgatagtgagctagtttttccttttcttcctttagagtatgtaatctctcttcaatgtattttaacaactcgttgattttttcccgtttgccttctgtttctttcattaaggaagatgctttcttcctttcgttcgtcatacactctagtaccagctacttctcttaatagctttaatctctgagaatctggtgctgttgccatctggttgatctttccttgtttaacaatataataaggattgcttcgagaaaaaccagcgctttcaaggaggttcatcacatcatttttcgtgaccatcttcttgtctaagaaatactgatcctttttggcaccaataactcttcgaagtgaaacttcctctttatcgattggtaaccggttgtctgaattatcaaaaataatctccacaaaagcagaaataacacgaggaccagtaccttcatgcaataaagccaaccgctgttctggacgaagatgactaaactcatcactgagaacaaactgaattgcataaaaaaagttactttttccagatccatttctgcccacaatcacattatgttttgaactgaagggatctacaattgtttgatctctgtaacttcgaaaaccctggataatcacctgctttatgtacatgattccgggcccctggcctggaaggagacctgccccggagcagcaaccgcacggccgcagggtcaggtgaggcgcctacgcgacccctcccccaaagcgccgctcgctcccctcagccaaacccc

SEQ ID NO: 324041 - DNA, 1509 bp, Homo Sapiens
ggtaaacaaaattcacattttatttagattgaaataaactatacaaaattgattttcttcaccaaaaataacagcaatattttccatatttttctagataaaccacaacacttattttgtaggttttccaggttttgcttataaatcaagatgaggcagtatataagagtcatggaaaaagacagagaaaaaaaacagacaaatcagttgtcagtatccatggcctctgattctgtctcaaccatgaaaacagaagtgttcaacatatacctgctaaaaagcttaggaagatgtaggctccacaaaggaatgtaaacagcaacgagatgtggaacaacagcaggcttttccattcaaactttgtcatttgtttctttaagttcaagaaagacaaaatctacactgaaatccttgtttggtgagctcacaagcttttctccggtaatttcttgtaacctgtcccagtatagatttttaacatacttaaaactcctattagtcaaaggtcaattgtgggcttcactacaacattttataaaatgtattccttcctcccacacctcttcaaaatatatttcttcgaagaaattccataacacccaaccaagtagagatccacagtgataataaatgctatgtctaaaatgacttaactgaaacaattccagagtgccatcaacagagatcacgcaaaagggaaacatggcactttcaacgttctcttctggaagaacaggtaggtcttccaaagcttgagagttcaaacaggggccatttaaacaggtagattatcaatggctaatgtattcaatggagtcctataggcaaagatatttagtgattaagtggtctacatacaccttacggctttttcttccaaatatcaaatataagaaagcctatttttaaaagtctcttaggtattttccacagtttcggaattatctgtaggaagctctgacttacttgtatagagtttaatatatgtgtccaccattaaatccaggtcgtgttttatatcaaaatttatgttaagcaaagccaagttacttgacctttggtgtgtcaaagtgttcctcaaatatgctttaagacgctttcgtccattttcataccgctcattctcaaccttcatcacaggaagaatacacaggaccttcagcaatgcatacacattaggaaaaaacttgatgtcaggcaggtggagggcttcatagatggtggacggaagctctatatctttccccctgtgtttccatttgattctccaacaatgaagctcagctgacagcgtgtcaggattgggtaagtcacttctatacatgtcagcatggtgttcctccgacgtattgaatttgagttgtcccatgactgagggtaccagagataagcatttaagagctttgaggtgctgttctgagaatatatctttaagttcctgaataatgtgctccactgttgggacacttagggtttctttatagtaactctcagaggttagctgagacc

SEQ ID NO: 324042 - DNA, 1714 bp, Homo Sapiens
  misc_feature (20)..(20): n is a, c, g, or t
  misc_feature (1004)..(1004): n is a, c, g, or t
  misc_feature (1030)..(1030): n is a, c, g, or t
  misc_feature (1135)..(1135): n is a, c, g, or t
  misc_feature (1239)..(1239): n is a, c, g, or t
  misc_feature (1317)..(1317): n is a, c, g, or t
  misc_feature (1461)..(1461): n is a, c, g, or t
  misc_feature (1466)..(1466): n is a, c, g, or t
  misc_feature (1486)..(1486): n is a, c, g, or t
  misc_feature (1513)..(1514): n is a, c, g, or t
  misc_feature (1527)..(1527): n is a, c, g, or t
aattcagttaatgccaaagnctgtcagttgcccaaatatcttgatcctatgagtgtagttgatgactgttagtcagtagagtaaaatgctgtgtccacggggtgtcacagcctcaccataccctgttgaggtgtgaaatgccccgtcagaaattaaatacaaacttaaatgtgcctattggtgtctaaacttcatacaatgtaaggtcagattccttttaggaatactgggtgctgtcaccaggtttgatagttagacttaaaaacttgaaattcactttttggggggagggatatactgaaatagagagttgagacttgccagttgggggaaaatagcatttaaaatggaaagctgtgtttggaaaattgtgtatgagtatttttgtattaaaaacattttaaaggcttttttcttaacttaaaccgaaccacgctgcagcccgcgcttactcccccccgtgccggtgtctctcctactccgcattaccaccctcctccttccttttacctcggtatcccccgctcctccgccgccccattgcttactctagggttcgggccgccccccggcccttctaaaaaagcttttctctaaaacaccttcttgttttgggggcccggggcgcccctcaccctgaggtccacccgaaccctgtgcccccactatcctctgtttcccctccatgaagatactcctcgcgcgcacatcagaacaaagcccgggctgtggtatttctctccacaccaaatacaacagacactgggccgccgcgggaggcgagaaactcacaacgcgcgctttcttcgcaccacacacttcctcacagaaatgggtggaggctcctcttcgaggagggtggttatctgtctgcggcgtgtgtctttctatcttacaccacgcggaggcattctctccacagcgcccggcgtcgcgcttctcacgtttatcatctcttatattgtatatgacgcgctcccctccgcgcgcgtcgtcttgtccancatatgtctcacccgcgagcacccgngatgttgctgtgtctcggccagccttcctacgtatatataagacccacatttgttccgcgcgccacacatctggtgggagacacgcgtgctacactctacacacnaacacgctgtcgttatctgccactatacacacacctcctttaaataatattctcgcgctcgcgccgcgcgctccatctcgtgtggcaaccatccccgtgtatangcgcggcgttgcttgtctgtccgcgctatactcatcaatatccacatttgtcgcgtgcgcccgcgggcgtgtcgccantgaatcacacgcgagcgttgtgtgggtgtccacgtcgaccgtagagcgcgctcgtgttacatcacttcttgttgttgcgcggctgtcttcacccgacgcgtctcgtcagatatctctactgaaatgtggtgcgtgtcgcggggncgagnagacactcttctttcgactnactctacctgtgactatatatgtgtgnnctcgttccgcctnactacgcatttagcacactatccctcgttagtctctcgtctccccataatacgagtaccacgcgctcgtctgtcatatcagataggatacatagtctggggcctctcgtatgattcatttcgctcgcccgccacgagtaacaatcttgcgttcccaccctccttcgtccctctgtcgttggaaggcc

SEQ ID NO: 324043 - DNA, 412 bp, Homo Sapiens
  misc_feature (375)..(375): n is a, c, g, or t
taagaaaaaagcctttaaaatgtttttaatacaaaaatactcatacacaattttccaaacacagctttccattttaaatgctattttcccccaactggcaagtctcaactctctatttcagtatatccctccccccaaaaagtgaatttcaagtttttaagtctaactatcaaacctgggggacagcacccagtattcctaaaaggaatctgaccttacattgtatgaggtttaggacaccaatagggcacatttaaggtttgtatttaatttctgacggggggcatttcacacctcaacaggggtatgggtgagggctgtggacaccccgtggggacacaggcatttttactcctactggactaacaaacaggncatcaactacactcataggggccagggtatttgggca

SEQ ID NO: 324044 - DNA, 698 bp, Homo Sapiens
gggaggaggaggaaagttggagcaccagcagtgaccttaccatttcaataagtgaagatgatctgattttagagagcccagaaccacagccaaatccaggtggcaagatggagggagaagatggaatagaggccttaaaattaatccatgctgagcaagaaagagttgccctatccactgaaaaaaattgtattttgcaaaccctaagctctcctgattcagaaaaggaatcctccactaacgcaccaacaagagaacctggacaaacaccagactcagacgtaccgagggcacaggtgggtcagcatgttgccaccttgaaagaacatgataattctgtcaaagaagagaaacagaagcctatcagttgctgaagaaggccacccttcaggataatacaaatcaaactgaagacaggtttcaaaagacagatgcttctgtgtcacacttgtcaggtttgaatattggcagcggtgcattcgagacaaagacagctaacaaaattgcttcggaagctagtttttcatctagtgaaggaagtcctttgtcaagccctctgggatgagtctgatgacagtaactcagaaattgaggctgctttacgccccagaaaccataacaccgatgattctgatgatttttatgactaacgtgctgtgacatttggtttcaataaagtcttttaaacaaacccaaaa

SEQ ID NO: 324045 - DNA, 513 bp, Homo Sapiens
  misc_feature (384)..(384): n is a, c, g, or t
  misc_feature (430)..(430): n is a, c, g, or t
  misc_feature (446)..(446): n is a, c, g, or t
  misc_feature (465)..(465): n is a, c, g, or t
agtttgtttaaagactttatttgaaaccaatgtcacagcacgttagtcataaaaatcatcagaatcatcggtgttatggtttctggggcgtaaagcagcctcaatttctgagttactgtcatcagactcatcccagagggcattagattttaaattgatcacgggtttctttttgttttcatgccttgacaaaggacttccttcactagatgaaaaactagcttccgaagcaattttgttagctgtctttgtctcgaatgcaccgctgccaatattcaaacctgacaagtgtgacacagaagcatctgtctttttgaaacctgttttcagtttgatttgtattatcctgaagggtggccttcttcagcaactggataggcttcntgtttctgtgattggggataatctgcagccacattttcctttcctngccccttggctccaanagccaccttgaaactcctnggtcccctggaaggaaaccggttgaggccaaaaagcaagggttgggct

SEQ ID NO: 324046 - DNA, 820 bp, Homo Sapiens
  misc_feature (468)..(468): n is a, c, g, or t
  misc_feature (470)..(470): n is a, c, g, or t
cgcgtggggagctcccgtgggggaaaatagccccagtgaagggtccccaaaacactcccaacggggagtttttttccagagacgccctcggtttctcggcgcggggggggttgttatttggtggggggatccccagccccctagtcacagaacccagggattccctacggaaaaccagctttggccccatggtgcgctgtgcctgttggggcccgggggctcccaaggaaatggttatagaaaagtttcttgagggccgaaggcggcccggacatgtttgattaggttgctggttattccacgcgcaggagatgctgatccctctcccaggtgaatcctggcccaggcctttctgacaatcctggggataccctggggccagtatagagttcaagggcagaccagactggggggaggggttcctgagggaccttggaaccagcatcaccagcacagtcagaattgcancnccatgtgaatccttgtcagaggaactggagccatgatactggtttagagcactcgtctatttctcccaggtcccaattttcaggtctgcttttctttgtttttctttgttgctccccgctcctaagaaccttcggctgggatgacattcttcaggtgcagaaaccagggggaagctcccagagcagtgggggctgaactcaggacacagtcatttttgctgttaagtctctcctgcggcgctgaggaggcaggctcaaagtaaccaaccagagcagccgcagagggaaaagctaagacagttctggtccggcccagcgcttctcaccctctagctctctactctccgccg

SEQ ID NO: 324047 - DNA, 793 bp, Homo Sapiens
  misc_feature (160)..(160): n is a, c, g, or t
attgggggaggaaatcccaagcccttagttcatggccaagggattttcctagggaaacaggtttaggccccatttttcccttacctaagtgggccccgggggcccaaacgaaagggtttagaaaagttttttgaggggccgagggcggccgaacaagttnttttcttttacgtgggggggcctggcgccattttaaaatttatttaaagtcttggttgttcaggtcctaggggttccaagtccccagtcaccttgaggactcagacatcaggaattcagtccccagcccagagatcaacgaaagaaagacaacttttcttggagccaggcctcagtgaggtcatcagtggtgcggatttcgaacacctttgtgagctctgctgtctgcaccagcctgtttttactccctgcatacatcatctgttgttccggcttgcagcccacagggctggagaagatgaaacacaaagggtaggacactcggccatcgtcatgcacgtacttgtagctgtaaaccacgaacctgggctgtctctccggcaactccattttgagctcctctggggaaatgttctgaaattcttcctccagcaccaccatctgccggtctttgtccaccttcattatgatggctgcattgtctgtctcttttcggaagcggaatttcctcagcttttctgttagctctgggtctacctcgcacaccaccagggagtcagacatgattgttctgtccacaggcctcttcttttcttagttccgctgtcttctaggcgtggggaccggggctccc

SEQ ID NO: 324048 - DNA, 1146 bp, Homo Sapiens
  misc_feature (364)..(376): n is a, c, g, or t
  misc_feature (681)..(692): n is a, c, g, or t
ttgatgggcaaacagtgggtttgtgggggccgcgcctgtgggagagaggcaaaaagggctgggtggccaataattacccgtgtgaaagaggggggtgtatcgtgatgaggggaggggtatattgtcgtgtgtaacataatcgcatccacgccgcggcggggaatggtttaccagtccaaggtgtggggtgtgtggagagctattttctcataaatttgagggcgcgccgtggggggtggggcccctccgtgggtattgggcgccacgggggaaaaaaattcctcttacggccgacccccctcctaaaagtgtttctggagggaaccggttggtagtatggcgcggggtgcgattatatttaacnnnnnnnnnnnnnaccttcccacctttttttcaagaagccggtgatatttaattttggaaacagaaattttgagaagaggtttccctgtgcgagggggggaagcccgacccccccagaccaaagttggagaacaaaatttttttaataccaaaaaggggcccccaaaactttcatggtgggtttgttccggaacactgggggttacccccgggggggtttttattggtgggaattcaaggctttggtcttttgcaggattttttttggaagcagtgtatgaccattttcattttctttttggtggccgttcttctaannnnnnnnnnnnggtatattaaacagtttatttcagtaacattgtaaggcaacaattaatcctcagtaagtcagcaaaccagtgacaagaaattgacaaacactccttctacagcttcctgagacagcaggctggcttgtggccccctgggtggtaacatcttaaggaatcctatcatgtttgtttatatatgctaaactgtaaaaacaaacacttcatgcgacaatcattcttaggtcaaacacaagaacgaactattttgaaatcaattcctcacactttttccctgaatatgcagtactgtactactaacatctaattctgtagaaaataatgcatttgttagtgactttgttagagcttgaaaagacccttttagaaattatttaaatgatcactctttaaaaattttttttaatctcagaatctactaatgtgacagacaaacgttatgcttaacagagtc

SEQ ID NO: 324049 - DNA, 406 bp, Homo Sapiens
  misc_feature (153)..(153): n is a, c, g, or t
  misc_feature (392)..(392): n is a, c, g, or t
aaagctttttattatagacattttcaaacatatacaacagtaaaatgaataatataatgaaccctcacacctccatccctagtaactgattatccgtgtgtggcttactctttgatcgatactctcctgctttcccctagcccccacagttangactgtcccgcagcaaagcccagacagacatcctatcggtctgagaattccttatcaaaagcttcccgaagaggaactctatataggggcaggactaagtgtgctgggctatagggtctgcaggaaatctcaacccttggggaggcccttggggtgggggcctggggcagggtccctggggcagtagccgttctgtaggtggggcgggctcatctgctggaacaacagtatgaccggancaaataggcatttt

SEQ ID NO: 324050 - DNA, 1058 bp, Homo Sapiens
tttaaagctttttattatagacattttcaaacatatacaacagtaaaatgaataatataatgaaccctcacacctccatccctagtaactgattatccgtgtgtggcttactctttgatcgatactctcctgctttcccctagcccccacagttagactgtcccgcagcaaagcccagacagacatcctatcggtctgagaattccttatcaaaagcttcccgaagaggaactctatatagggcaggactaagtgtgctggctataggtctgcagaaatctcaacccttgggagcccttgggtggggcctgggcaggtccctgggcagtagccgtctgtagtgggcggctcatctgctgacaacagtatgacgaacaaatagcattttgtacccgcactacaatgcaggagaacgccaaacaccgctttattgcattcaaaccttctaaggcacgtcagccagccctggcttgtctacagccatgattatctcccttaaagagttaactcctaaaaaaatattaagctcaagaaataacagctcaaatactcctaactaattaaaatcaatagtgagaggcagaatacggtaaaagataacatattagtattattgatcacagatcaatttcagagtacttaaaacaggaataatcagctaccacatcttgaaaaatacaaagacttgatcctaaccttttatttatcatgccacacggactgagacagtccccagtacctgggtctaggagagttattttatgtttgtgtttctgggaatttccgatacttcccagtgtatcagagtgttcccctcacacatgctagcaggcatctccccactaatggaatagcaagagtggtgaacagagcgatcctctactttctcatcatattctgcaaaatgagaagtcagatggatacaaaggttcctccagctctaggactccagggttgtgtggcggccctgcaaggctaggttatgtaaggtctcaccattgcaaacagaatggttcaagacgagcaaggatgcactcctcaatttacaactccgaaga

SEQ ID NO: 324051 - DNA, 600 bp, Homo Sapiens
ttttttgactggtgaaactcaactttattaaacttaaacagagaagctacttctgcacatgttaaacacacatggaaccaaacagctcgatggagacaccctgcactgcttatggtgatgctgcaggaatggcggcagcgatgcccgctacactccatggcctgctgcacatgtgacaggacagttatttcatctatgcttacacctgcaggtcccttaccctagaaacactctatatcttcttaggtacttcccttgaaacaggatgagttctagaggaaataaaactgctgcacttacaaacctagaaatattcaggggaccaagattagttgttcagtgacctaggaaaccttagaatcctgtaggttcctcaggagaggtgcttccaagtacttgagaatccacaggcagagatgcttccctttccatggtggatgtgtatgtcactccaggacaaactgcggagtcacggagtgtggaacacatctggttgtgtacagtacactatcccagaggaaaatcacaaagcaacacaactctgcagcaaaaactagtcccaaagtcagaagataaaactagcaaaaactttgcacaatc

SEQ ID NO: 324052 - DNA, 873 bp, Homo Sapiens
catcatcattcctggaaatttcttcaccagaaggaaccccactgtctggaaagttgtagaaggcatcagggttgtccaggaaagggtttttcagcagttcccatccactgcattcttggacatgtctccagcaggctgcagatacccttcattgagcagcgatgaagcaatcatgaggccttcctggcgattcctaacagactggttggataccagccaatcaatgacgcagttacctgtgaagcagtgattaaaaatcttcttgtccttctctagattcagttcttttattcctttttcagtgtctttcatggacaaatataaggcacctaagtcaatggtttctggcagtcgaatggacctcctggtagatttcctggcaaatttctggcctccttcaatgcatttaatggccttcttgatatcccgaacccaggcatctctctcctccaggaaggctgcctggaagaagtggtcctgctgtttggtcgtagtgatcttaaacacaaacatccttttgccaaagtcttgacaagggctagtcagagtgctccctttcagcgggatcattcctttggggctgttgtcacttttcttcttatagaattcaattccatcttctaacaatacaacccacatgggtttccacgtattgaacacgctccccttcttcacaaggtagccctctctgatccgctttggttccatgctggctggacaggcagatgcaaaggtcactctcaggcaactcctctcagcagctgggcctcctctgcatgctgaggtggctgtgggccgccttttctacagcaggtcgctttcacaatttcccttctgctggcggtcgcatgatcacatcctcttcccctcccc

SEQ ID NO: 324053 - DNA, 1141 bp, Homo Sapiens
  misc_feature (135)..(253): n is a, c, g, or t
  misc_feature (319)..(336): n is a, c, g, or t
gggggggaatcccaccccttgtttttccccgggttttcttggaaaccgattttgccccttttccctttccttgggggcccgcgcccccaaaaaatggttttaaaaattttttgggggccgaggcggcccacaaannnnnnnnnnnnnnnnnnnnnnnnnnnnnnnnnnnnnnnnnnnnnnnnnnnnnnnnnnnnnnnnnnnnnnnnnnnnnnnnnnnnnnnnnnnnnnnnnnnnnnnnnnnnnnnnnnnnnnnggggtgatgtgaggagaaaggaaggaaataccaggtaagagaaaagggctggagaacaggtgaccnnnnnnnnnnnnnnnnnnctcaaacagcaagtactgtgggtctgataccaggttcacctgaagggtacatcttaacagcatccagaaggctttcttttgacaaatcacacgcaccaccgcatcaggtgggaggggtctggccatgcggctcaagtgtccaggtggagatgaatgtgtggctcccgcaggcctgaactcacccaggaatggcttggcaaggagggccggtggggacagagagggctcatcccaggccccacaagcagccgcttgcagtgggagaaggaaaagcagacaagaagctcaggtagggaatgcctggaactgtcgggtgggcagcccctggggaagggactcaagcataaaggcttggggataaagagggaaaagaccaggtgagggcaggaggggagctgctgaaagatgcaggtgaacagtaaagcacctttcagtaaaactgccctttcccaggcagctctggggtgggcgctgttggtaggaggccgttctcccgcttccttagaattgtgagagcagtaagaagttacttcagcagttcctaagatgctccttccccatgttctacactagacacagagcttagagcccaagcctgagcgctgtcctgcacccgtgagacgctgaaggcagcctctggtggggggtgcatccccggccccctcctctaggtgttctgagccaggctcctctggaggaggaggtagacgctcagtgacccctaagaacagctgagaaacctgaactgtccccttccctttccttggaatgacagaatctggagtgatttccttgtttcttaccc

SEQ ID NO: 324054 - DNA, 765 bp, Homo Sapiens; identical to SEQ ID NO: 246307
  misc_feature (500)..(508): n is a, c, g, or t

SEQ ID NO: 324055 - DNA, 287 bp, Homo Sapiens
  misc_feature (57)..(57): n is a, c, g, or t
  misc_feature (255)..(255): n is a, c, g, or t
cgtgaccagctgaaccaagtctttttaaagtaacttctgcccaatcttgggcagagntttctgagcaaatctgtgctggtgagtcgcgaaacagcagccctggctctcttggtggtccggtgtgtggtggggtcagtaattcacactccgcatggtggccatggtggtggccagggcgacggggcaggcctttgctgacctgtctatagtcctcaggcctgggtcttcagtagcgtcacgatgtgctggagggtncgggacggcttcaggcccagggattccatcac

SEQ ID NO: 324056 - DNA, 603 bp, Homo Sapiens
ggcatgaagaaatagtatcacaaagattaatgttacttcaacaaatggagaataaattgggtgatcaacacacagaaaaggcatctcaactccaaactgttgagactgcttttaaaaggaaccttagtcttttaaaggatatagaagcagcagaaaagtcactacagaccaggattcacccacttccacggcctgaggtggtttctcttgagactcgttactgggcatcagtagaagaatatattcccaaatgggaacagtttcttttaggaagagcaccatatccttttgctgttgaaaatcaaaatgaagcagaaaataccattcaaaatgaggcacagcgataacttcttcacatgctatttcaaaaagcctgtttaataaagctgaatgttaaggtgtatgtaggttattgcaggaactttaggaattaaatatgttcatattcttcgattatctcctaagtgacagtgaagatatgagaatttactggcaagtcacatgttatcacctactactatttcaaggtcatgtatttgctttctaccaaacccatagatgtgttaaacacgaatattaaaaggtggactctttattaattaa

SEQ ID NO: 324057 - DNA, 1125 bp, Homo Sapiens
  misc_feature (454)..(454): n is a, c, g, or t
  misc_feature (460)..(460): n is a, c, g, or t
  misc_feature (998)..(1036): n is a, c, g, or t
  misc_feature (1115)..(1115): n is a, c, g, or t
cgggattttcaggggttttcatccactatccccccttttggtggaaggggctttccccagagtcgcgcccaggaaaaggcctttaaagggaaatttcccaccccaggtattttccgaaatggaagtggccaggggcccgggggccgttaaattttgaataatccaaggctctggctttgggacttcccctgtggaataggattcccagtaaatggcccttcagggaacttccaatccgggaatttggttcaagaaccgcttcggttttccccccccggggcgtttttttatttgggtgaggaattcccaaagccattagtccatgtacccagggatcttcctagggaaaacaggctatgggccatgttccacttaccctacctggggcccgcccggccaaaaggaatggttttagaaaagtttttcgagggccgagggcggccgaccaaggganggtttncttcgtcggggttgctcgggtataaaagtctctttttaagtttttaaattaaaatttcgccctggtgagatgggattctgattcgggaactaaacccaaaggcaggctctccactttggacctggacacgcagcgggaggggcagtcaagtcccctgctgggcagagcctggcctttgaccaaagtcagctcctcagtgccacatcagccctgcacattcagcaggagacaggggtgatgagctatggggccacaaccagcaatcagaggtggggaagaggccatggggagagagccctgataccaagagggccttccacagctttgacctcaggccctcctgggacctgcagctgctatgtggctgcccggtgactgcaggagtggtgtcctcttccagattccagaaggcatggctgttaaaggaggcagctgacagatgccttgtgcccacaacatcactccatcagctctgcagcatggcagccctacccccgagcaccccaggtgtgccaggcccattctcacgcacattagnnnnnnnnnnnnnnnnnnnnnnnnnnnnnnnnnnnnnnnaaaacagaggaaaaacttgcctgaaaaactcctgaaggacccacgtggcccaggaagtttactgtccccccgacccacnaaaattcttt

SEQ ID NO: 324058 - DNA, 815 bp, Homo Sapiens
ttggtggggggggcattttattttaaagttttattatgaaaacacatggaattaacggtgttatccatgtatttgcaacagcagagaaagagtgagagtggaccatccccataggggacacttatcctttggctaaactaatataaataatggaaataacacctaatacaataatacagcacataaaagagattacattaagagaagagacaggaactgcggagaggagtcctgagtatggaggagatgcggctcatggagaagcatccaggctcaggtgaccttccctgaagacttcctgtctctgagcagctcagttcagttccaggtcatacacgtactcctggacccaggactcactggggtcagcgcagacttgcttgcctcttttggtttggaataccacagctggctgggagcagaggctgctggtctcatagtaatctaccacaaagttgcgaggaagcttcctcgcggtgtaagaaaagcagcaggcggtgggagggtctgagcccattggtgctgagagtgctagagagcagaaggcagctactagcacgaggagagacaggacagtcacgcagagcttcatggtattggtggcaaagaggttttctcagaggtgaggctgcagaactcagaagcttcagaacctagctgtgtcctgtgctgatactgagttgggaatctctctttatagggactctgaggcctaggacaaatgtgggggcacaggagagtgagtggaatttccatggtagagatgatgtcatggctcctgaagctagctgagtgaggagttcctctcagcttct

SEQ ID NO: 324059 - DNA, 991 bp, Homo Sapiens
  misc_feature (52)..(52): n is a, c, g, or t
  misc_feature (118)..(118): n is a, c, g, or t
  misc_feature (432)..(432): n is a, c, g, or t
ttcagaattcaggaaagcttttaacccggaggttttccccaatacatacggncaacgatccggtaataaaaatccaatatcaaatattactttgtgagttacaaactccaatattaancatttaggccctttttaaaaaatgaaaaaatatttctattacaggcttatttcaagcattttcagttagaaacagctttatatacttttactcacgatagcgaaagaatgtcttcataagtatctgtaggtaaaatatattacttgcttaatgtttgcactctgaagtatactttgacacatacaagttccgataagagaatgaaattgctgtggcaaaatcctggctgatgatcaagacttggagagttttcatattaagttaaaaaaaatttacatcaatgaaaaaaagaagcaaaggccatacaaagaaancaccatcattcttttgcaatgaagcagtctaattccagggaatgggttttccattttgaattcaaaagtgtgtggtcccaaagttgaattctttcaaatccaaggagctgcctgccactgtgaggcaatagcaatgatgaagcaagttgggagtaaagtgttaactgaactacagagatggtcactgataaaacaagttcctagaagtcctcgggcccacctagaggtgaagggcagccagaactatcaacacaaaagaaaaatgcgctcactgaactgcacacatagagcttctaggagggttaacagtccttgacataggttcctggttgtagtttacaatatctgccttcaccaccctctgcactactgtactgaacagattctactctgagtagaggtggtatgttgattttcttcttccgggtacttcactatttctgccctgacaatacgctgtgactgttctatttctgctttgtttaatttgatcccaaggatttcagcagcaactttctgaaagcacaggaagacagagtctcctgtcttggctgagacc

SEQ ID NO: 324060 - DNA, 824 bp, Homo Sapiens
  misc_feature (205)..(219): n is a, c, g, or t
  misc_feature (242)..(242): n is a, c, g, or t
  misc_feature (247)..(312): n is a, c, g, or t
  misc_feature (315)..(315): n is a, c, g, or t
  misc_feature (318)..(325): n is a, c, g, or t
  misc_feature (327)..(337): n is a, c, g, or t
ttaggcgccggctatggtataccgcggggagatgcctcccgatggaaagagcgtgaggacactccgctctgcgatttttttgtgggaggaccgcccggtggccgcagagggtgtatatattatttctcgagggtccccaccccccacgccaatcccccgaagtttttttggggaacccgattttgtcgccttttgtgttttggtnnnnnnnnnnnnnnncgaaggaagagtttgtgaaaggnttttnnnnnnnnnnnnnnnnnnnnnnnnnnnnnnnnnnnnnnnnnnnnnnnnnnnnnnnnnnnnnnnnnnggnggnnnnnnnngnnnnnnnnnnntcgaagcaaaatacagtacaaatttattgactccaatcattcttagtcaacatttaagcaaactgtagacaatggaattgaatacaaataagcaatggattaacattagatagaaatcctattttaccatgaattttcagttcgaaaaagcttattcctaagtaaaatggaaaaatgacttactctgctaaggcatatgacaaaatacacagaattataaaaccattcgtttttcttttaaccataagcatatattcaatggaaaacttgaaatagccttggactaatgttctgaaaactagtattaactgagtataactggtgtgaaaaatctggacagcattaacaaatgaaagagcactgaattctgttattttaaagatttacagtaaaatactttggttcccaaaagactgtctctaaaaggaatttttaaaaacacctgacattgtaactcattttttctcctccagaatctaaacacccc

SEQ ID NO: 324061 - DNA, 346 bp, Homo Sapiens
  misc_feature (46)..(46): n is a, c, g, or t
ccccccaaaggagccccatgcctgccccggcttcccctgagtcatnttttcccagcatccctgtcagatcccctcaatgtactgatttcccccttgtgttaactataccgatattatttttttagcaattgaaatgcacttttttatttcaactcaatcatgattttaagtataaaaaatttatagattgttaaaactacttttttgtgtatttttaaccactcaatgtagcattgtatattttattcttgtgagactctggtacaggtgtgccgcctaatgatttttctgagatgctgggcctttggatgtgtacggtaaccaacttaatgctaatgttcaaagt

SEQ ID NO: 324062 - DNA, 395 bp, Homo Sapiens
  misc_feature (251)..(251): n is a, c, g, or t
  misc_feature (356)..(356): n is a, c, g, or t
tcttgttgcataggaaatgcagtacttgcttccagtaattgtattgtaatgtgagaaggtggtagcactaatggttgaatacaagagttaaactaatccacaccagctcaaaaaacctgtggagatttagttgaataagaatggacgcccacagtgattctcaaccaattacaaattttcacagaacacagtaaaactaaaagggtaactatgagagtcaatacaagtatactagaggcacagggggcccnggctcataaaaacagatttcagacccaagttattaacacgggggggtgtttcgtttcataacaggtcctcttacccatcactggggaggtggttcccatcccctnccccctaccaaatttgaaatggggaaacaggggggtatt

SEQ ID NO: 324063 - DNA, 1069 bp, Homo Sapiens; identical to SEQ ID NO: 138527

SEQ ID NO: 324064 - DNA, 1010 bp, Homo Sapiens
  misc_feature (961)..(961): n is a, c, g, or t
atttttgcatttgcttattgcaatactagttaaaacaccagtttataattttttttatacattcagttgttcaacaaatgattcttttaatctgcctgaagtttcaagtcaacacgtcactggagaaaatgtatgaaactgtagcactaatttctgaaacgaaggattgaagttcctctttccaacttctttcagaccatcactactccacatgttcctgctcttgtcctggaattagccaccgaatactctcagttcgaatggtagcatacataataaaactaattaaaaagaataaggaaaatacaagcaaccagtccacactttttatcaaagtgctgggaagagggcctatttggtcggcttgagttaccaccacattcttcttggcttctatacctgtctgattaaaaatgaagattttcagtgtttccagtgttcgatctgtatgattaaatctggccattggtttagctccttgaaataataaaatattaggaacagctacggtgccaaacctggtagaaaggctgctgtgctgagatgcatccagtgccaaaaagtgaagagctggaaatgcccggggcagagagttaaagtgaggggccaactggcagaaaagcggcaccacggggtgtaaaacaggactagagtacagtcactaccgtttgggttcagaaaatccataaggtcctgtgaacatatttaaaattttcaagagtgaaaattttctaaatcctgtaatgtttctctccctcacagttcacctttggggatttccagactttcagtgttaattggagtcctctgtcggggctgcgtcagattccgccacttctggctctgtgtaatactcctcttctctgtcagggaagtgtgctccagcgccatccagagagaaaaggctctctcggacgttgcaccttgagtcctccgctcctccagcaccacaggtgaacgncgctaggctctgaactcactttgtcctcagcttccccaggaatcacaga

SEQ ID NO: 324065 - DNA, 435 bp, Homo Sapiens
ggagattttggctcaggcaactaaatttattagcaagaaaaaatttttgtcagcccagtgctgaccaacaaagtacgttaataaaggataacaaatctgtcacttaattcataaaacatacctcaagcagttacaactaaaaataaagttggatttttgtttaatttaaaagcctcaaaaataacaagcaatgtgtttttaaacatgtagtagacacaattgtctattatacaatatacactgtacacaagtagagcttgggccgggcaggggtgagggtgaagggagagggaggaggtgcaggatgtgcaggtgctgttatctgaatccagatttgagtttaaatgctgtgtcatttagaaaagggaattgctagagtgagaaaaaattcatatgctcatcattgcccccaaccctcaactgaaagcaggcacc

SEQ ID NO: 324066 - DNA, 651 bp, Homo Sapiens
  misc_feature (397)..(397): n is a, c, g, or t
aataccccatttgtgagctttctttgagggccaactttgttctctaaaaccagccagggcctgcttttccctcaccagctctgaattcttccaggctaggcaactggaaaagcctgggcttagaaactgctttgttggcttacggcccagctgagctgaccaaaatagccaagagaaagactgtttgcacagtgtgaaattcctccaggggaaataccatagcaaaaagccaagaaagccagacccacgatggcaggaacccacaggcaaaaaaagccgagttacccccaaggcctgggttgtggagatgggagcctagttctctccagaagaaaaagcttcctaaaggctactgttgtggtatttctgtaggcgcgttttcttcatttgctgggtnttcaagagtagcattctcagtgaaaggaacagtcgaacagcctgcagcctggtggccagggctcagaggtctctcttcctgttacgtgctctccccaagtcaggcctagaaagaccgtgggacagggacacactcccagctctgtgttgatgggacagtgccgaagggtgcctggagtatgcactggcaggtagcagggtcacctccctctcccttcacctcacccctgcccggcccaagctctacttgtgtac

SEQ ID NO: 324067 - DNA, 397 bp, Homo Sapiens
  misc_feature (254)..(254): n is a, c, g, or t
  misc_feature (262)..(262): n is a, c, g, or t
  misc_feature (355)..(355): n is a, c, g, or t
  misc_feature (385)..(385): n is a, c, g, or t
ggcacgagcataccccatttttgagctttctttgagggccaacttttttctctaaaaccagccagggcatgcttttccctcaccagctctgaattcttccaggctaggcaactggaaaagcctgggcttagaaactgctttgttggcttacggcccagctgagctgaccaaaatagccaagagaaagactgtttgcacagtgtgaaattcctccagggggaaataccataggcaaaaagccaaggaaagccagnacccacgnatgggcagggaacccacagggcaaaaaaaggccgagtttacccccaaggcctggggtttgtgggagatgggagccttagtttctcttcccagnaaggaaaaagctttccttaaagccttactntttgttgggtat

SEQ ID NO: 324068 - DNA, 470 bp, Homo Sapiens
  misc_feature (180)..(180): n is a, c, g, or t
  misc_feature (218)..(218): n is a, c, g, or t
  misc_feature (235)..(235): n is a, c, g, or t
  misc_feature (275)..(275): n is a, c, g, or t
  misc_feature (358)..(358): n is a, c, g, or t
  misc_feature (403)..(403): n is a, c, g, or t
  misc_feature (409)..(409): n is a, c, g, or t
  misc_feature (427)..(427): n is a, c, g, or t
  misc_feature (432)..(432): n is a, c, g, or t
  misc_feature (445)..(445): n is a, c, g, or t
tgaagattttgcctcaggacttaaatttattagcaagaaaaaatttttgtcagcccagtgctgccaacaaagtacgttaataaaggataacaaatctgtcacttaattcataaaacatacctcaagcagttacaactaaaaataaagttggatttttgtttaatttaaaagcctcaaaantaacaagcaatgtgtttttaaacatgtagtagacacanttgtctattatacaatntacactgtacacaagtaggagcttggggccgggcaggggntgagggtgaaggggagaggggagggtgaccctgcttacctgccaggtgcatactccgggggacccttcgggcactggtccccnttcaacacaggggctgggggagtgttgtccctggtcccccggggnctttcnggggcctgactggggggnagagnccggttaacgggnaggagaggacctctgaggccggggg

SEQ ID NO: 324069 - DNA, 599 bp, Homo Sapiens
ttgaagtatacttaaggaatttattcagctgatttttaagtgaaggagctcagttagtcaatatcctaccatcttgaaagctcccttccaatgtaattttcatagtctttacattttaactgtcattgtttattactgttttggctatactctctacaatttcagcagcattttaaagagacaatgtgtctatgtacaatgaaaaaacaaaatggcttgcaacatcagaaatacagtttaactgtacaatattaaagagaatccgtggtacgtataacctttttctgcaacatgaacaacttacatgtaagtatcagcattatgaatgtgacaataaagaaaaagtccttacaggagtgaaatacagcatcctgaaaaatattggtttctaccctacgaggcagttagaaaacgttcacattttaacaaatctgtacaaaccacaagaaatttgcttatgggaccatcttgctgataagaactttctagaaatgtagaataaccatgaacaaattaaaaatctagtatctatgtgttctacagccctagaacccaataaactgatttaaaaactcaattatgtccaacatggatcactt

SEQ ID NO: 324070 - DNA, 806 bp, Homo Sapiens
  misc_feature (44)..(57): n is a, c, g, or t
  misc_feature (70)..(225): n is a, c, g, or t
  misc_feature (576)..(576): n is a, c, g, or t
  misc_feature (625)..(625): n is a, c, g, or t
  misc_feature (639)..(639): n is a, c, g, or t
  misc_feature (672)..(672): n is a, c, g, or t
  misc_feature (682)..(682): n is a, c, g, or t
  misc_feature (703)..(703): n is a, c, g, or t
  misc_feature (730)..(730): n is a, c, g, or t
  misc_feature (756)..(756): n is a, c, g, or t
  misc_feature (772)..(772): n is a, c, g, or t
ctttgggggcgccccgcccaaaaaaaggtttaaaaaaatttttnnnnnnnnnnnnnncgcccaatttttnnnnnnnnnnnnnnnnnnnnnnnnnnnnnnnnnnnnnnnnnnnnnnnnnnnnnnnnnnnnnnnnnnnnnnnnnnnnnnnnnnnnnnnnnnnnnnnnnnnnnnnnnnnnnnnnnnnnnnnnnnnnnnnnnnnnnnnnnnnnnnnnnnnnnnnnnnnncacttcatgcattttattgatagtctatattttaaatctgcagtatgacatcttacatagggaaaaaagcttcttcctaaaagataactattaataatcaaaccagctttaatatgattgacctttcaaggtcttgttttgctttaaacaagttaacttttagcagttgtaaagcactgtacaaaagaaaactgtgtacattctcaaaatttaatacagggcttcccaacccgggggtctgctgggatagggtatcggagaaggggtgttatgttcagggtttaaattggaaggaaaatgagggaacccggataaaggcaagcccaaccccaattaactttccactttgtngctcctctctggcttttttggagtctcctccccgaaggtccaggaaagnccctgggtaataancaatcacttttaagtcctttaacagaaccatancatccaaggnggctttggtggaccaaagacntaaagggcagcccttgggtaactgttnccccctccaaaaccccttccagggtncttataaagcttcagnaaggcttttccaagattgctgcccggttccttgg

SEQ ID NO: 324071 - DNA, 902 bp, Homo Sapiens
  misc_feature (53)..(53): n is a, c, g, or t
ttttaaagccctggatccaaggcgtccaaagttattaaaataaagttcattcncagaccaaaaccaaatttaatctgaattgcttgcagatactgctaattttctttttctttaaattaaaaaaatgcattaatgtgaactatgtgcagggtttgtttttagtagtggtgtttgtgcacattgcctctggtgaatttcctggatttctctgaccgctcttaagagaaaaagtttagaagttatgcgttctcctacccctatgcctgacaaactgattaggagcagaagataaaagtaggactcctcatattttaaggagcagaactgggagtaactcctgatctctgggagtcattattatcccctcctccctcagggtcctctgacaggttcagagagctggtcttgtttgataggaggctgatattctcttgtgtcaaggctgatccatttggtacatcactgctgaatgtcaatgtaaggtcctcagccggaaccttgttttgtggttctggttgtccattttctgcttgtttacttgtattcagtttgcttttcatgtccagagaacactggttttccatactcagttcccgtgttctcttccagatttccctttccacctggtgcagttccaagctcaactgctcacttgagatcatcccaggccattttggaggtggcggtggtgggggctgtgactggcctgccagggtgtttgcctccctctctagtccacgtagctgggtctgctggctaatctgatggttcaattgctgcaattctagtcgtagctgttctctctcagcagatggaaggggttttccatgactggccacttctgacatagatattctctccctctcactgaagtgtccctgagaaggtatgttttgatgacc

SEQ ID NO: 324072 - DNA, 769 bp, Homo Sapiens
tcttcgcttgtttatttattcatttatttaattgtatttattcatttactaactttatgtgttaccaattaattttgtttacccattcctttatccatccctcccctccttttcaggtaaggagacaggaggagtaggaggaggcagggctctccatgccagcctctgtggtccttgcccaaacccatcagcgcaatacttgaaccttctcccaggtaggggcaggaggagccacatgagagagggagaaggaccgcgtttacctttagagttttgttttgttttttccttctgagtttgctgttggtgcaggaataagggaaaggcccaaggtatccaagcctggggaagggcaggccagccagcacctctgccttctcagggacaagagtagtcctttaccaccctcactctgcctgtcccctctcctactctacagcattaaagactgtgggaccaggaccctaagtctcctttccttctgggtggggagttctggggttcttggtgtgtgggagaagttttataattgcttccaaacagctgggtttaaatataaaatagacacactcatttttggctcttggtttgtgtgtgggaacaacatgagtgggaaggaatttctgggtgcagaaggaagcagccggggatttgaccaagcagggtatcaggcaggcatgagagcagccaggacagtggtctacaagcccagcacggaggttgtgaagacagtgacaaaatcagctgcccagccctcacttctccccag

SEQ ID NO: 324073 - DNA, 1405 bp, Homo Sapiens
  misc_feature (777)..(788): n is a, c, g, or t
  misc_feature (1321)..(1321): n is a, c, g, or t
gtggtgaaactacaactctcacgtgtgctccagttctaaaattaacctgtgcctggtctctgaagccctttcttgctctgtgcctttcagccacatccttaggtgctaacggccatgagctccgactctccaaagtgagctccactttgggtctgaggagcccctggcagagtccaacgctgcctcaggtatcatgggcgtaatgatcacccaggctccgggagatctcatggatgattactgtatgagacagaggggacttcagtctttccagggccttggtggaatttttggctctggtgttttcgccagacaataaacttacactggaagctttgattcaccctccacagtactccagaaaggactgtcctataagttgtacactttaaaaggtcatgtagaggttgtagtagaatggcttttcaccctggtgactttggaagaaactcttgaatactgcctgcatccgggcaccatggccaggttgcctaggagtggggtccactgatgaaaagaggtgttttgtacttacataagaaaaataaatttctgattgattttaccgcacgagaagaacccccacaccagaaccaaccatcactcaaaacgacctcccatctgtgcgcggcgccctccgccacccgaagagcttcttagaacatttcttttcggcccgcccggtcccacaaatgtacctggatatagctgtcagagcctggtttcggaagacaaacccatgaaacataccaatgaggccatggaaattcttccccnnnnnnnnnnnncaccaccccgccacgacaaacagaattcggggcgcttggcgcccactatcccaaacataaggacaactctccgtctggtctacaccgcgactctcggagatcctggacaacacaaacactccaagctcacttggaagacataaacgcctccagaacacgacctctacaatctccatacagtcgcatctcggcagccacagcaggcactatcgctacctctgcccattccgcccgaccacctccgccacacattatcccatcccacacaccgccacattcttatatcacctcacctcgccccaacaccgagcatcgccagaataactccggcgtggactatagactacaccgtgctcccaattagcgcgactatagatcgcctctctaccactcgacgtaggttcgcgtgcatgaagaagacgtgcaaacaggtctctctgccccactgtcgttagaaactactcgcgtttctccgtgccactaaccaactgaccagaccacgagtctcgtgagcccgggacagatatgtgtancttggtcgctctggacaccgaccaccaccgtaattagtaccctacttacacacacgcaccgaagactctaataacatctagtcc

SEQ ID NO: 324074 - DNA, 766 bp, Homo Sapiens
taaaaattctatttgagacccagcacacaagaatacgatagatgtcctcaaatgggggcttggctcacaggtggaaggacactaaattggtcccatctgatttcttgaggcaagggttgaacctggcttgcacaaatcacacctgtccaaagcaaccacgagttctactattttgcagcccttgctgctgggcgacgacgacgacctctctgcctcttctttccaccactacatcgcctcctggggcagcttctccctactccaccctgtgtacctttcccagaatacagaacctcaggccaaagagagatgccagccccattaatcacctctactgtaccccaatcatattacggaaagtcagacccaggagacaggactcaacagccacgctcatagggcagattccgtttgctgcctccagcccctcattcccgccttaattgtagggctctgcattatagccgcataattcatgcctccctaattatggctgtcaacagccccattgtaaagctgtaaaatgtacagcacctgctctccaggaaccctgtgccagggattggtagaggggagtgccaggtgtggatgggggctttgccaaagggttcactgattggcttctcaatcgccgtgtctggcatttatgcttgattctgggagcatggacaatagccaagaagtctcttgccgccaggtatcccgggacagaaaggggaagaggcgggtggggtataggaaagttaggggtttcctgtgtgctccc

SEQ ID NO: 324075 - DNA, 992 bp, Homo Sapiens
  misc_feature (17)..(17): n is a, c, g, or t
  misc_feature (29)..(29): n is a, c, g, or t
  misc_feature (38)..(38): n is a, c, g, or t
  misc_feature (56)..(56): n is a, c, g, or t
  misc_feature (73)..(73): n is a, c, g, or t
ggtgttcctactttaanaagagagaccanctcccttgnacccctctgtcttccccnctaaatctgttttgtanggcctctctgtaaggggttcgttctcatgaagtaccctggggtagaatccgggagtcttcctacagcaacaacactgtatttttactgaggcagggcaggttcccctgtggactcctgctctgtgttttggatctttcctagtctcttgttttgagactaaagaaacaatatctttcttcaaaataaactttattcctaatatgaaacaaaatttctagagaaactaaaaactctgcgtctgagggagataaggaaacaaaggagggcatggcagcccaccggagtctcaggaggctggggaggacactggaaggactctcagaggatgctggtggcagcaggcagcacttcctggctcatgaaaacgttcaagtccaggttaggatcttccaaatccagtttcataaacttatccactaatgtctggcaattttccatttggttcttctttagcaaatccttgacaggcttgatgggttttccactgcggatcaagtctgagacctccttgccacgagccacaagcttgtcaggaagcccagcctgggcagctgtgtgggaggcatggctggccttcgcaacaccttcgcaaacctgatagaagaagacaagatcgttgccatcctcacaggtctccatggtcaaatactgcaccaggggcccttgtggcagcagctgtagctgaacaaggctcagaaagttggtggccacaaagatgtgggggcatgtgggtccacgtgccagccagtgtcggagcacagcggccagaagcgcgagcccatccaccgtgttggttccctttccaaattcatcaataaggaccagcgactgtgcagtggcattgttcactgctttcgccacctggttgaggtcgatcatgaaggtggagaggccaagggagatggattcgcagctacc

SEQ ID NO: 324076 - DNA, 1657 bp, Homo Sapiens
  misc_feature (480)..(493): n is a, c, g, or t
  misc_feature (1099)..(1110): n is a, c, g, or t
aatttttggaacaaattttaaatataggcattactagaggaaaattatctatggactgtcctattaatgaagaatgtctgtcttacctccgtttgttttgggaggaggagaaaatatagaagaatctaataaggaacaagtgattttacttttttagctcccagctactgttgtgctcgttttaattgctgttttgaagatctgctgcttaattatccccatcccttagccggagatgtggagtgtttcctttcagtttttggtgatgttgaattcttttgtattccctcctggggccaggggtcagaattcccaagcatgaccacagctttcttttaaacattaagcttcccagtgggaagggaaactccagctcgacaggtaaagggagtgggtggggttgctgcctgcaatttctctaaaaccgctttagtgccttcgtacatacacccagacatcctgagcaagggggacgcacannnnnnnnnnnnnngtccagtcactccacagatgtaagatactcacccataaaggaaattggagtggttctggacaggccccaaaggcagtgggctgaatttaaaataaataaacaaacgtcaagcaagttaatatgcttatgtctcagtaatgtagaatgccaagttccttcctgtggtcgtgtgccctccattactgtgcattgattcctccaggtgtgtaattgtgacaactgcagtgatttggaaagtctctttgtcttgggcaaatagaaggggttcctgttgttctgctcttgtccttcgtctcctccccttttcccccagacctcccccttctttttgtcaacttgctgggagctttgctttattggttggcagtgacctaagaacaggatatggtgaggatgtcatggaagagaagagctctttccgtggtattctttggcaagagccatgtctactaagaggttaggtgacttcagtatacttataaaattcagtgagagtgccttcttctcttctaccacactctggcatagatacaggcttgctggtcacctctcattacatagatttattttaaaaacattttgattatgttaatttgagctttcccnnnnnnnnnnnnaactactttttaaaacacttgattactagtggcttagaggtgtgtacatctcctgaacatcacaaacttggtttctacctaccacacgagtagccaaaagaaaagaagcactaatagagaaaggggtgtctcacaccagacagaggacctctgctgtcaattagatcccagtatcatgacctaactttaagtgtggaaaagagttcagatctctgagaccactgtgaagaaatggatggctcatgtaacatctctgatccctcagtcccccaccctggacgtgtttcatttaccacattcataggagttaaccttagcagtgttgcaaggttaaggttcccaacccaaattattttaatcagtgtccccccaataaatcacttatccatttattgctagttagttttatttatagcaacttgatttcctatgagtatggctcctgttgtaagaattttcccacctcttctgacatgaatgtagcataagttagcaatcggttcttccaaactcctgtgggttgaatatggtatagaaggtatgcaag

SEQ ID NO: 324077 - DNA, 736 bp, Homo Sapiens; identical to SEQ ID NO: 152221
  misc_feature (653)..(692): n is a, c, g, or t

SEQ ID NO: 324078 - DNA, 1204 bp, Homo Sapiens
cctacgtcaggagacacaccgcggccggtggggcgcacacacacactttcttttttattaataagataaacaaaacccacccccctgggtctcttcacccccctctttctcctcgggcctccaaacctctttaaaaaccgggggagactttctttgtagggacgccttcatcacggcggtggccctctctaggtgggccaaagttcaaccaagggcacgctgatgaagagttcgaccccttcatggtaagggtggcattactcaatcaaatctactctctcctcccgcatatacatgagcatgtgcagagtaatgttttgacaaaagccaacacagatgtcagctggggcactctcagcctaagaagcccctacagccgagccctcagccctaatgacttaggcagtaggttaggcaggagatgtagagttggtctggctcactgatttcactgtggaaatcttctactagaatttgcaaagactagatattggggaaaggttcattgatcttaagatcccaagacacacagcctagtacctaggaattttagtatatgtgggagacagaagtggagaaagcttaaaggaattacagcccatgcctccccaaatgattatgaaaagggagggcttgtccaagctacctctgggccttaaggatgagatgagggtaggagtagggggatacatgcacccagcctgttggagaatccaacatgaagactattgtcccttgagaacctaaggcaaaagtacaaggaggggaaatactgggtcctttacctgaaacaagatatgggcctcccctgcccctcagaccctacagctccttaggctccaggcctcaggcacaagagatagagaatcatatctgagccttttgcccttcccttagctccaaacaagggcaggggttgaaatgtgagtgggagagaagggatcatcagacacactgtttagcacctgaaccacatctcttcctaaaccagaaatcccaagagcagaaagaaataggagcaaagtgagagaggggttgtgcttccatcacattaaataggagacttcgtggggttgggcaagggttgtttcacatcaggacatcaatgactctggtcaaggtgaggggttataattagcaaagcttcatgtgctctccctttctttattcatcctgcttccgtttcggctttttggggttcccc

SEQ ID NO: 324079 - DNA, 833 bp, Homo Sapiens
gggggttgcctttgtttttggcgtggctgacttacatcatgtgttggggaagggcctgcccagttgcactcaggtgacatcctccagatagtgtagctgaggaggcacctacactcacctgcactaacagagtggccgtcctaactctcgggtgtgctgcgcagacgtccatcacgttagctgtcccacatcacaagactatgccattggggtagttgtgtttcaacggaaagtgctgtcttaaactaaatgtgcaatagaaggtgatgttgccatcctaccgtcttttcctgtttcctagctgtgtgaatacctgctcacgtcaaatgcatacaagtttcattctccctttcactaaaacacacaggtgcaacagacttgaatgctagttatacttatttgtatatggtatttattttttcttttctttacaaaccattttgttattgactaacaggccaaagagtctccagtttacccttcaggttggtttaatcaatcagaattagagcatgggaggtcatcactttgacctaaattatttactgcaaaaagaaaatctttataaatgtaccagagagagttgttttaataacttatctataaactataacctctccttcatgacagccttccaccccacaacccaaaaggtttaagaaatagaaatataactgtaaagatgtttattttcaggcattgggatatttttttactttagaaagcctgcataatggttcctggattttcatactgcaaacatttcaggaaatttccttgggagaaaaatggggctttattttcaactgaaacatcctagttggccgggttta

SEQ ID NO: 324080 - DNA, 989 bp, Homo Sapiens
  misc_feature (166)..(199): n is a, c, g, or t
  misc_feature (307)..(307): n is a, c, g, or t
gctgtaatgtaaacatcgtgaaggtggagacccagttaaccttttaggtggaaggccagatgacagagggcggcatctgacccggaaggccctctgcaaccaggccaaatacatctacagggaaccaatgggaaacatctggggaggacaacccaaataagtatcnnnnnnnnnnnnnnnnnnnnnnnnnnnnnnnnnntcgctgctgttttgcaacatacgaagttgatggggaggaaggacccttaaatcctgagtgggtatcgagtattccaagcaactggagagaggctttgtgcctcaacanggtcttcaaccgccaaggagatgacccatcttttgcagtgcatgccttcctacttttggggcaaaagacaaaaatctgggaaagcttagaggaagctaaggacaggatttccctcatttttttgtggcagtgcctcaggtgacaaaatgataaaaccactgctgctttacaaagactctaacaccccacttgtcttttagagataaacgccttcctgttttcttgtaatcacacccagaatcaccactgccactttttggattagttttacaatttttttatccatcaaatccgaagtcatttaacaaaaaaaatctggaaatcagaatgttgctaactgtggacagaggtcccaatcacccagattcattattctttgttcattctaatgttgatactgtgtttctccctcaggaaggccctagctttcttcagcccttgggtcagggtataactgaagcatttgaacataatcaagcatatgtttgaccactttgctgactgtattgaaaaaaccctcaccttactctgaaagaagcatggcaacagtacaatattgccgatgctttggtagtgataaaagaggtgatgggtgatataaaatcagccactcttaagcttgctggaaactgtgggaggatgtgtgaatgatgcatatttccctagagctaatgaaagaagt

SEQ ID NO: 324081 - DNA, 1365 bp, Homo Sapiens
tcaaaacatagttatttttactttttaagttatataaataatatacattttcaatataggaaaatgggaagatacagataagcagtggtcttatatatatccttgcagctttttcccttcggacatacatattttgttacagtaattcctgcatctcaaaaataatacaaaaagtgaaaataagtttagaccagccttaaccttagctcaggtgctaatttatatataaatctatgtgcattcatttcaattttgacttacaaaatctaaagtgatgctgttataatactaaaagattccactttaaacagcagcagtttcagaataattaaaaatttgattcaggcatgaggctgataaagaacgaagttttactttttttcattaaaataagtagctttctactattgcatcctttgaagagaagaatgttctgctggtttggccacaagctctttagatggttacttttagtaaactcttcattcatcctggcattcttgaaaatattcgtcaaacatagaggaagactcatcttcacgttcctttggttctttaaattctaggtcttctccatattgaatggcaaaatcaatatgctgcaatacaatgttcatgctttcttcatctgactgatcgtaaggtaaaaatcgaaccatgctgtagtcatcaatcagtccacatatagctttagtcagtttcttgaattttttgcttcttaagtcacttgtagaatcttctaataaagaatacatgtctggatctaaaaatttctcaatttccttttttgcttttttactcagcagatccatttttgtcatgatgttgacttgcggaatttctagagagatcatggcactcagggctgccaagatgccagaaataaacttgaatgactccaccatgaactgagaatcaacaagaaaaactccacagactcggaactcccactgctcgagctgctggaccagctgtttcatcacaggcaggtgagtgtacaactcaatctgacctggacaatcaaaaaggatatagtcgtcctctacatggccaagacagttctccagccagtcaaaattattggcaaagtactccatgcaaaataccaatcctccgttgggaccgaatcgcagagaatcatcctccattacatcatccacctcgatcagttcccggatgtcagccatcacggagtagttgaagtgttctgctgctggatccaggtttacaacttggacagaccggttgagggcttcacagtgctggaccatggtggcacagtaggtgctcttcccgctgcccgcggggcccatgaccagctgcgcataccgaggcatgttggctcccggagccgcccgccacccc

SEQ ID NO: 324082 - DNA, 945 bp, Homo Sapiens
  misc_feature (134)..(158): n is a, c, g, or t
  misc_feature (163)..(164): n is a, c, g, or t
  misc_feature (169)..(230): n is a, c, g, or t
attactaggccccggggtttcccttgggaaaacaacttatgccaccggtttctcttttcctttggggggccgccgcgccccaaagagaagtgtttagaaaagattttttggggggccgagggcgggcccacaannnnnnnnnnnnnnnnnnnnnnnnnttttnnggggnnnnnnnnnnnnnnnnnnnnnnnnnnnnnnnnnnnnnnnnnnnnnnnnnnnnnnnnnnnnnnagagacaaactttattggggccttaatggatttataggaatataaagttatacaacaagaacaggatgtcaccaaaagagttcactggttggctgctgcaggaccatctcacaggcattgtttgctttggtaagttcaccatgatccagggcatggccttaaatctcagaggtcttacaacccgatcttgcccatgtcttagaattcatcgaaattcaggaagtgaaatcgcgctgattacatcataagacttaaaaagcacaacttccaggttcaggacaccagaaaaagcagggtagcattgtaaataatcttcattgttttcaccaggtgaactattatatgaatgcaccagggaaatggagtcatactgcaatcactcaaagactggtttagggtgggagaaatttatttctctacttctccggaggaggagggtgcgacttcaggccggctgatgcaggaggaggtgcggagggtagagtggtactacctccgttgggagttccttccggataatcccaacgcggagcgaggaggcagcgcttttttggaggcttggcttcccgtgcgtttccaggtgggagagtggatctcccggaggcacaaggttggtctcccataaggattacagaaacgggtcgtcagttttctccggtgggccctggcaaagccaagagacctgagatggcggcgagtcccctccaggcacccc

SEQ ID NO: 324083 - DNA, 958 bp, Homo Sapiens
aatgtggcatatacaccctgcgttataaagcaggctggtacggtcccggaatgtcccgggatatcgtcgacccacgcgttccgggaatacaatcatgtattaattgaagaaacagatcaattatggaaagttcatgtcaccgagactttaaggaagaaagacccgaagagtatgagtcgtggcgagagatgtacctgcggcttcaggacgcccgagagcagcggctacgagtactaacaaagaatatccagttcgcacatgccaataagcccaaaggccgacaagcaaagatggcctttgtcaactctgtggccaagccacctcgtgacgtccggaggaggcaggaaaagttaggaacgggaggagcagctgtccctgagaaaatcaagatcaagccagccccgtaccccatgggaagcagccatgcttccgccagtagtatcagctttaaccccagccctgaggagccggcctatgatggcccaagcaccagcagtgcccacttggcaccagtggtcagcagcactgtttcctatgatcctaggaaacccactgtgaagaaaattgccccaatgatggccaagacaattaaagctttcaagaacagattctcccgacgataaactgaggacttgccttggaaatggaatctggggaggcaggaatacaaggacagtgggggttggggaatggaattctacaggagactggagtcttgctttgtggatccttttggtctccgagtcctgcagtctgcaggtgctgcccctgggaacctgcgtgccacagccccgcctccctgcctggagcacactttagaattctgaagatgtgaagcctctgtctcactgaggattttaaaggtcaattatacttttgttgttcattagcatctttgtaaactataagacgtagttttaattaataaatattgcccccagattgtatttatattagc

SEQ ID NO: 324084 - DNA, 1817 bp, Homo Sapiens
  misc_feature (20)..(20): n is a, c, g, or t
  misc_feature (37)..(37): n is a, c, g, or t
  misc_feature (48)..(48): n is a, c, g, or t
  misc_feature (69)..(69): n is a, c, g, or t
cccagatagagtccagaaangaaaaaccaggccgggnaccagagcccntaaaacttcccgaagctttcnaatgaacaggaaaagctggcagatttaggaagcccagtttgaggtcgtgaatggcccacagcctgggaccctgagattccgcgggtggagaatgtctcaggtgagagcaaccctagttagaaaagtattcccaagagaccaaggcaagccacgagtcactccttacagaaagtcactcttggtccctaaagatgtgctcacgagtcattctccaaagcacaaaactttattttcagaaaggaaaggacatcaaaaataggactgtcctgtgcagatgtccaatagccttaatttggggaccaaatgcccccggccattggaaagacagatcttgtaagctccattcatccgtgcgctcatccattcattcgtgtttaccgagtgcctgctcagtgttgggacagacgaggatagttgttcctgccaccgtgccctggaggacataggcaaacaaacgacgacacagtgtggcaagtgtcacagttaaggctgctgtagggtggctgtgggtggtgacagacctcaaggcttcattctgcaaagctgagggcaaaccttggcccagactccttcacaaagcccccggtgttcaactattctcagtccaggagcccagcagtgctcccagtggagtttatgaagccgattcagacccagcaaatccaaagttttcttcccttaagcagactgacagccttacttacagaattcacttgtaatttatgacaaaaactgcactagaacttatcacaaaactaactttattatatttttcccagttcgatttttctgtcaaatatcttcactgtccctatgacttctggttcttattttcttgacacacacattgtcctcagccttctttggattttctgcacacctcttgacactccgcgttactctctgcacagattcgctctccaaagtgcttgctgcaggctggctttttgtctttcttgatctcaggcacatggagtctgaatttcctgcttctcctttccctttctgattctgcatgagaaccttcgcactcttctgccctccgctctcctctgccaccttaggctgggagctctcattctgtctagcagacctcaagcaccttttgttctcactgactttgtctctaggtatgggtttccgggctccatcatctggattctgaatgtccatctctggggaggtcttcatgggcttcttttcatttctgtttatttctattctttctgctaatacaaagacctcagttatttgctgttctgcctcagtcttattttggcgtctggagcgcagggatattcccttattttcagggactgagtcttgtaatttgtgttcctctttgttggttttcatgtcgttgctgttcagctcttccgcaggttcaattctttttgcagaagtcctcaaacttctcttcatgatgaccacgggttcggatgatttgcctcttgccctgggagcaaccctctgcttcttgctggctggcagctcctccacaatttcctctggtgctggcatgcagcgcagcctcttggttcccgtgacgcttccatctttgccacctcccctcttgaagggcagtgggggcagggaagtgttgcttttgctttgtgattttacagggtctctggtgcttaccacgtctcccacgggttctactttaggggcccaagaactcttctggatatttttagaggttttccactgtcaggtgtttgctttggagcgcttgtaaagctatcagc

SEQ ID NO: 324085 - DNA, 830 bp, Homo Sapiens
  misc_feature (32)..(32): n is a, c, g, or t
agctcaggctacgtttctagctaaaagggagntaatgaccattatgaaatggcacaaagaaatcctcactgtttcacagtgccttcctttccgtgggtactgtgtggccaagaagtacacttctgatgactctttcctgctggtttcaggtttgatgatccttacatttctggaattcctctgtcagtctcctctgtaaccgacggctttgacttccagcccaggttttacaaaggaatgtccccccaggttgcaggatgtctggggtcacgctgagaagggtcaggcacaggctgatgagcctgtcatgatcgaggtcccggaaccctgtggcattgggcgccatgtcgctcagaatcacatctgctctcctgccaggaagcacctcgaggattctctgtgaggttctcgggtcagtcacgtcagcagggcacagaaaagttgctccttccagggggaatatgtgaagaagatctaccccaagcacgaagccaacaggagagctgggatctgtgcctgcggcgttgaccttctgcaccgccacctgactccaggccccaggagctgccccacagtctaacacccgaaggccgggccgcagaatctggtgcctctcgttcacctccaggagcttgaaggcgcttcgacaccggtaactctccaccttcgcagccttcacaaatgggtccctgagatgtcgggtcagccacaggtgctcagcgcctgtccgattcttgcagcgactcccaacagtgtggaacccttgacgctgaaaggaaacacacaccagcttcaagtaccccgccattggtgttccccgcgcctgcccc

SEQ ID NO: 324086 - DNA, 716 bp, Homo Sapiens; identical to SEQ ID NO: 152230

SEQ ID NO: 324087 - DNA, 889 bp, Homo Sapiens
gttccctgttctacaaaaattttatggccatttgccggcttctttctgctttttctttcttgtcctgctttcgccctgcgggccgtctgtgttgttttggttggttgtttttttcacattttaagccatttattcaacgaccctatagagtataagtatacccaatacctcagactgcttttggcccctggactagaccctcattgctccaggcatgaggggctgtgcaccctgacagagccacccagggccagtggcctgtggccacaatgtcaatggctataaccgcttcatctgccgccgctcctgtcggcgctgccgtttctcattgtgctctggtgctggggtgccactgtctgcagtgaaccaggggcccagcacattcacccacaggaggtaaagggcccggcctggagccagaagccagaaggaccagacatagagagagaagcagctgagcacctgcacgatggctgtcagtaggatcacatccttaaggtgctctgccatgccctgctccatgttgaggtccatgccaccatccatcagggccccatcctcagagaacgctgctcgtgccatcgagctcatagagtggtagctggccccatacactgccagactaaagcccagggccaaccaggcccaaaatgaggcagatgagtaaaagaagaccaacgtcacaaggcagtatatggcattggcccccagtatgatccgcaggtagcaacttcagagtctctctgttctcttcaaatatctgcttcttccctctcgtgcccactttgccttgggcgccatggtgcgaggcaaatacccagcccgggaaacacgggagagcgaccgaaaccgcaatcactaagcaccacatcggcagctctatgcactt

SEQ ID NO: 324088 - DNA, 1042 bp, Homo Sapiens
  misc_feature (759)..(781): n is a, c, g, or t
  misc_feature (850)..(850): n is a, c, g, or t
ggactttaggaacacacagagggtagggatagtggccctggccgtctatcctacccctttagtgaccgcccccatcccggctttctgagctgatccttgaagaagaaatcttccatttctgctctcaaaccctactgggatcaaactggaataaattgaagacagccagggggatggtgcagctgtgaagctcgggctgattccccctctgtcccagaaggttggccagagggtgtgacccagttaccctttaacccccacccttccagtcgggtgtgagggcctgaccgggcccagggcaagcagatgtcgcaagccctatttattcagtcttcactataactcttagagttgagacgctaatgttcatgactcctggccttgggatgcccaagggatttctggctcaggctgtaaaagtagctgagccatcctgcccattcctggaggtcctacaggtgaaactgcaggagctcagcatagacccagctctctgggggatggtcacctggtgatttcaatgatggcatccaggaattagctgagccaacagaccatgtggacagctttggccagagctcccgtgtggcatctgggagccacagtgacccagccacctggctcaggctagttccaaattccaaaagattgggcttgtaaaccttcgtctccctctcttttacccagagacagcacatacgtgtgcacacgcatgcacacacacattcagtattttaaaggaatgttttcttggtgccnnnnnnnnnnnnnnnnnnnnnnnaattcttggagggggaaataagggaataaggcccaaggaagatgtatagctttagctttagcctggcanccctggagaatcccacataccttgtgtattgaaccccaggaaaaggaagaggtcgaaccaaccctgcggaaggagcatggtttcaggagtttattttaagactgctgggaagggaacaggccccattttgtatatagttgcaacttaaactttttggcttgcgaaatatttttgtaataaagatttctgggc

SEQ ID NO: 324089 - DNA, 712 bp, Homo Sapiens
  misc_feature (419)..(445): n is a, c, g, or t
tatctgcaaaattttattaagcaatagctggacaactgttacaacttcaaatcatcaagaaaaaaataaggagattaatccgtctcagtaataaagacagaaaataacttggacaaaccacatcgttttgaatgcaaaccattaatgccttctagaatatctcctgcacaatctaatacacaaaatacgtaagaagaaaggcaaataaggatgagctcattaaaacgcatttgggagtcgcaacagatcttgcttggaaagtaaaaccagcaggatgctgaattaaaaaacaaacaaaccaacactggaggaactgaggtgcacaagcagtgcacgccactgccgaggtctggacatgaacatgctggtggtctagtttggtctggggcctatgcacctgcatcgtgcacttacggttnnnnnnnnnnnnnnnnnnnnnnnnnnntgccagtagtaataaactcagaaattatgtccaaatttacagtaccaaaataatgcatttataaacaaatgcaaaaacaatacccctttggtaaataatacagtgtctttttcagtcaaacgcataacccatgcttttctacaacacgaaaaaatttttatctacaataaacaacaagatcttagaaccctacccctccccttaaaaagaactgtaaacagaaaatataggtacaagtaaagttacacaaaaattgcacaaagccaa

SEQ ID NO: 324090 - DNA, 431 bp, Homo Sapiens
  misc_feature (42)..(42): n is a, c, g, or t
  misc_feature (342)..(353): n is a, c, g, or t
  misc_feature (400)..(400): n is a, c, g, or t
ttacctctggctgataaaactctaatgggttgtggcttactntgtttccattttctttggctttgtgcaatttttgtgtaactttacttgtacctatattttctgtttacagttctttttaaggggaggggtagggttctaagatcttgttgtttattgtagataaaaattttttcgtgttgtagaaaagcatgggttatgcgtttgactgaaaaagacactgtattatttaccaaaggggtattgtttttgcatttgtttataaatgcattattttgggtactgtaaatttgggacataatttctgagtttattactactgggcattttctttttcccttnnnnnnnnnnnnaaccgtaagtgcacgatgcaggtgcataggccccagaccaaactagnaccaccagcatggttcatgtccagacctcgg

SEQ ID NO: 324091 - DNA, 1312 bp, Homo Sapiens
  misc_feature (877)..(877): n is a, c, g, or t
ttttttttacgaacatattgctttatttcttggtagtaaattaaggctttctagattcatacagcacgcaggattttgaacattagaattaaaaaacaacaacaacaaacaatgagcattcaatttagcagagccaggaaggaagcaatgttttaaaacagataaatttcctagtgagacctttggtttggtctccaaaaatctgctgagctgtttccccagtaacctccatcatagattcccaccccaagggagaacagaatggatgaacaggagactgggagaaaagaagaaactggcaagacggtatgtgctgggcaatcagtgtgaacagtcagctttgtctcatgtttggaagacagtttaggtgatgcggtcagggattcattctctggatctccctgctcattctcagagtattaaaccagctcactcggaagaccccagggccaaggattagggacaatcctttgtgacacccaaatcctgaaacttcaaatagggtcacaagtcacagagctgaggaatgctgccttcaacttctttcatggttttaaactctgtggctttcactagatcctggcctagctaaatgattcatttcccccatggcacagagccttgattacacatgtaatttgatgatgttgattggatgggaggccatgatgtttgaaagaaacctcctgggcagacaccacctcatcacactaacctctccatcccccacagaagacgacagtatgcacaggagcctacagtaggagtgcagttgtcaagggtgtctaagtttgacaaattcagcataactggcttggagatgcagaggttctgcatttggataatgggcattttgagaagaaaataaatgagggantttcaacgtaacaaaggtggggcttggctagagaataatctgggaacgggcccatgtgtttattagcaaaagacaagtgaatttcgtgaaaaccagcaatggaatttcttctggctatctgacttcatgcaaatgaggctagaatatagacttctatccaaataagataatttgaagtttcatccatttaaaatccataccttgtaatgattttagtattcctttccaagggtctggttggtggaccagagtctaagtcatctcagtgtgttccctcttccattcatctggcattgttgagtgaacagaatttaaacacctggaagtctgctttgcattctttggtggaaaacacgcagacagacatggaggaggtacacagggtggcaatttgcacaattaaacacttacaaacttaaccccaaataggcttca

SEQ ID NO: 324092 - DNA, 1043 bp, Homo Sapiens
  misc_feature (44)..(44): n is a, c, g, or t
  misc_feature (85)..(85): n is a, c, g, or t
  misc_feature (232)..(250): n is a, c, g, or t
  misc_feature (309)..(486): n is a, c, g, or t
  misc_feature (488)..(488): n is a, c, g, or t
  misc_feature (490)..(497): n is a, c, g, or t
  misc_feature (499)..(499): n is a, c, g, or t
  misc_feature (503)..(506): n is a, c, g, or t
  misc_feature (508)..(508): n is a, c, g, or t
  misc_feature (510)..(514): n is a, c, g, or t
  misc_feature (516)..(517): n is a, c, g, or t
  misc_feature (519)..(519): n is a, c, g, or t
  misc_feature (681)..(692): n is a, c, g, or t
  misc_feature (706)..(706): n is a, c, g, or t
cctggaattataactgctgggttaggggtattgtcgtatggganatcttactggggagctagagaaaacgtagggtgtgagcaantataaggtagataataaaagaggggggatattgggtgggtggtgagcattgggggggtatataggggtggtcacgcaaaagatggtatagctatggggaggaacccaaaggacgggggggtctaaaatagagtaggtggcgtgaaannnnnnnnnnnnnnnnnnnagcgccaaagggagtcaagaggggggacggcgccgcgcggaggcgaggagggaacaccnnnnnnnnnnnnnnnnnnnnnnnnnnnnnnnnnnnnnnnnnnnnnnnnnnnnnnnnnnnnnnnnnnnnnnnnnnnnnnnnnnnnnnnnnnnnnnnnnnnnnnnnnnnnnnnnnnnnnnnnnnnnnnnnnnnnnnnnnnnnnnnnnnnnnnnnnnnnnnnnnnnnnnnnnnnnnnnnnngngnnnnnnnngnggannnngngnnnnngnngnatcatttatgggggggaaatgccaaaccctttagtcttttcccaaggattttcttaggaaaacagctaatggaccaatgttcattttacctttttgggccccgggcgccaaaacgaattggtcttgaaaagtttttgaagggcggaggcggccggacaaggnnnnnnnnnnnnggttttggtttgtntttccaaaacaattaagctatttttatttaacatgtaatagtcataaagcaactccatatatttagttttctgatatcctaatgtatttccacaaaccttttaagtctacaattttatatagttttccatcagggaggcaagatatatataatttctttttatatttaactaaaggttttaagagggcttagtctctaaatcagtaacaattagtcataacaccatacaaacacatttaaatattcaggaaagaggttgttaagattattgcttagtcttataaaatggtgaattttaaccaaattgatacctctgtaatcttatttatgtttcccc

SEQ ID NO: 324093 - DNA, 750 bp, Homo Sapiens
  misc_feature (393)..(403): n is a, c, g, or t
  misc_feature (559)..(576): n is a, c, g, or t
  misc_feature (588)..(668): n is a, c, g, or t
  misc_feature (719)..(719): n is a, c, g, or t
ttctcttcatcagggtccgcatggaatctttcttatattttaccctttcctacatgtagccttgaatgtcctttccacaaatatgctcccacggctgggagattttcttttcttttcgtcacctttgatttttgggattagattaataggggaaaaagtccctggctttaaagaaaacaaaagtagaattcttcaaaaataaatttcatactgggaacagaaaggaactaaatgcttcataaaacaggggaaaaggaattaagatcatcctagaaataaactaagataaaaataagtatactgacccttggttggtagataaaaagatgaccagtcttgtattgttttaaaattagataaacatggattaagcatggcaaagactctgttccnnnnnnnnnnncttggagacagggcctcacgctgtcacccaggctggagtgcagttgtgcaacatcatggctcaccgcagcctcaacctcctgggctcaaacagtcctcccaactcagactccagagtagctgggactacaggtgtgcgccaccacactcagctaannnnnnnnnnnnnnnnnnagagatggagtnnnnnnnnnnnnnnnnnnnnnnnnnnnnnnnnnnnnnnnnnnnnnnnnnnnnnnnnnnnnnnnnnnnnnnnnnnnnnnnnnagcatgagctactgcacctgccctctgtttcctttgggaaatctcttaccnttcattaggggtttctttcataggaatttcc

SEQ ID NO: 324094 - DNA, 432 bp, Homo Sapiens
acaggagtgtcaggcagatgcgtttgttttggtaatggttgcacaactctgtgccggtagctaaaagccattaaattatgtaccttaaatgggggaactgtatggtatgtgcagtatgtgccaataaagctgctaaaaagaaagagaaaactcaatcagactcttctatgacccccctaacgtcattcacattgataatgttggttctggtttctataatgttgtcaccttggctttgactctggggtgcgttgggatttgggtcaactgcttctcactgggcagctggggatcagtatggtcacagtcggccctccaaggatgcttcccttcataggggctttgccctggggggaagccccagaatgggaccccatgttgcaatttgaaggcttcccagttccccttgggggtcaatacccatctggggat

SEQ ID NO: 324095 - DNA, 591 bp, Homo Sapiens
  misc_feature (134)..(210): n is a, c, g, or t
  misc_feature (499)..(499): n is a, c, g, or t
  misc_feature (506)..(506): n is a, c, g, or t
  misc_feature (521)..(521): n is a, c, g, or t
  misc_feature (573)..(573): n is a, c, g, or t
ggggaatccaaaccttgttcatggccaggttttcctgggaaacaattagggccaggttcctttccctattgggcccggggccccaaaaaaatgttttaaaaagtttttgtgaggggcggagggggcccgccaannnnnnnnnnnnnnnnnnnnnnnnnnnnnnnnnnnnnnnnnnnnnnnnnnnnnnnnnnnnnnnnnnnnnnnnnnnnntagtttgaaaggggtttatttctggtgcacacaattgcttcattgtgaatatacatgtgattctctgtacacaggaaatggaattatgttcaaaataatagacacagcaaacaagtttctttgaagttactaaaaattaatgactacataaaataaacattctaaaactaagtaagtattattaatttgaatagttagtaggtgtaagggaaaaggcatcacactacaataaacaaacaaaaacaacatgcattcctcgcattaggttaaagacaccttcaaatatttntctcttnatatactttttgttntaattgtggggtattacagctcccacaaaaattgggtgctgaatttcggttntaggtaagccgggcaccc

SEQ ID NO: 324096 - DNA, 688 bp, Homo Sapiens
  misc_feature (461)..(461): n is a, c, g, or t
ccacaatgatcatggcattcaccagcagtggggctgaaaatactatagaaatgaacatccccctggagtcgaaatactggtatttcgaaaataatctccagttcatcgcagccgcctcattgatgtattcagcacagtagactaagatgactagacacagaaagtgcccgatctgtagtctgtagcttcgggaggacaagcaggtgaggagcacgcagagcgcgtggaaggtggccagccccatgagccagggctcagtccagtccgtctgctgtaggaacacaccagcagacactcactgtcctgccactcaaggccgggttcacggcccacccacagcctttctcccagcgcaggaggcaggggcctctcactcctgagtcctcctgggctactcaccaagtatccagagagcattgccaggcctcagagaaacatggggacaggaaagggagaaggancccaggaggatggaaacaggattctcccctcagtgcaactataattcatggaattcaaagttcaagcaacacagaactgaaggcatctctgatgtgctcctttcgtttgtggaacagaatcatgtttttaaggtgggtataattaaaggaattaccatcctttacgatgataattggttatgataattggtgacgacaaggaaattaagacgattgctcaaagagat

SEQ ID NO: 324097 - DNA, 1149 bp, Homo Sapiens
  misc_feature (43)..(43): n is a, c, g, or t
catattttaaaataagctttatttagatttttttaaatatttnatatttgcatccatgccattcgagaaacctttcccacgggaaaggttattttcgtctaatgttacccataactcattcgctatttgacgtagttctcttaaataaatcatcctttagtaactcttagaattatctcctaatttacaaaaactgaaatgaaaaggaactactaaatcattagcaggagtggttgcaatcttattttcttgtaagtaaagggaaaatgataaaaatcaaccagaaaagaaattcatgggcaagaaaagtattttctaaaatctgtctccgtagagaaagatgccagcttgggtcgctccccgtcacccctaggctcggttaaacagtttggtcaaaggaggacagaaaagtccttatgagggcctctgcctgcttgctgtttgctgacttttggaccaggtcagaaggaaagtgttgtttgttcttgagactttggacacaatgtcctatgccttctgatagagatactctagcatttgaaaatctccttgcttctttttaagagctgaaaatgtcaccgttagcagaaagcacgactactgttgtctagaggtgtgggttgagctgttagttgttaaggacgagcagaagcaaaagaataaggaaattgagttttaggccttgggcagaccttgctgaacagctcacacatcctccgtcccctggcattaaaatacacacagttcctttgctggtgaagcctctttggggccaacgccaccccccatataggcagatgttcctgccagctcttgtctcctggggtgggtaggctcaggctgctgtgacaagttgggggacggagtccaagggatcctgggagattctaagtgtggctgatggaaccaaccagaatggggagggtggagggctcaggtgctggactctgtgtccccactgtggccctccttttgaagtgggtgcctcccctaacaacacctgcctggcccacctgcatcctaaacccaggacaagaaagacacagctgcagggaggaacagaagctgctggaggcccctcggagaacagactcaggccagggtcccactggtcgtacccttggatgtgtggcaggctgtcttgccccc

SEQ ID NO: 324098 - DNA, 1509 bp, Homo Sapiens
  misc_feature (1249)..(1249): n is a, c, g, or t
taaagcaggctggtacggtccggaatcttcgggatatcgtcgaccacgcgtcggtactgggacagcaaacactcacatttgaagttccttctggccaccagcttgcagacagctgttcagatgaggagccagcagaaattcttgagtttccccctgatgatagccaagaggcaaccacaccactggcagatgaaggcagggctccaaaagacaaaccagaaagtaaaaaatctggtctgctctggttttggcttccaaacattgggttttcctcttctgttgatgagacaggtgttgattccaaaaatgacgtccagagatctgctcccattcaaacacagcctgaggcacgaccagaggcagaactgcctaaaaaaacaggagaaggcaggctggttccgatttcccaaattagggttctcctcatctcctaccaagaaaagcaaaagcaccgaagatggggcagagctggaagaacaaaaacttcaagaagaaacaatcacgttttttgatgcccgagaaagtttctcccctgaagagaaggaagagggtgaactgatcgggcctgtgggcactgggctggactccagagtgatggtgacatccgcggcaagaacagagttaatcctgcccgagcaggacagaaaagctgacgatgaaagcaaagggtcaggcctgggaccaaatgaaggctgagaggtatggctcatcagtacaagagagatgcaaaaaactaagttggaaagtaaaggctacacacacatatggagcaccccatcccacagcacattacatccacctcacttcacagaacggagaacagagcagaaatgaccagaacacctttgtcaccatcacacagccctcctaaaatgggaaccaaagcttcccagctccctcaaagctttggaatgcaaagaaggcaccctgacttcccacaagacaccagaattcacacggtactcagaggcactgctggggaagttcgtcggtctttattagataaatttccagagacctgtccataatacccaacagaacatgactgtttctttgaggaaagggttataatgtctgtggtgtacaagtcgtttttggtataacttctttcctgctgcctgctgcttcccggcaaacatagttttcctatttcaggcagagtgcggtatattccaggaaacactgtttcctactcacttagcttacttctttgtgaatgcctcactaatggcaagtttcaagatgtttngggtgacaatgcacacatgctgggcaaaagggtgatggccagtggctggcagctgggccagcagaagctaggacatctgtgagttgtcattctcatctatccatgtccactggcctgccagcatccgccagtgccttgccagtgtgcacggtcccacactgtggcccctgagtcccctaatgtacacgctgcagccagaatgcagatggagctggcttggctgttccctggatgggcaataaagaaagtgctgcatccta

SEQ ID NO: 324099 - DNA, 980 bp, Homo Sapiens
ttacacatctgcagcagatttttattagatggaagataacaagcattacctcataggtaagtggtaagaaatggcaagtacagccaagccacagaggagtgaggacattactggctatgggaatgggtacttatgaaatctaagggttgggtctcctgatgaactctaactacccagtaagctcttctctttggcactcaatatgaccactgctggcatgaaagggtctacagtagctacttcaacttggcccaacagttcttccagttctggtcgagctttgaatcgtccccttgaagtcttcttcagtgtgctccttcactgacagtctgactccttcaggaagactgctttggattatttccaagaaaatttctgcaaacgtagcactcaaaccgctgatctgaaccactcgctcatgggtggtaagcactgagtcccaggagcattttgctgccttggtcctgcaactgcaacacttctatggttttggttggcattgcataactttcctcgactttaatggagagagagttgcagaggttgtgaacatactgggcataactctctgccagggtcatatcatatgcagtcagatgaatatttaaaaccccatattcataatctgtccccaaattaatggctctcacttccacttttcccttcttcttcttgggctcttctgctttaattaagtgcttgtactttccaatgccgtgggtgggctttgtcttgtagggccgactgatacttagtagaattccacctacagaatagatgggcttctctcctgaagttctaaaccttaagagagaaaaggcttgcttaaaaatggtattgttcctcaggcacagcaccttttccaaggttccgctcatcctttgctgctgcgcggcctctagctgtgcaaaccgaagaccggaccctgcagccgcgttcccagggcgtctgaaaacactgaaggaacggccttgaccccc

SEQ ID NO: 324100 - DNA, 1252 bp, Homo Sapiens
gggaaaaatgtttagatgtctttttgtgatgttatataaaattgtagatgactgtggtaaatgtgtaattatgtccattatgcttcaaagttgagttttcatctttgactccaaaatgtcagagggaggccgctctaaactaaaaataacgaaaggttgccaagtattaatactagttacctccctcttttcgtagtttttgtcatgtctgtcaacttactcgattgtgtggttgcattcagaatatttgaagtttcttacgtagacagaaataataaaaatattaactaggaaaaaacagtatagcaccaagccagtatttggtatctctctctagagcgagcaagagagggagagaggaggaaaaaatacacataatacaaacatacatgcatgcacacatacatacatatgtatacacacacataatttgaaaactgattggcacttcaacgatgctgaaattgtttttaaattgaagtttctttcttccacaaagcagccgtttctattcaaatggaaattcagtaccagagaataaatgtctatgtagtcatactgaatttagatagataagggctacagcatactaaatcgacaaccaaatttgtcatgtgactaaaccgttacttcagatgaagcttacattactgttttctgcttgtgtattttctgtagagtacttttacacagattggtaaagttcaggtttcagagaactgcttttgtgcagaaaatttaggttcttttttccacctttttggtcagtaaaacttaatggaaaaagccaagaaaaaaatattctgaacaaagctatagggttttaagttcagcctcccaacttagtcatcctaacatgattattttgtgatttggggtgcttgccctggtgctgttccagtccatgtgcatcctgagctgtgtgatctgcctcgaggctatgatctgagcaagcaggagataacattttcttctgcatcaagtgaggaaaaatgtgcttttggccatgtctcaaagacaggaccaacttcagattcccaaagaagccagctacagagcctctggaacactatggtcttacaagcagtactaaaatcaaccctcagcctcttcaatgccaaaggtatccctattggttgagaaccacatggtaatttttaatgggacttttatcagcaaatggagttacaggaattctctgtaatgagtgattctgaagaggtactttcctggaataattgtctacctgaag

SEQ ID NO: 324101 - DNA, 889 bp, Homo Sapiens
  misc_feature (668)..(668): n is a, c, g, or t
ttttcaggaatgtcggattttactggggattttgacaagaacaccacaaggtggtcagggctgaaggtggggggagcccagggactgaggggcacagaagagggagcagtggactctgtggaggccagggaggcttcccatggctggtcctggactgagccctgaatgaaggtgggtccagtggagtgcatggcagagtacatggcctccaggagcagcgtggaactgatgctaacagatcccatccagcagcgattggcgctctctttcaggtgcccagatagatgacaacaatcccaggcgcaccggccaccgcatcgtggcgccccctggtggccgctccaacatcaccagcctcggttgaacgtggatgcgcggaggagctagcctgaaggattctgggaatcatgtccatcccttttcctgtcagtgtttttgaaacccacagttttagttggtgctgatggagggagggggaagtcgaaggatgctctttccccttttctgtttaggaagaagtggtactagtgtggtgtgtttgcttggaaaattcccttgccccacagttgtgttcatgctgaatccacctcggagcatggtgttttcattcccccttcctagtgaaccacatgttttaggcattgtcttgttctgttcccttccacttnttaactccactggctccatgattctctgagtggtgtttcctttgcaccctgtagatgttctaggatagttgatgcatgttactaaattacgtatgcaagtctgtgagtgcgtctgaggggacatcgcccaggactgactgaaaaccgatggccgaaacctcaagcccctgaaggggcagtcccaaaaacccttaacgggggaaaaatgcctaactcttttg

SEQ ID NO: 324102 - DNA, 871 bp, Homo Sapiens
  misc_feature (178)..(178): n is a, c, g, or t
catggtaggctatgtctcagagctaattcttccagttcaatattctaagtaacaagatagacccctttcaagataaagtttaagggttttcttttgttttccaaaaagttctttgggggtttatttgagttttaatatttgaattttaaatattaactttatgcccctgtcttatctntttgtcttcatgagtttccaatcttacctgtatcatcttttctttgacaatcttctttatctgtcattttatttctgggtctttttggctcttcctttaatattgctttgtttgttttgcttctcttagcttttcttactcctaccttctacgtgccttaatgtacttgtgaccatatctattttcattaagatataatttagtattcatatctgtgaagatttatctttttgttcaaattatttcccaagttcagtcagttctcttctcatatatgcttgtagctttttcatttttattctgagtttttgaatttctgatctctggtgttcttttatatccacaattatttattttcaaattcatgttgaagtgtttagttacagtttactgtttcatggtccaagacagcctttttctgctggacaataatgtaaaatgtctttaaaaagtaatgtctaggtggtactagggggagttgtctgtcttcttcggaatcttgggcttgctgttgtatctaatgggccattatctttaacctcttgcttcctttgcgcctttcatccaccatgcctccaaaggacaccactcactttcaagatggcttcatctccatcagaagtgatgcctttggtcccattcattttctaagccccttccttttaacttcccagtagctactgctctgatccc

SEQ ID NO: 324103 - DNA, 1011 bp, Homo Sapiens
  misc_feature (559)..(582): n is a, c, g, or t
  misc_feature (722)..(753): n is a, c, g, or t
  misc_feature (764)..(764): n is a, c, g, or t
  misc_feature (766)..(766): n is a, c, g, or t
  misc_feature (769)..(769): n is a, c, g, or t
  misc_feature (796)..(796): n is a, c, g, or t
  misc_feature (837)..(837): n is a, c, g, or t
  misc_feature (889)..(889): n is a, c, g, or t
  misc_feature (904)..(904): n is a, c, g, or t
  misc_feature (914)..(929): n is a, c, g, or t
  misc_feature (968)..(968): n is a, c, g, or t
  misc_feature (987)..(987): n is a, c, g, or t
ggtgtgatcccaatcttgaccccaaacagtacaaaatgtgcttggggtccaaagcatcgacctatgggtccacccagcagctggctgagatgtggctggaaaaaaatgatccaagttacagtaaaagcagcaataataatggctcagtgaggacagcctaatgtccagctttgctggaaaagacgtttttaattatctaatttatttttcaaaaattttttgtatgatcagtttttgaagtccgtatacaaggatatattttacaagtggttttcttacataggactcctttaagattgagctttctgaacaagaaggtgatcagtgtttgcctttgaacacatcttcttgctgaacattatgtagcagacctgcttaactttgacttgaaatgtacctgatgaacaaaacttttttaaaaaaatgttttcttttgagaccctttgctccagtcctatggcagaaaacgtgaacattcctgcaaagtattattgtaacaaaacactgtaactctggtaaatgttctgttgtgattgttaacattccacagattctaccnnnnnnnnnnnnnnnnnnnnnnnnacaattgttttaaagccatttcatgttccagttgtaagataaggaaatgtgataatagctgtttcatcattgtcttcaggagagctttccagagttgatcatttcctctcatggtactctgctcagcatggccacgtagnnnnnnnnnnnnnnnnnnnnnnnnnnnnnnnngagacggagcnanctnctgttacccagggctgggaatgcagtngccgcaatcttgggctcactttaacctccacttccctgggntcaaggcaattcccctgcctttgcctcccgagtaggctggggattacagggnacacaccaccacggnccagctaggnnnnnnnnnnnnnnnnagtaggagacgggggtttcaccatgcaagcccagttggncacgtaggggttttaaagncaaggggtgtgaagaagggacatg

SEQ ID NO: 324104 - DNA, 979 bp, Homo Sapiens
  misc_feature (16)..(16): n is a, c, g, or t
agaactgtgttggaancagagagtccctcttccgagcggtggagaaaagtgtgtgattttcctacaaatacggcgcgtttgtatagaatgcgacgtttcgatataggtaggggggcctgggcaagcggtgtccccgagtaggtgtatttctaagtaaaacaactgtgggactttttgtgtctctcgctcttttaacttagaaaaggtagtgggaaggccaaaggagcagggtgggtattattgcccacggggttggtgtgccccaagaagccacgggcaattggggggaatttcagggaggcgctttggtaatggggactttaaccggggacccggtgggatgggtttctttaaaaggtgggttgtgcccatgttaccaaagcctctcagtgggctaaaaaacccagggggcctccaggatatatctttctgggttttttcaaatgaaaatattctagcgaaggattgaagccccacaatcccagtgaaggagatggagcccaggttattttgccaggttagggggtccgggaatgatctggcccgcccaaatggaaaagcctgtgatcctgagtgggcagccactgtactgaatgccccttttctgcacccacgggccttttattgggaaatatccggccgccgcctgggaattcaaagaactcccataggaatctgttgggtagcttgtgggtggtccttggcaacaggaccatttctcagggtggaggtctcccaccggttggtttttcctcttcatttttgctgggtgttgcacttggcagaggggggatatgctggttggtgaactggccacagcaacacctgttagagtctttcatgctaggaattacaaagatacattcccgtttgcaaaaggttttctctatccaagatttctgaccctgccacagcagtggaatggagagggcacagctcagggctctttcagcctcctccttggccagggcagggaccc

SEQ ID NO: 324105 - DNA, 798 bp, Homo Sapiens
aataatgggagaaaaagaatttaaaaggtgggagtggggaaatgggttccccaatgccatttgttccagggatcctttactcattctgtgatgaagagaaaggtggacagttcccctggcttccctgggggtctaggagacttgggcttggctgaagagggacagacactcaggggcagggctccatgccatcagcttatcagacagccacctttctcccttgaagggattcttgtcctcagggatgcctttgagaaaaggatcgtttccctgcttgggcctccacgtactccttgatttcctttcccgctttggaaatcggaattcttgtgtttttcacttctttcttcagctgctccacctccatcttcaacaggtccttctcgctgagatcctgggccatcctgccctagacagacctgatcctgccacagaagagcacactctccaagtcacttgtcctggactcaggtaagatagtgtttgagcctcctagttcttcatcagctgaaaatcttcagataaagcagatggcctggaaaccaaaatctctgatgcctaagctgatcataggctcaaagttctaagcccatcacccgcttgagccttcaagccctcactacagcagagcagagagacagacattctccccacaaaaacaaacgcgaaaacagaagccaccttttcaccaccttgccttgcgttagcctcacacttttggtgacctcactagcttagagcccgcagcgcttctatttctccacctccaccctgcagccccacttaccccgcttcccc

SEQ ID NO: 324106 - DNA, 1263 bp, Homo Sapiens
  misc_feature (208)..(222): n is a, c, g, or t
  misc_feature (340)..(541): n is a, c, g, or t
  misc_feature (543)..(618): n is a, c, g, or t
gggaaaaagaaaagaagggggatatccggggaggggatgagggaaaatcatgggcggaaaatagccggacgtggtataaaagagggtggatggagagggcggaataacgaaaaggcgggggaaaaggcgtatataggatatagggggggtaaaattgagggaaatcggggggatggaggcggcttaaagagaagaataggacgcgccnnnnnnnnnnnnnnncggccagcagcgggggacaactgtggggtggggcggttcagagggggacgaggggaaaaaacggggtgacggagaaagcgaagcttgtgggcgtctccggaaataaaaaaaataagannnnnnnnnnnnnnnnnnnnnnnnnnnnnnnnnnnnnnnnnnnnnnnnnnnnnnnnnnnnnnnnnnnnnnnnnnnnnnnnnnnnnnnnnnnnnnnnnnnnnnnnnnnnnnnnnnnnnnnnnnnnnnnnnnnnnnnnnnnnnnnnnnnnnnnnnnnnnnnnnnnnnnnnnnnnnnnnnnnnnnnnnnnnnnnnnnnnnnnnnntnnnnnnnnnnnnnnnnnnnnnnnnnnnnnnnnnnnnnnnnnnnnnnnnnnnnnnnnnnnnnnnnnnnnnnnnnnnnccattatcctggttttattcaggaataggatgggggtggggagggccttaagtgggcccccccgtccagggtgtagactgactacattgagtatcgctccaacaccgaacttccctttaacggtttaaaaaaagggtcatgagtgtcaacacagttcagcagtgttttcatgggagaccttcaggcaggcaggaggacatcctcctctctgctcaggaccaccacgggagttctaggcactccacctcactgttcttcagacagctgtgatgtgagcaggggctaggccggtaatcaagggggccagactgagccatgccacacccttcctcctagtccccatgctctcctgggagcctggcagctctgcttacttccgtttgtgttttttcttttgttccttacgttgctgtgctctttggtccttcttcatccttgagtccaccaccttgaaatgacctctgactccagctggccggcgcactttgcggcccacaccttttttggctacaacgtaggtgacatggcgtttctccttgccaagcccagccttcttgtagagacttcgcagctgtgccactttctctcgttctgagatgtccactgtgttcaccacggcttctgccttcttcctggtctgctccc

SEQ ID NO: 324107 - DNA, 806 bp, Homo Sapiens
gggggagctgcaggtccctttaagttgccatagtaatgccagaaggaggggacgggttttttcttgtaaaaatcattggtgtatacaggatggctggcagggtaacaccactatttctacgatatctacttattaatataattttatgttaatatcccattctcctccgccataatcaccataatgttcaaattttaattttgtattcattttgaatgtttgcatgtgaaaacccaactaatctattatttcaacattaagcctatttcttttgaagcaaagctaattctgctattttataaaagcaatggagactcatttttcaggatgcttaaagcacagtgcttaaggttcatgcttgctgctttgcttgcacttctgcttcctttgaaccaggtggggctgtcaagcctaagaaggcatacactgcattattttctctggcttcaaagaaggcatcatagtccccgcgatactggctttcattgaaaatctgaggtggcagggggtaacctgtggctggtcgactattttcaggtacattttctctcatccacttccgattctcttcattggctgcaatatctttttcttcaaatcctattttgttggcttctaggaaaccaagcacatcttgttgtttcttcttaatcgctgtagagccagaggaagatgcaatatatacacggatcaccatcctgggaacagcggctgcggttgtttgggtcctgaaaagggctgtggagcagctgcagcaatggctggaatccagctaggggctgaaacagcggttggcagagaagccc

SEQ ID NO: 324108 - DNA, 382 bp, Homo Sapiens
  misc_feature (18)..(18): n is a, c, g, or t
  misc_feature (24)..(24): n is a, c, g, or t
ccagggaagccttaaaanccacantgccttaaaggttccatggcttgcctgcctttggccttgcacttcctgccttccctttgaaacccaggtggggctgtcaaagcctaagaaggcatacactgcattattttctctggcttcaaagaaggcatcatagtccccgcgatactggctttcattgaaaatctgaggtggcagggggtaacctgtggctggtcgactattttcaggtacattttctctcatccacttccgattctcttcattggctgcaatatctttttcttcaaatcctattttgttggcttctaggaaaccaagcacatcttgttgtttcttcttaatcgctgtagagccagaggaagatgcctgtgccgaa

SEQ ID NO: 324109 - DNA, 779 bp, Homo Sapiens
  misc_feature (55)..(95): n is a, c, g, or t
  misc_feature (451)..(484): n is a, c, g, or t
  misc_feature (486)..(736): n is a, c, g, or t
cccataatgggccccctttgtgcgaaaaatctggggtacgccgttatactttggnnnnnnnnnnnnnnnnnnnnnnnnnnnnnnnnnnnnnnnnnatagatcgtggttttgagagtgaggtatttttctggttgtcagaactagggttttgtttattaaactggaaattatattaacaatgaaacaaatcacacggggcgggggtcgtcaggaagaggttttgaggctggggtgggaggcagccgggtttggctgcggctgctgtgaaccacaatgtcgtcgtattcatcctgggggcaaaggggaccaggcagaggggctcaggcggctgtcactttgcccaccacccatgtcctcatagagcaccctaagaattaggtctcgcctcaaagcccaagttcccctgctcctggctcaacctccccagtttcctagctctcagaactcccannnnnnnnnnnnnnnnnnnnnnnnnnnnnnnnnnannnnnnnnnnnnnnnnnnnnnnnnnnnnnnnnnnnnnnnnnnnnnnnnnnnnnnnnnnnnnnnnnnnnnnnnnnnnnnnnnnnnnnnnnnnnnnnnnnnnnnnnnnnnnnnnnnnnnnnnnnnnnnnnnnnnnnnnnnnnnnnnnnnnnnnnnnnnnnnnnnnnnnnnnnnnnnnnnnnnnnnnnnnnnnnnnnnnnnnnnnnnnnnnnnnnnnnnnnnnnnnnnnnnnnnnnnnnnnnnnnnnnnnnnnncgcgtgggtcgacgatatcccgggaattccggaccggtaccag

SEQ ID NO: 324110 - DNA, 1121 bp, Homo Sapiens; identical to SEQ ID NO: 63021
  misc_feature (375)..(377): n is a, c, g, or t
  misc_feature (379)..(398): n is a, c, g, or t
  misc_feature (401)..(431): n is a, c, g, or t
  misc_feature (434)..(464): n is a, c, g, or t
  misc_feature (471)..(472): n is a, c, g, or t
  misc_feature (496)..(496): n is a, c, g, or t
  misc_feature (508)..(508): n is a, c, g, or t
  misc_feature (774)..(782): n is a, c, g, or t
  misc_feature (974)..(974): n is a, c, g, or t
  misc_feature (1013)..(1013): n is a, c, g, or t
  misc_feature (1030)..(1030): n is a, c, g, or t

SEQ ID NO: 324111 - DNA, 720 bp, Homo Sapiens
  misc_feature (300)..(435): n is a, c, g, or t
ccgaggagggaacccaaaaccctttagaaattggttttaaattatttttttccccccggaaaggaatggggaaatttcctttcccccttctcctgttttcgggaaccaccagagggccttgtgggaaagcgcgccccttgggttggggtttgccgagtatttatttccgggggcttcccacctgggccaatgttcttccccacttttccctgggggtttccaaaaggcgaatccctcccctgcccttcaagacctcccccgagtaaggctggggacttacagggcagggcgtcacccatnnnnnnnnnnnnnnnnnnnnnnnnnnnnnnnnnnnnnnnnnnnnnnnnnnnnnnnnnnnnnnnnnnnnnnnnnnnnnnnnnnnnnnnnnnnnnnnnnnnnnnnnnnnnnnnnnnnnnnnnnnnnnnnnnnnnnnnngggaacaactttagaatgaaggaaatatgcaaaagaacatcacatcaaggatcaattaattaccatctattaattactatatgtgggtaattatgactatttcccaagcattctacgttgactgcttgagaagatgtttgtcctgcatggtggagagtggagaagggccaggattcttaggttgatctatctgtgggttatgacttcccacaatagccacccccggcccccaccagtccttttattggctctggatggaaaatccctacccatgtgatggtcccc

SEQ ID NO: 324112 - DNA, 802 bp, Homo Sapiens
gaaggattcatcccatgaaagttgagggaagccataatgcagctccctcatccatttcccacagtagggggcggcaccttgaacagctgagggtttcagtggggcccatgtaacttggacttcttcctggtgtttcggggaggctgacctgtgggtagggtgggtgtcattcctgccccactgctgtcctggctgctttcctcctgtgggtcttcactatgaagaagatgaggcagagacaaagagcgagcagggctgtaacaccagctcctccaatggccccatgaaccactcctgctctggtctcttgtttccctgagccatctcctggaaagataccagttgttgggttctgtggaacataggtgacgttgagctggatggttctctccgtagtcacaccagctccagcgaacttcacctgacaggtcaggttggtgccgtggtcctggggccgtggggtgattatgagcaccgaggagtgagtagtcctggggcccagggaggtgggggcagctgacaaccaggagaagatcgggggtgttccctgctcacaggcccaggacacagagcaggtcaggtttttggagtggccgggttctagagtgccagggatgaggattttgggcctgtgggtcaagtctgtcacatgcacagagagctggggagatttgtaactgtatttggtacttcctctctccatccgaaagaagtatgaaccattatccctcctcctggcgtctacgatgctcagggagcagttgttcctactgggatccccaaggaggcggaatctgccccc

SEQ ID NO: 324113 - DNA, 513 bp, Homo Sapiens
  misc_feature (128)..(223): n is a, c, g, or t
aaaaaaaacaaagtacaaactttattttgtttctttacaaaggcacggtggcctcttggtttttttctccccactttcttaacaaaatataatagcttctccttgaacacgaagacctcaaaattgtnnnnnnnnnnnnnnnnnnnnnnnnnnnnnnnnnnnnnnnnnnnnnnnnnnnnnnnnnnnnnnnnnnnnnnnnnnnnnnnnnnnnnnnnnnnnnnnnagagagacagacatttttggggtggaagatgagacctggggttagtggaatgttggcaaggctacagagccctcctatcacttctttctctgttttccagaaatgttgcaaagagggcaccttctgagtgggcaccatgaaatactccatagcgatcggcccccctcctctgcacgagccaggtcccgcgatcagccggagaatgcaagatggaaatccgaatcaaagggcagcgccggacggaggtgcagaatcggccggtcccagatgctggcggcggcggcggcccc

SEQ ID NO: 324114 - DNA, 1240 bp, Homo Sapiens
agatccaccaggcttacttgaaatatgccttggtcatatgtacatgtaatgattattgcttagtggggaaaagctggtgttctttgttgttgctgtacaagtgttgagcaggtggttgtccgcttcactgaaaagaacctgactggaccaacaatggggaatgcagatttggagctttcttgacattggcctgttttttcccctgtaggagaactgcgacacatcaccaagctgaagccctggagcctctttgatgtacttgtggaaaagtatggctggcccatgaagatgctgcacagtttacagatttcctgatcccgatgttaggaatggttccagaaaaacgagcctcagctggcgaatgccttcggcatccttggttgaattcttagcaaattctaccaatattgcattctgagctagcaagtgttcccagtacattggacctaaacggtgactctcattctttaacaggattacaagtgagctggcttcatcctcagacctttattttgctttgaggtactgttgtttgacattttgctttttgtgcactgtgatcctggggaagggtagtcttttgtcttcagctaagtagtttactgaccattttcttctggaaacaataacatgtctctaagcattgtttcttgtgttgtgtgacattccaatgtcctttttttggatgaaaaatactttcccctttgtgttttggcaggttttgtaactatttatgaagaaatattttagctgagtactatataatttacaatcttaagaaattatcaagttggaaccaagaaatagcaaggaaatgtacaattttatcttctggcaaagggacatcattcctgtattatagtgtatgtaaatgcaccctgtaaatgttactttccattaaatatgggagggggactcaaatttcagaaaagctaccaagtcttgagtgctttgtagcctatgttgcatgtagcggactttaactgctccaaggagttgtgcaaacttttcattccataacagtcttttcacattggattttaaacaaagtggctctggggtataaagatgtcattctctatatggcaactttaaggaagaaaagatatgtttctcattctaaaatatgcattataatttaccaagccccattttgtgatttttgcataattttttaaaagtaccttttaaagaaggagccatttcccctttaaaaatgtgaagggctccaataacctgg

SEQ ID NO: 324115 - DNA, 1249 bp, Homo Sapiens
tttttaatgtcaaatgtttatttctatgccatagttgcctcagcacaatttgtaaaagaaaggaatccaaaaaaatgaattttttttagtcaggatattttctctgcagttataagaaagaaaataaacaccatgataccagaatcaccatttctttcacatcatcactctagtaagttgcatctaaatattttccttggttgccactttttttaggatggagaaatatccacaggaaaaaatgtctgaattcattaaaataaccttgggatagtctttgccagactgtatcgagaacatctttgtttgggtatgctatatcgctaattgccatattcttattatttaatataacaggcatactttattatataaaacaaagtgcactaaagatgaacaatgttacaaaccaactgaaatttggtgtatcttaaatcttcgggtgatgattagatagtagctgaagcgtgggtatacaaatttcttgttaatacaaatgcaacttttttctgtgatgaaaatgcacttagtagcctagtactttttgctttagcagatagatagggcatccaatacaactgaaacaacctgataaccaaattaattttatttttcaataaaaaggaatgctctggttttttaactggctccttgaggaagccagaagatggcatctgctctttaaacaggcttctcttatctgatttgagacacaaatccaccaagattctttcttacagtggaagtaggcaccacccctcagatcacgaggcccctaggaagaagcctgtggaaatcagcctgtgatgtgtggtggtgggccagcacctagaagacacatggtggttgtgcacataaatcccttcagcggactcagtggaaggatgagaattctgtaagttcatgcacattttattgagtagtaatataaaatgctttttctttttcattgttacaagtgcatgctttgattgccaacatgtcagaagtcaaattacaaaggcaaggctttaggctgtagtgaattacttgggcacttatacaattgttaaaaaatatgaatggacttttgttgttgttgttttcagaatgaaccagttgtaacccgtaactgatatacaaagggaaaaaagtgaaaaaagtacatattttgtggcacatgacagaacagaacaaaataactaaactgttatgacattaacagttgccatgcatttagagtttcacatgtaactacaaacttattacc

SEQ ID NO: 324116 - DNA, 672 bp, Homo Sapiens
  misc_feature (23)..(23): n is a, c, g, or t
  misc_feature (31)..(31): n is a, c, g, or t
  misc_feature (43)..(43): n is a, c, g, or t
aaccaaattccctggttaaaatnacaaatgncaaactcctttnccctgtggatggaaaaatgccaccttaagtagcccctagtacctttttgcctttaagccagatagatagggccatcccaaatacaactgaaaacaacctgataaacaaattaattttatttttcaaataaaaaggaatgctctggttttttaactggctccttgaggaagcccagaagatggcatctgctctttaaacaggcttctcttatctgatttgagacacaaatcccaccaagattctttcttacagtggaagtaggcaccacccctcagatcacgaggcccctaggaagaagcctgtggaaatcagcctgtgatgtgtggtggtgggccagcacctagaagacacatggtggttgtgcacataaatcccttcagcggactcagtggaaggatgagaattctgtaagttcatgcacattttattgagtagtaatataaaatgctttttctttttcattgttacaagtgcatgctttgattgccaacatgtcagaagtcaaattacaaaggcaaggctttaggctgtagtgaattacttgggcacttatacaattgttaaaaaatatgaatggacttttgttgttgttgttttcagaatgaaccagttgtaacccgtaactgata

SEQ ID NO: 324117 - DNA, 1216 bp, Homo Sapiens
  misc_feature (55)..(55): n is a, c, g, or t
  misc_feature (58)..(58): n is a, c, g, or t
  misc_feature (120)..(120): n is a, c, g, or t
  misc_feature (131)..(131): n is a, c, g, or t
  misc_feature (173)..(173): n is a, c, g, or t
  misc_feature (287)..(287): n is a, c, g, or t
  misc_feature (882)..(977): n is a, c, g, or t
  misc_feature (992)..(1048): n is a, c, g, or t
gtggggcgatgatgtagacgacggcgatcgtggtctatgtgtcgattctcgaganaangtagatgtgttcttgacggcgaagaggagattattatatattgtgttgcgtgtattctcacnacggcgtacgnttcatcgtgtgcgtggtgagtcgctattgctgctgcgcatcnatttgttgtagttatatattatgatggtggtgagccctacaaagtgttgggactacaatgattgtgtattttatttgtgccgggattagtttcgttgtgtgctcttatggtgtnagaaatacttatatttatatatatcgtagaggcctcgtagctatgttagtcgcgtgcgcatagtctctatcttccgtctgctgcgatggtatattaactatgtattcttcgctagcgccgagacagtttgtgtcattgggacgttttccttacgtgtccttggtcgagtatattgtgtgtgtttttgatatatgttatcctcccgacttatgtctgtcttcatggtttctgttctgctggccgggcgtgtggtcaatttatctttatgaattatgatgactaccatattgtgttgtttgctgcttgtgtggtgatgttctccgtatatacagcccctcgacagacttcgtttatgatgtatattttacgtaacaccgactttggtttttcaccccgcgaggtgcttttatttttatttgtgtggaggatatcacaacaccctctgtttggtgcccactgtgctctctttttgtttgaagaattgaagaccccgtttgctacttttttctcttattggccctctcgcgccccacaaaaaaatgttttttataagaattttgttgtgggggtaggggcccttccacccacagtcaannnnnnnnnnnnnnnnnnnnnnnnnnnnnnnnnnnnnnnnnnnnnnnnnnnnnnnnnnnnnnnnnnnnnnnnnnnnnnnnnnnnnnnnnnnnnnnngtgtctgttctatannnnnnnnnnnnnnnnnnnnnnnnnnnnnnnnnnnnnnnnnnnnnnnnnnnnnnnnnttgtgagcaacagagatagtctttattcaaacgcagagagatccataacatggaaacactgacgcttccgaaaccgccccatttattcacttctcaagtggcccccgcttggatgcgccctcgggagagtgggctcagcacagcctagagcaccaggtctgaggtacc

SEQ ID NO: 324118 - DNA, 706 bp, Homo Sapiens; identical to SEQ ID NO: 152237

SEQ ID NO: 324119 - DNA, 931 bp, Homo Sapiens
  misc_feature (140)..(153): n is a, c, g, or t
  misc_feature (563)..(574): n is a, c, g, or t
  misc_feature (680)..(690): n is a, c, g, or t
  misc_feature (714)..(714): n is a, c, g, or t
ttcccctactccaggcagcattgatccctcaccggaactgagctggggttcagcaggggtgacccaggaaagccctctgcttgatcctgttgattttctactcttcagaaccagggccgtggaccctctgagaagggtgnnnnnnnnnnnnnnatcagcatctcactttcttctccattcagccccaaccccctccctgccatgctttccaccccaaggacccaccagcagggagcagacggcagctaattttggtaccacttaagggtccccccattctggcccccatcctctccctcaccccaattctttctcgctggagctgttatttcccaagaagccgcatcgcccaaggttggcacctctcctaacctgccacacgacagctctcacctctctaggaattgggggctgtcaggtcacaggggggatctggcatttttttatgacagtccatttctagatggtttgcctattaaagaagtgggggggaaatactgttttctccttaaccctcaagctaccagtctctcctcttccgcgtagaggaagaggggggcagnnnnnnnnnnnngctgaagtataaaaaccctcctcctcccgttattatttaagctactgccatcaaccccacccccataaagctgtgaaagccccttttgcctccgcttttgacagcnnnnnnnnnnncccccgtggggcaggggacttcgngatttttgcattttctggggttggtttttccctttccactcttgggggtctccgtttcaggcaattgggggtctccctccaccccaaagccacaaggtttccctttaaaaaatccctttgggtccaacccaggaaacctttgaattttttccgggcattttttgggcctgggggaaatatctgggttgggtcctcccccggggcttttgggcttccc

SEQ ID NO: 324120 - DNA, 789 bp, Homo Sapiens
  misc_feature (457)..(466): n is a, c, g, or t
  misc_feature (543)..(552): n is a, c, g, or t
cggaaaatggtttaatattggagacagaagcaaaaaactgcatcacacaataacatacattacaaaaataagttttgactgtttcaaactacacggtttatgttcccaatgaggacagaaggaatcagaaaaaactttgatctaaaacagcaaaaaagcaaaaccctaaagttttaactaatacatttatccacttaaagtgactgagtacttctaaatctaattaccttattgtgtaactgcacaatacagaataaaaagtgaaacttaccgctgttattttaagacaaaattctaatgctagatataagcaaagggaaaaaagaaatcaagccaaagtttttaattctcaaaagaaaagcaactttctttctatcaatcaatcaatcaacccgaaatcaaacttgaaatcagtcattgtcaggggcccaccagagcaagccacaaaaatttccannnnnnnnnnaatctccagtataaaaagttccactggtacaaaatgcataagtacaatcagttgtagaaataggaaagcctgcgtannnnnnnnnnggctcaaattccatcaaacaacaaaatccaaatgcatcaataaaacaaacaatactcaaatggtcttacagtttccactaggttgcattaactttggcttttctcagacaatatttaaaaactattttgtaattctaaacaaaatgattattaatctacaaacatcaattctcacagcacaaaaaaacaaatacattttttgtatgacattattcaaaaaggtaatgaaactacagg

SEQ ID NO: 324121 - DNA, 433 bp, Homo Sapiens
  misc_feature (15)..(15): n is a, c, g, or t
  misc_feature (41)..(41): n is a, c, g, or t
  misc_feature (188)..(188): n is a, c, g, or t
  misc_feature (344)..(344): n is a, c, g, or t
  misc_feature (351)..(351): n is a, c, g, or t
  misc_feature (385)..(385): n is a, c, g, or t
ttgctgcgaactttntagagccagtgtgcagatagaatttngctttgagggttcctgatggctttttagtctttaactgtgtgtgtaccagtctcacatttggcccaaacctcaggattctccctctgcctgtcttacttcatggtactagaagaccttcctcgccactctctccacatgagagagtncagctgccctttctcctgtgcctctgcaggaagaactctcttgcatggcacatctcagctcctcattgagggtatagttttctttgataagaaacctgggagtccatttactctgacctctctttaaatctatatccagagccactagcccagganaaacttnggtgacccgtaatttctcttctcctgctgtcctntttgctcttacgtcccaccccaacttcccctttaaattttacaggctt

SEQ ID NO: 324122 - DNA, 712 bp, Homo Sapiens
  misc_feature (128)..(140): n is a, c, g, or t
  misc_feature (153)..(157): n is a, c, g, or t
  misc_feature (159)..(191): n is a, c, g, or t
  misc_feature (193)..(256): n is a, c, g, or t
ggggggagaaacccacccccccttttcaggcccggtgttttcttcgggagaaacaataaaggccgagtttcccttccctcatggggccccggccccccaagagaaatgttttaaaaaaatttttcgannnnnnnnnnnnnctaaaaaattttnnnnntnnnnnnnnnnnnnnnnnnnnnnnnnnnnnnnnntnnnnnnnnnnnnnnnnnnnnnnnnnnnnnnnnnnnnnnnnnnnnnnnnnnnnnnnnnnnnnnnnatcttttaaaatgtagtctgtattattttcaccaaccaaaacacacataatatattttattataaaacattagcaatgttacttttgagatatgcaatctgaaaggtcacacttgtatttattaccaggaggaaataccagaggagtcacattagaaatcaaccagacagactcgtacgtggttatcgcaacttacacagcattaaatgcgggttgaagcagcacccgctccgtgtttcagacacggactttggggtgggcaaggggccctgtaagagggcttcctcctctcagtactggggctctgcgtctcacctgctcccatctccaggcccacggctgacacggtatgcacagccagggtttccagactgctctcctgctctcacagaactctgtctgctctctggactctgcccttgaaactgtgacctggacatgggggagacagtcccc

SEQ ID NO: 324123 - DNA, 693 bp, Homo Sapiens
  misc_feature (128)..(128): n is a, c, g, or t
  misc_feature (157)..(157): n is a, c, g, or t
caaattccaaaggggaaaaaatggtgctgggaccggtccttccttggaaaaaagacctttggaagttttcgccctgtcttggggccatgaaaacggggtaaagtgcccggttccacatcggcgctttntgggatggcagcccttcttcccgcagganccctggtagtctgacacggggctcacggtacgtcggagttttgatgtaggtgtggggatcagggaactcaggaaaatggctggggatgtgcggcgggtggggtcggttctgccctgcagtgagggccttgggggtcactggctgattggtcaccggaggagcagtgatgaccatcctctgagaccgttttgcataagcagggagagtgtccacattgaaacccatctcaacaagtgtgaccacgatatcggacagtgtgggctgggtcctggctgtgtgctcacagtaagacttggcacttctcccaatttctgaaatgtagctctgcagcatctctgtcagcgtttccacggatgctttctcggcactctcaaaccctgcctctgtcagcaaggagctcacaaccacctgcagggttctcctccgggccagatgatagttatcggcagggttagtggactgtttacttcccgatctcgttccggagccaccggccccagctgtggccgccgcgtcggccatcttgttctggcccc

SEQ ID NO: 324124 - DNA, 1373 bp, Homo Sapiens
  misc_feature (715)..(715): n is a, c, g, or t
ccatgcccttcggtaggtctaatttcaactacagattgaactaggggagataattttctttcttcccagcaaaagatctttaagtttcctttcttcggattatttgatcaagggaacaaactatattacaaacatggcacaaaatccaggctttcatttctagccaaccctcaaacaccaccaactacaaagaaaatttaaaagtctaatttgtaaccttcagataagtataaattagttttttctaggctttcattatttggcttcttatacaatctatcttgtaaagtacattcctctaaatttacattatctaaaattaaggctaagcattatttaaatcaattaatcatacaatattttatgacaatatgcacatatttataaaataacttttccaaaagcagtaatacctcaaattaaaaaagaaatcttttattgctttgaactatctgctaaaataaaaacacacagaaagggaagaggtttaacaggtaggaagaacatagaaaacccttaaaagttttaaagtagtccagttcacttcttccaaacaaaagaattcacagtgtctcttcaggtttaaaattctaagcattcaaattgccatagtgccctgcaaaaaatcgtcatatatgaaattcgcagacccttgttgcaagtgttctcttttcctaaagaaatctgtcaatgctcgaagcttcacacagcaagncaacataatcatcaaagaaaattctgccattcttgctataacgtttaacaatagtagttaatgtttgaggactcaacctataacccataagaccaatggcttgacgcaactcatgatgttctactgtgccacttccatctcgatcaacagtcatgaagttttccttccaggcattaagagctgcccatagctctttgaatgcattaaatcccatttttcctgtgtgatctctatccaacatggcaatcataattctgcaggtttccaaactgaagggagagtaagttccattaattccagactgtgtcgaacatctctgaagttcttcagcatccacttcaccatcctgtccagcaacagcactgaagtaagtatacacggagtcaccagctgaggaataagtgtctgaatatgctggcccagagtatccatcgaggagtatagctgggcctgtttctggcactggctgtcccatctgcattcctggcacctgaatgctaaaatttccaaaccctcctccgtatcccgggtaggccatgacgagcgggacgagcggagcgagcgtcaccctcgagtcgcgtccgcagtgctgggagaaaaagcacaggcgcaggtgcaaggaggcgcagctgcaggtgaggctgaaaggcgcactccc

SEQ ID NO: 324125 - DNA, 873 bp, Homo Sapiens
tcactgaacgggccatttaagaattagatttccaagactcccactccctgtgggggcccactaaataactgaatacattttaagagcaatcctacactgagggaaataacggttcctaaggtattctgcaaagaaagagtatcgataatgggaactggcaactgagcatgctaaatcaaattccatgaatacagttttcataagatgtctttactacatgcattttgctaatatttccctaaaatattcaccaactctacagagttatactttgtgttaaggtactattgagttataagggaaatagccgtatcaggtagctagtgacataataccagttgtgaaaattcagacaaaatgagtcgacaaatccccaaaaatggcaaattaagccctgtgacaaaataagttattggatcatacagaaatagcccaaatctggaaattttgaattaaaattgtaatcctgtaaaacaagttttggggtgaatggatttctttaataccaataatatttttaattcccaccacagatggatttgctgaatatgctaatgctgtgaatgagaaaacaattttggggtaggtatacccacaagtaatctgatgacaaaataaaccacagactgatgtcaaatggacaaaaaactgaaaatatgctgtgagaaatagacaaccaaaataatatagggggttgtggggtgtggcacagttaaggcatctaaacaaaaattccacatggctttggcttattaaaatattttacactatttttttaaaaaaagatttgaaagcatctgaaaaacatgcaaattgtttgaaaaccttgcatggcaaattcagacagtttgcaagcgtcaatcagatgtttga

SEQ ID NO: 324126 - DNA, 584 bp, Homo Sapiens
  misc_feature (196)..(196): n is a, c, g, or t
gggggggacattcgtaaacatagcattttattaacaaaatgtttacacctttcttacaacaaaacagtgatttagcatgttatactctataaaagtgtattatagaatattcaagctaaaacaatattatttaaaagtatggcaaatcaactttcatttgcaaactatctactatgagcataggcatgaaaacaanaatcttacaacaaaaaacaaaaggtctagttttcttttgtcagcatctataaacaatacagacatcatatggtttacatacacttaggtccagcccaaggttaagactgcaaaaataaagtcttcaaacatccacagaagcttggcaaaccaccactgcagcattccatgacaggtaaccaggccatgtgtcatgcagtaagtccaaggccataaatttgggctgtttataatagtgctacaaagcggccaaaactgtaagcaactgaattttactttcgtaatagatgctattataaaaaggcacaaatatcttattcctttcatcaggtcttgagaaggcatgacattcttaggagaaagagagattgctggtaggacggcttagc

SEQ ID NO: 324127 - DNA, 1048 bp, Homo Sapiens
  misc_feature (1033)..(1033): n is a, c, g, or t
tagacaaaagtattgggttttatttgcataatgtaaaaacatactttacataagactactcacatactttacaatgttacaaatatatatatgtatgaaagattcatgaaggcatttgatataaaacatacacagtatgctattttaatatacaaatgcttaaaagaaaatttagtcataagaattacaaaatcatcaataatttgcaaaagttttcattttttcttaaaggtcacattctcatcctttgggatgtacaaaaattatgtggtttacacagttttatccacattcaaaacatcacgttttgaatgtcttcagcatagcatgtacagtataaaatgtttccataggaacacaaaagaaactgtcactagtggcctgctgtcagatggcttctaattcatcagttagccatttttaggacactagtccagcttattgctacaatcttcaagttgttctagtcacccaaattataatgaattcaatgtataccagaatttaccaataaaggctcaaagagttatataatatacaccaatatacacaaaacagctattctgagtaaaatgaatattccatacttaaataagaaccaagaatagtaattttaggctactctattatccttgtgattggtatttttaaaattttgagcaaagtgcacagtgaatgaaaacagtcagcagacacgatccttctgtgaactctcaaattcctgccttagaatcacgtcacctgagaaatgagaaccttgagacctggtgcatatcaaatagcttcacatgtcaaacacacagggccgcttggaggcacattcatgggtcacaggaggtcacactgctccttcgaaaatggcaccattcactgtacagggcccctgtgtagaggcagcagaaccagcctccaggagatcaatgctgtcttaatttagagcaaacatggcatccttcagccatattcaagcgttggtggtccccgaacaagattgaagtagccagccagagcgccgaggtcgatgtagagagangttgcctcttgaagc

SEQ ID NO: 324128 - DNA, 796 bp, Homo Sapiens
  misc_feature (26)..(26): n is a, c, g, or t
  misc_feature (53)..(53): n is a, c, g, or t
agtgccccaaaggcttctgaaaaatncctgaaagagtttgatcaattttctgnatcccccatggaaaagtggtttcttagttgctagttcagcaaatatggtgcctatactccaaatgtcaactggagttgagtaacgagctgaccccagcaatacttctggagatctgtaccagagtgttactacctcatgtgtatatactctgataggtattccaaaagctctggcaaggccaaaatcagccagtttaattgttcctttgtcatcaatcaagagattttgaggttttaagtctctgtgaagaactcttctagagtgacaaaacacaatcccctgtaggatttggtataaataactcttaacaagtgaagaatccatgtactgaccaggagggatagaatccaagtatttcttcagatccatggaaagaaactcaaagatgagatataacctggaatcctgcataagcacatcctgaagactgactatatttggatgacgaagttcctttaatagagaaatttcccgaattgcagtactaggaaccccttcctcttcactttctagtctgatttttttcatggctaccacttgacctgtagttttgtgtctacccttatacacaactccataggtaccttctccaattttctctattttggtataatcttccatagttagtcaatgggtatggtagatcccggcttattattccgcggcggccgcagcggcagctacaacaaccgcgtcgctctccgctcaatttccaagagccagctttgaagccaagtgcccc

SEQ ID NO: 324129 - DNA, 704 bp, Homo Sapiens; identical to SEQ ID NO: 246311
  misc_feature (74)..(74): n is a, c, g, or t

SEQ ID NO: 324130 - DNA, 915 bp, Homo Sapiens
  misc_feature (59)..(68): n is a, c, g, or t
  misc_feature (885)..(885): n is a, c, g, or t
ccccccacttaaagaggggaaaacccattgtaaaagtgttttttaccatttctcttttnnnnnnnnnnggtttaatttttttaccattccaagaaattttaaacttttaattactgttccagccaaacagggggccccaccccccagttaaataaaggaaggcacaatttaaaaataaggtttgattttcaccatagatttaacatttggtgggttaataaaatatcggacagtattacaatcttacaatatttacagtaagaaaaatctagagtaatatatacctttcacagcaggattcctttttttaaaatttcttccagtttgggattgtgtatacacaaaaagctcaaaataaagcaactctgcaatataatcttaaaataatggctactgggggaaattctatcacaaccattgaaaataatggtgacttctcacggagtctgtggcatctgagaacccagttaattaaccaaagtcttgctcatattagcctcagttacccagattaaagcagaactccggccttccctgactgctgaaaacccaacagattttctcaacatgctataaggaaagaggaaaaattggtttcagctcacacctcatggctggaagcctcatggaagcctccagccagtgcacactccccaacttatgctaaaagagggccaatttcatccccacagcatcacaagagtccaccctccaaccacacagtgctctgacaccaagctcacccattcctcaactcttgtgccttaggataacacatgaacttagcccacataatacacaccagcggtcttagagacttgagaccagggcaaagaaacagactagtgtagtttgcactgagatcagtaagaaaaatgggaagtngatgcacatttccaattagaatgacaagaa

SEQ ID NO: 324131 - DNA, 450 bp, Homo Sapiens
tttttccatgggagacacttcttttatttaggaaggaggtctttcctactggcgccggctcctgccagaggtcggggtgacagcaggatcagaagcactgctctcacacacagtgggagtggaggatggcttcccgcagcctctttagaaagcccaggagttctctttatttcagagaagggcatttctatacaagacatcattccattacagtcgtcacttccaactacaggctcagggagacgactcttgatattcataggtatatatttactttaatcatattttagaaatcagctcttccacactaagatttacaataaaaataaaataatttgttctgtaaactatagtagaaagtttcaaatgtcttaaaaactatcttccatacaatggaaaaaggcttttgtgttcttttgggcaaagaagacccaaatacgctgagagacc

SEQ ID NO: 324132 - DNA, 1200 bp, Homo Sapiens
  misc_feature (80)..(80): n is a, c, g, or t
  misc_feature (90)..(90): n is a, c, g, or t
  misc_feature (213)..(213): n is a, c, g, or t
taaaaaaataattttagctttaaaatacggatgagtatacatttctggatacaattatacaattttgctatgttttaacntttctctagnaatgttcatactctgaaaaataagatcaaatgaagctcacctgctttacaatatacatttttctaagcacacttgatatatatgtaaatatgtgtcagagtctatacatatatatgcagtatnttccacaattctctggaatgttatattaaaatctgatgttattatcactattaaaatatttttccagaaagtttctatttcattttctcaatgtcgtctcactttcttggatcttgatttctttctttttacactgtattttttctcaaaaagtttcttctcaactaagctcacttcttcatggagaagggaagtctttattctgagcaggaaggagaagagatttagtataaactgataactcagagaataatttgattcttcataggttgtcacatgtgtacaatagcatctgcagaatttctgtgtactaagccaatataatgaattcttagtcagcagtgattggcctttctctttcaggactccctgaaggctgtgtccatggaaacacgttctatcagtgtcctcttcagtccagttgaactgaaaacttgaagggcttttttttccagcagttgctgttgactcgaccagtgtgctaaattgtttctgtagattcaccaccatttctctttttttatatgctactggtttgtcgacaaatgagtagtagagtggcttttcacttttccacaggtacttggcccttgcttcttcccatttttgttttttctcatcaaaagctttcttcataatttggtaccactttctgaaatcaaaccatggcttatcttttttgttcttttcattatgcttttcagcaagattagacaaagaccactcgaaactgtcatccaatagaaagagcagtttcaataccaccacaatgatagctacagcttgtacatcgtacttaacagcttttgccattttggctataggatcaaatgtcagaaaatccacttctcccattccagtcatttttaccacgtggcaagttaagctatgcatttcatcagggaggttgacttccatcaagtatttcatacacagtatgttgggatgaagatagcagtcttcagttatgtctggaaaacgaggccc

SEQ ID NO: 324133 - DNA, 872 bp, Homo Sapiens
  misc_feature (98)..(98): n is a, c, g, or t
  misc_feature (169)..(169): n is a, c, g, or t
ttgttcttttaggaagtccgctggttttgatgccgaaaagtttacaggattctccttccaggaggaggatggccagtacaggcagcttaccactgacnatagtcccttcaggatgtagcgcgcagatcgaggctgtcctggctgtccatgcgctgtcatgatcctcgcnatgtatccataagctgtcaacagttcttccgatgttggaggtcggtggggatcttcatcctctctaggcgttatgattagtgatacaggaggaacatgatctctcatctgatcaattgggaggattccgctgcaagtcatttctgccttggtagacacaaaagatggcatcaccaagccaggacagtcacacaggcagaggccaggctccacatagagagtctgaaagtgctttgtgtgaccaggtgtggcagacacagatactttcttgttgcccatgatggtgttgattgttgaactcttaccaacattagggtagcccaccagtccgaccgtaagttgcccatctttcacctttctcccagtgtgtagctccttaaagagctccagtaactcctgcttggataccagatggctaaaattgtgtatctgcctcttctgtggggttttcctgctccgagcctcagaatctgcagtagagctttccttccagtcctggctgcagtcctcttccttgggaccgtcttcttctgagcacgtctgccagtcgtcttcctcctcctctggacagtcctcatactcactgtcatcttcatccgttgtgggattttcactaagtgaaggagaatccctagctgggagatgttcggattcactgtgggaaatttcagcctggtcgaaactggaatgtccaaactcagtcc

SEQ ID NO: 324134 - DNA, 2412 bp, Homo Sapiens
  misc_feature (177)..(189): n is a, c, g, or t
  misc_feature (223)..(223): n is a, c, g, or t
  misc_feature (403)..(411): n is a, c, g, or t
  misc_feature (441)..(450): n is a, c, g, or t
  misc_feature (616)..(618): n is a, c, g, or t
  misc_feature (624)..(727): n is a, c, g, or t
  misc_feature (2261)..(2261): n is a, c, g, or t
agggggcggtgaacattatagcaggcagactttcttttcgtgcccccaggtctctcgcccacgcggtgggcgaaatattgtgtctttgccccaacaggcgcgaccacagggcgttgcgggcaacacctcccctgtgggtggtaatatagagggtgtgcaaactaaaacccccatctnnnnnnnnnnnnncctctgcactggttgctgccacaagagtatgttntatagtgaattgttgcccacaccatttttctcctttttattaagggggtcaaaagggcggcacggggggaaattatgttatgagttttacgggacttccccctggggagggatcccctgtttgaagtacattcccccaagtaattgggccctccacaacaaccgcccctccgaggaggannnnnnnnnaaaaaacaccattttgtgtttgcccccgtnnnnnnnnnnttttttttatgggtggggaatcttcaaccccctcattgtgaattggccgggaggtttctcgtagggggagacactttatgtggcgggtgcgctccttccctttggggggcgcgcgggcgcccaacgaaggggttcagaaagtttttttgtggggccccgtcccccnnncccgtnnnnnnnnnnnnnnnnnnnnnnnnnnnnnnnnnnnnnnnnnnnnnnnnnnnnnnnnnnnnnnnnnnnnnnnnnnnnnnnnnnnnnnnnnnnnnnnnnnnnnnnntttgccagttctattattaagaattttatttttgagcattctatatacatttataagtgtacatatgatgtattttatgtacatggattaggaagttcttcaagggcaccattaagtgcccactggaaaattttctacaagagaatagtttggaaaataacagatcaatttaggagactaaaactatacattgatataaagaatggatataggttttctcaatccagaatagtaccctcaccccctctgccctcccctctcctagatggtcaccatagggcagtaaagtttaatcagttgagcacggagcttcagggcgctggcacccagactatgatggagagaaggaaagagcaacaaacaaacaggcacgttggtagttggctacagcctgggtataagcccatggcatcttcttcccccgagactggggatgtcccggcaactgagtaagggatgggcctcctgctgctgacttctccatagtgaactcaatctccttgcctcacaagaacatcagagaggtcctctgttccttccagtttagatttcttttcattggctaaatgtaggagacaggcaaaagccagaggtatggagaggttctgagccatgacagggggcaggctcctctgcaggtccttcgtgagcccgctaagcatcttctcgtcagccacttctgccagggccgcttcttttccagcttcccctgtggtttgcctctgcatctgcctcctttccggagagcgctgtcagcagactccacatgctctgcttcagtttcttcatgtccatctttttggcagtcttggcatagtgaatttcaattttatttaccttctgaggctcagctaccaagtttgactccccatatgttgtgatgtctaatccttgggcttctggagtgtcaccattctgttgtgctgtctgtaatccagggcaaaagttggaggtgtcgttagggttgttgtaatcatagtcttcaatttcttcataatgctcagtctctgccctatggccctgggccatcttaagtaacctggtgcctggtttgaggtgaagctggaccagagtgtcaacattgtagttgaaatctgtaggaagggtggtagctctccaattctggttctccaaagtggacttggtcagaatagtagcagcctttgtttttctaaaatatacatcaaagtcaatatcatcttcaaagtcaatttcaaaatctttttttgtactcttctttttgttttctgattgggaaggagcatcttgtttgcgtcgaggcctaaagcgccagtgatccgggccagccaacatcgacatggtccgaggactgaaataagaatattctccaggtttcatagacagaagggggcacatggtcctgatgtctccatccccaagggaaatcatttcttcctggcagctctgaacctggcagggctccttccagctcctgaactcttcatgatccccaactgccggtgtggtcaaggttcatcgttggcatcaaagtcatcccccagggacccatcgnggaagtctccacagtcactctcgtcaacttcagcattgatgtcaaatacctggtaattcttcttaaacttgtctaccagggccgacacagactcattatgtgtttcactgtcccactgtgtaaactgggaacccggccagggaaagggcag

SEQ ID NO: 324135 - DNA, 660 bp, Homo Sapiens
  misc_feature (79)..(162): n is a, c, g, or t
  misc_feature (187)..(200): n is a, c, g, or t
  misc_feature (231)..(252): n is a, c, g, or t
ttttataagcaactgattaatttaaactgaaaaatgatgaagtaaaggcctacagctctaagaatcatttctaggctgnnnnnnnnnnnnnnnnnnnnnnnnnnnnnnnnnnnnnnnnnnnnnnnnnnnnnnnnnnnnnnnnnnnnnnnnnnnnnnnnnnnnagcatattttcttccaaagccatcnnnnnnnnnnnnnnttaaacacattatacaaactacacgacatannnnnnnnnnnnnnnnnnnnnnatcagaaataagttaattcagatgtacatattcagaaaacaatattgaagttaaagaatatgcgacttaaaaatcaatacagcgtccttttcgttcccaatctccatatcgggtaggttctgggcccctgggtccacctttttctttggtcactggattaacatcatctggaaatttttccagtggttctttctctaaatgggaatcctctggtgcatcaaaacgaccttctggtaacttcggcttcttaagggactgtttgacaagttcagactttcctccttgagaagaacttgttttcctcagagaatgacacagaaggggtgatcttgccgctctccacgccgtggccgagacccagctaagcaaccagggaagcctcgatggggtcatggcgccgactccccc

SEQ ID NO: 324136 - DNA, 376 bp, Homo Sapiens
tttcaccaatataaacagggccgttgaccctttcattttattaaaatggcacataattattaaaacagcatactgatcactttatacttctgctagcccccgggggagctgctgggggtggcatgtgagtgccctcccgaaggttacagattcatgcattgagcaattcgtgttctttatcggttttcccaacagcatcaggatttgagagtgggtcgaggtcagcgaagaggctgaaccaggcagtcaggtctgaggcagccttagcaggttcttgtagcgaggcctgtaagtctttcatattttggtctaaaagctgcgaaggaaggaaacctgagcctttctgggccttggggtctggctctcccagggcccc

SEQ ID NO: 324137 - DNA, 1232 bp, Homo Sapiens
  misc_feature (51)..(143): n is a, c, g, or t
  misc_feature (168)..(177): n is a, c, g, or t
  misc_feature (236)..(350): n is a, c, g, or t
  misc_feature (402)..(414): n is a, c, g, or t
  misc_feature (548)..(567): n is a, c, g, or t
  misc_feature (575)..(583): n is a, c, g, or t
  misc_feature (587)..(587): n is a, c, g, or t
  misc_feature (591)..(601): n is a, c, g, or t
  misc_feature (603)..(610): n is a, c, g, or t
  misc_feature (617)..(617): n is a, c, g, or t
  misc_feature (620)..(628): n is a, c, g, or t
  misc_feature (632)..(639): n is a, c, g, or t
  misc_feature (642)..(643): n is a, c, g, or t
  misc_feature (647)..(647): n is a, c, g, or t
  misc_feature (651)..(651): n is a, c, g, or t
  misc_feature (653)..(653): n is a, c, g, or t
  misc_feature (659)..(659): n is a, c, g, or t
  misc_feature (661)..(662): n is a, c, g, or t
  misc_feature (664)..(768): n is a, c, g, or t
cccaaccaccccgggggggtgttccccccccttttattaaaagggggggcnnnnnnnnnnnnnnnnnnnnnnnnnnnnnnnnnnnnnnnnnnnnnnnnnnnnnnnnnnnnnnnnnnnnnnnnnnnnnnnnnnnnnnnnnnnnnctaagggttactcacacgccctgtnnnnnnnnnnctccccccgcgcgcggggaggagtgtttattaattattattcccccaccactctcctcnnnnnnnnnnnnnnnnnnnnnnnnnnnnnnnnnnnnnnnnnnnnnnnnnnnnnnnnnnnnnnnnnnnnnnnnnnnnnnnnnnnnnnnnnnnnnnnnnnnnnnnnnnnnnnnnnnntccctggggttttttttataaaaacccctttgggtgtctcccccggcggggnnnnnnnnnnnnnggggagaggggaaaacccccactcttttttgtggcgcgggttttttctttgggagaaaacaaaatgcccccttttttttctttcttcttggggggcccccccgccccaagaagaggtttgaaaaaatttttttnnnnnnnnnnnnnnnnnnnnaaattttnnnnnnnnntttntttnnnnnnnnnnntnnnnnnnnttttttnttnnnnnnnnntttnnnnnnnnttnntttntttntntttttntnntnnnnnnnnnnnnnnnnnnnnnnnnnnnnnnnnnnnnnnnnnnnnnnnnnnnnnnnnnnnnnnnnnnnnnnnnnnnnnnnnnnnnnnnnnnnnnnnnnnnnnnnnntagcagttgaagtgatttatgcttgatttctaaatgcaacttatgtttatacataatttaaaactcaaagaaagcatgcttatacaatcatgtgcaactttaaactttaagaactctggatgaatacatggtggcaacagtccatgacacctgaaaacatcatttgtggagtggcgtagagttcagtgttcgcagtcgcatattacaaccatgtttcacacagccctgctcggtttgattttctccacgtggttgataattgtcttcagttgctgctaagtgattttgcaaatttcatttataatcctcgccctacaattacctaagtactgtttctgcaggttaacctgtatgctacgctcagtcatatacctttcaaagttactaatgcaactgccaaagagggacagtgtcaatatcattgtcttcattagaaggacggctgccccacactgtgagaacac

SEQ ID NO: 324138 - DNA, 907 bp, Homo Sapiens
ctcctaggaaaaaattctttttataggtcccccaagggggagtcacaaggattgggttgggccaaagttaaggaggaatgaggaggcatgtccagtcccctctccaatcaataagagaagggctaaggaaaggagtctttcccctatgtagactgtggtttaccccattctttccattcccagtctaccatttcttgggactcaggttccagggtttacatttgaccctaaactttgggcttctaaatctgtctgggtgctttggtgtcaccctgagggataatctaatgtgatgagatgaacccagctccattccataggcaggcaggtcactgcaggacacagggatctctgaactcctgggctgaggatgatttgctccctgctgtagaatctgccattccttcccttagctggttcagaaggtctctgctctcactgggaggcaagttactcaggaagtatggaggggccaattccaccagcatctgtggttgaatctcagaaacaatggaaaggcagttgtctttggatatggtgaaattgtggtagagcacccatggtgggggtctggcaggagctctgaggcttcggtagcagcagtatgaggagagctgggccacatgcttatgggttaggagtaggtaatttccagtcccgtctgtgtctctggccaccttgagaaagtatcctgacaccagtgctttctgaaggtctctgcgattctgctcagagccaaaggctggtagggacaagggaagttcaattcgttgcatgagttctaggagttctccccgaagtttatgggcttggcacaatgctgcccaattcagacctcgagcctggcaccaagcctcatctgctccactttgtataaaggcttcatacaccggatcagagaactgtg

SEQ ID NO: 324139 - DNA, 180 bp, Homo Sapiens
aaaggcaattttcttggccagtgagactccatgttgagtcagtatggtctgggggttgaaaaatttaagaaatcctattttgatatgttctgcagagcccatgatatagtggatttttttccttttccatgtctctcttgttacacagaattaccaaatatttatattcctgatacttcc

SEQ ID NO: 324140 - DNA, 840 bp, Homo Sapiens
  misc_feature (69)..(69): n is a, c, g, or t
  misc_feature (169)..(169): n is a, c, g, or t
  misc_feature (173)..(173): n is a, c, g, or t
ccttaaaaagggtgttccccgcccagcacatcacatccagaaacgtagtagttctggtttacctccatngtaaaatgcaatctagaaatggtgtagtcttttgctgttgagtttcggcctgttgcctcctggcagaagtgaagaaaactggttgacacagtagccactnctgngtgtaggcactggtagaacccctggaggccacgataagggctctttttccaacagggcacacgaccacaatccattcctgccccaaatttgaaggaacgtcaattaaccactcagaaagcatcaattgattagcatagtgttttggtaacttcttgacagtgtcaatgtccatttcttcatcatctttcttattttcttcctcactctccatccctgtccagtcatcttcagccagtcttctggcatggttcacataatccagccgcttggatttctgcagttccagtaacctccggcggcgctcactctgctccaaggaactgtacttggacttgtactgggataggcgggggtgtggggcagctgtgctgttcagatcttgagacacagaaaagctactagccagggcctgactcaactcttccatcttccctcgattactgcctgtttgctgcttttgcgagcttctttcccactcggctgcgggctgagcaatggtagggacctggcttgattcctatttaagtagccagagtccagcacaagggatggcgctcagtagaccctgcgtgaaggaatgattaaattggtgcaaaagactagggtaagcggcagagatttaggagattaagtcctgccagggtgtagcctctgcagggcgggccc

SEQ ID NO: 324141 - DNA, 847 bp, Homo Sapiens
  misc_feature (672)..(672): n is a, c, g, or t
  misc_feature (743)..(744): n is a, c, g, or t
ggaaagagatttcttttaaaaactttctagactctttgcaaaatgtatattactaacatagtttggaagaaaaattgagtagtggtaagttttgttcaagcacaatgttgaatgttaagcttcctgtattaattttagttcagttaatggttcagcccatacaaaggtgctatcctagggattttatgaattcctgaaaggaaaatagaatatgatcaattccttgccctgtggaagagtgcagaactgtggttttgttttcctttgacttctgtaaaatgtgaccgtttgacatctgtggtagattgaacggaatatcacagctgctgagtttactccatagctttcaaaccttttttattttaagaaattcttgaaaaaccctatgttccatgggaacataaagttattatagtgcctcctaaggggttaatataaatcaaggaggaagtttatatttaaggaagaattggagtgacgtatcttagaaaaggaaaggctgatgtttccatatagcttgctctccaccaggcctatcatttttctttttagagacaaacgtgacagggctagtcttgtctctctcatatgctaggtagcaaatggggtgatatttttatagaagtgggcaaaaattattttctcaattttactgagtaggcacagaagaanagtacagatagggctgatggttattgccttattttgactgcatttctcttaaatggatcatttaaattagnntcttcagtaacagttttactgggttggttccattccctgaatatggcaggctaatttgtaacagaatagggatttaaggaataccgacctattaaaggagaac

SEQ ID NO: 324142 - DNA, 1067 bp, Homo Sapiens
cttgttgtttgtttttgttcacttcttctaaagctttagtaagtgatctgttcaaataagcaattacatgaaagaataaaaccaaatttccaacctaaaattctgacaggagagtcaacatgatggttaaggcctatttcatattcaaacttcagtctatgaaagagtagagagagaggggtctcctctttcaaattaaatattataaaaacaattaaaaaaaggtatcaatagtcctaaaatgcagcaactccatctcaaacaagcatgacacacttctgatcagatgaagtatttacaaaggtagcttgtgttttaagcatgtaacactttgggtgacgacagaagtttctcctctttgggtgaaacctgcctaaggctgtagagatgaccaacactctgcaggtgttagttctgaataactactgtgggcttttcatgatcttccctccagtaggagaccacaattgagtctaaagtcagatccaccgttgtctatgggtaggcagggttgattcaaacttaatccttgtttgtattcttttggattactgcaaaaacatctagggaccagagtgaatgtctggtgaggcataactgcagaggtgaaagatgtcaaacattttcaatttggcagtttcttcaaggtgtgtgaaaattcacatacagaaggtctggcagtgtcttctgtaagttttcgtgttgccgtatttctgaaggagctcttgggcctgctgctgcatttcctgggccagacagccaggaaagtgggacctgatgagaagcaggacgaggcagcactccagcacatctgggaagggccaggccttaatgctctcaggaaattttgccattctctgatttgcctcggtaagccttttggttaactcaggcagagaaagtggctcatttttttcttctttacactggctctgagaactgcagaggggctgctctgcttctacttccggttcattcttatcaggaccatttgctgtggatttacagagttgactcttttggtgttgtcggatcatttctgccaaggtctcttggacttcagcaac

SEQ ID NO: 324143 - DNA, 1322 bp, Homo Sapiens
  misc_feature (66)..(66): n is a, c, g, or t
  misc_feature (273)..(273): n is a, c, g, or t
aaaacaaggtcccttgaagcctgagccctggttgggttccgaggggagggggccagaacaagcagncgggagtaagacgccccggcgccaggtggcctgcggtttccgtcctaaagaaatccagttcgtataagtttgggagggagaacggggagagatctgacgactaatctcagtgcaaggggagatttcaaagcccttgagaagagaacaccacaatgcagcgagcagagagggcggggagcaggctctgaaagggaggcggaggtggcnccgagctcgcgtacagcactttgagaggacatcactagacaagtaatacacacatggcctgcaggaggtcaagggcggcgagggggctgggcaggggacatttttgtgacttccactgttattatatttcacgacaacagcagcagcacaaatggtgtgctcaccactggagaatgagagctgctgagtcttgaggatggcgagacagccttcctgcatttgctgctttagtttctgctttagagctaagttttatacagagaataaaatgaccatcttctcttacaaacacgatgatgtatgaccccacacaacacaaggtattatgaagtatctgaaactgaggataatctgactgaagatgcttgccgagagggtacagggtctgtgtgagttcaacgggccaaggaccttttccacagccatagccctttgttcaggggcccttcccaggaacccatgtgttctggtccattcctgacccttgaacgaagggcgggactggggaaaatgagctgttgggatgatgcctggggacagaagggcctgggccacaggctccaagactaactgtttttccaaagagatggaggcttccagcgggagtttgcttctcacctgtcagggcactgtgacttagactggaggacttccctcgggatcacagcactgtggacacaggctggggagggggcagtgacaggctgtggaggaggacgctggcctgacttcgtgcagacaccccagcctccacccacagctgcactaccgggggtatgagacgctgggaaaggcaaagaggtctgttccacctttggacctcctgagatatcctgattgtcacctcccaggttatttggatgagagcaggcactgaggggtagggactggaatgaagatagcagattagtcctcagtgtgaaatactccaagaacacagacatctctatgattctcaacaaggacaggaacaaccccaaacaaggttttaaaaacacccaaatttctaccgttccatacccaagcaatgtgcacgtcacccagggtcc

SEQ ID NO: 324144 - DNA, 926 bp, Homo Sapiens
gggtgctgatttctttatttattagactcaagtgctttagtacagaatggtacagagatgatatatgtttgtgcttcagtactttcaaacactgagattctgataattttaaggtaaacaagtttcaagacagactagcttttttaaaatatccttttgataaattatttttatataaataacagagaaagggaaaccaacatcttcgacaaacaaggtcctgaagcatgagcactgtttggtccgagggaggggacagaacaagcagcgggagtaaagacgcccggcgcaggtgcctgcggttcccgtcctaaggaaatcaggtcgtataagttgggagggagacggggagagatctgacgactaatctcagtgcaaggggagatttcaaagccttgagaagagaacaccacaatgcagcgagcggagagggcggggagcaggctctgaaagggaggcggaggtggcgccgagctcgcgtacagcactttgagaggacatcactagacaagtaatacacacatggcctgcaggaggtcaagggcggcgagggggctgggcaggggacatttttgtgacttccactgttattatatttcacgacaacagcagcagcacaaatggtgtgctcaccactggagaatgagagctgctgagtcttgaggatggcgagacagccttcctgcatttgctgctttagtttctgctttagagctaagttttatacagagaataaaatgaccatcttctcttacaaacacgatgatgtatgaccccacacaacacaaggtattatgaagtatctgaaactgaggataatctgactgaagatgcttgccgagagggtacagggtctgtgtgagtccaacgggccaagaaccttctccacagccatagccctctgttcaggggcctccagaaccccc

SEQ ID NO: 324145 - DNA, 379 bp, Homo Sapiens
  misc_feature (271)..(271): n is a, c, g, or t
attatttttatataaataacagagaaagggaaaccaacatcttcgacaaacaaggtcctgaagcatgagcactgtttggtccgagggaggggacagaacaagcagcgggagtaagacgcccggcgcaggtgcctgcggttccgtcctaaggaaatcaggtcgtataagttgggagggagacggggagagatctgacgactaatctcagtgcaaggggagatttcaaagccttgaggaagaggaacaccacattgcaggcgagcggagaggngcggggagcaggctcttgaaaggggagggcggaggttggcgccgagcttcgcgttacagcactttttgaggagggacatcacttggacaggttaattacacacatggg

SEQ ID NO: 324146 - DNA, 725 bp, Homo Sapiens
  misc_feature (39)..(39): n is a, c, g, or t
  misc_feature (160)..(176): n is a, c, g, or t
atttttggaagggcccgaaggcggcccgaccatgtaaanccaaagggggggataaagtgtggtgggtcagtatacagagtctttatttattggaagtcctgatatccaggaaagccgggcccatgtccagggctcaggactccatctggccactctgcannnnnnnnnnnnnnnnncagtcattcatgtccagttttcctgccgtcagaggagtcctcaggaggcaggaagtggctgtgcctccacagttgcaggtgagcgtggcggctgcacctgctcagcgcactgcaggaagcggcgcatatgctctgcacagttgcccacagctgcctcgttctgtcgaagacactcctcgaaggcctcaaaaggctgagcacaggcctggcggatctggcggatgattgggtgggaggatgtgcactgggcaatgctcatcttaaggtagtgacagtcccgctgccaggattccggcttggccgccacacactggccatactgctccagctcccggccacagtagcgagcggtgacctctagggccgcctgcatctcgagacctttgccggcgtagggctgtccggggggaacgacccgccttttccggtatcggttgtcatggcggcgcccagcccagcctggttttttctcggtagccaattgaactaacaaccccgttccctttaggactaatctgtcacggcggcgccctacctcttcttcccccc

SEQ ID NO: 324147 - DNA, 1466 bp, Homo Sapiens
aacagggagggtcaagaaggagaaagagactggccaacatcaggggcccagtgaaaacgaaatgggacgaggaccggtcttccaaaccacaagttaggcaacgtgccaagaccagatgggcccaaagtggctaagtttgatattgggaggtttcctgtctccagcgttgcgtatgtctgatctccctaagtactatgaggcagaaaagattttgcagatgatagacatgaaaactgaagaatgggtcaagggataacatgctgagggtcaaagagaagatgaagaacgtgagcttaggggtggaggggagtacaaggtgatatccactcatgggggacccaaagagaagctctgtcacagaaggaggtcgcatattgaagttcacaggataaaaataaaaatttaaagcattctgcttcaaaagaagagatgagataggcatgcccgagttcagaagacagaggaggtttcagtcagcgtgaactgcctgggcaaactacgttatgttgaatgcttttaaaggactcttctttctctatgttgtcatgccctcccaggggatctaagagacccatcagatcccctggcctgtgctttccacttcaattccctgttcccaccacactgggcttactgtctgtaaggctataggaatgtggagaaacccagaagcaggaaacagggtgagaatgccttctttgatgtcggcacttaagtttgctttgtgattcctcgtgccttgtgcctctagtttctgcagactctgtgggctctggtctcagatcctcttcctgtagcccactctcctgggtgtcgggtgccagggctgctctggttcttgattgttcaggctgccctttgcctcaggtctgcgaccctctcttctccactgccgaccacaggctcaggctggacttgctctattctggctcctggctacaaccatttgctgccagtggcctggtgctgatggggtctccacctactttctcaaagaatgtgggactatactagaaactgtctgcaataaggtagcatttgtcccatttgggaatacctgctaatctgttcatgtttataaagatgcagctcatggcccatgagctcttgccagccatgacagaaagaaaaggagacacggagagttccagccatctgcaaacgtaaaacaaggcagaaacacagtgcattctcaaatacagctgaaagcactgcagcgtaggcagctgaatcccattaagaaatcatgcgaaatctctgtattcctgatgaaatttgacaagtttccaaccagaagaagcttcataagaaaaaaacagatatgaaggctaaggtcctctttctgtctcggattccattttggatgcgaatggaaattggatgtgtccttagactcctcgtggccgtggcagtttatcaggcttctccttgctttcagtgacctgaacagtcaatttcgggagtac

SEQ ID NO: 324148 - DNA, 536 bp, Homo Sapiens
aggaatttgttctttattatcagggcactctgcaatgcaaaacttaaatattagttatatctcaaggcttggaatccagggagggaaattgggtggttgtctccttgaatatattatatataatatgaaaactcaactgaggatatttactggaaggcgcctcctcccttatgttttcctctatgagtgatgaaagattgtccctgcctgtggcagggcactctccaaagggaagtgatacatcttcagccccacctagatctcttcctctttagagcaaaccttgtgccagcctgtatgtttgctgtggttgggttttcataaagctgatgaaatttgacaagtttccaaccagaagaagcttcataagaaaaaaacagatatgaaggctaaggtcctctttctgtctcggattccattttggatgcgaatggaaattggatgtgtccttagactcctcgtggccgtggcagtttatcaggctttccttgctttccagtgacctgaacagtcaatttcgggagtaccagtcggat

SEQ ID NO: 324149 - DNA, 802 bp, Homo Sapiens; identical to SEQ ID NO: 152243
  misc_feature (125)..(135): n is a, c, g, or t
  misc_feature (772)..(773): n is a, c, g, or t

SEQ ID NO: 324150 - DNA, 916 bp, Homo Sapiens
  misc_feature (18)..(18): n is a, c, g, or t
  misc_feature (56)..(56): n is a, c, g, or t
tccctgaaatagcaaaanacttcccttggaaattcttctcaaaactcagcctccantcctaaatccccatttggcccaaaatccttgtacttgtaagaggccctgtggttctggaagatgaggcgcatgtcttgtacaaacccctcccacttgggggtaaccgtgctcattcagctttttcttgattttatccaaccacatggggctcctttcaggccttgacacgcttctttaatataataatagtatggaatcttggcaaaaaaaggagctctcagaacagcaatagactttcaagaggaggaactcacatttcaactgttcctcaggacacatctgcctctccaggacctcagattcctgacaacactgttggcttcccggagactccttcatcctgcagaagatgcaattccacggggtcctctcagcttccacaggcgggatgtgacagtcctcatggaagactcttgaacaagtgtcgcaacagaacagctcccctccgtcccggcacacctcacactcatccaggtttctcatacaagggtcaactgagctattgttttgagacttcagtattctcttttttttcctgtaacgtattcttggaggatcaggcagaaatccattctccatcagccatcgtaggggccacccgccacagcgcacactcagcctccagttctttgatcttgcatggcctcctttgatttcaaattccgtgggggtgaaccattttccatcctcagtctgtatacacttcaccaagattccttgctgcaatttcttcttatgtaaaattcccttcaccccaccacaggtcactggaagcaaaggagccttaaaatccacagtttcatctttgtgctttcttgaagctcttgatcggactcttttctgtgcagctctgtcaccc

SEQ ID NO: 324151 - DNA, 1355 bp, Homo Sapiens
  misc_feature (1320)..(1322): n is a, c, g, or t
gggggctccctgctgcagttcgccgtacttccatctgctgggtgcctccatcgttggttgggtggggatggggcattttctgagctaagctttgtcattagtttgtgaagcacctggtcagcaacctgccccagacctggagggtctttgtggactgaaggtagacaccagccagcatggtggccctgttctgggggagcagggtaaggcaggaggaagtgggtgagctccgagatgatgagcacatgaagcctgtggccccttcgtacctgcaatatgtcaggagcctcacgctcacccaagatcctgcaggggccaggctccatctcactggctctgagggcaggacagggtatcacacatttctcaccaggcctcctttcctatgggcattggtgcctcccagaggtttcttgggctgctggctggtgagagaggacccttaaagaagatcaagccaagctgaccttggaccctgtccagcacagcttctggcacaggatgcttggtgaatgtaccctttctttccctccctgcagctctgagggagcccctgaccttgtagtgggtggaggaggtaaggggcctccctccctaaatctgcctcttctgcaagctacttggagacttgcctagttgtacccacccctccaggtccctggtgctagagcttctgagaagggcctttccctttcctctttgcctgctatataaggcaggctcctgtggctctgctggctcagtgtgggctgcaggaggactgcagactcagctgcaattctgaggggggtttgggaggcttgtgcgaggtctcaggcctgtgtggggagctggtgcctcttcctgcccgtatctttctcttccaagggcagtgctccaaggcagggactggagaagccaaggggagagtctaaaagggctagagcatttttaaaaatagacacagggtcttgggactggggtttcggattgagttgcaagcagggagaaaacctgaaggtcggtgcccctatggggctgaccagtagagaatttcctttactgtatttttgtgtctggtcttccctttctggcttctaggacatccatgccaggtgaggtgcctgggtccctgttacaagtcaggagccctgtagggagacccctcctttttgtacaagtacctgaatgctgcgacaagcagatttttgtaaaattttatattagtttttaatgtccagtggcggactcggttcctggggctgtcagccagcctgggacttttgtaagaatttttggggtgactcacttagatgtcgtttccttcttgccccctcttcnnntctgtaatctaagtgcattaaacatctttgcag

SEQ ID NO: 324152 - DNA, 1001 bp, Homo Sapiens
  misc_feature (369)..(369): n is a, c, g, or t
ctaggagcagaacacgcgaggagcggatgagtttttcgacgtttgtgtgccccgctacgccctccgtttgtcctccgagggtgcgtttttctacccacccccctccaaggccccgtcctcggagaggtcttagtcaaggccctctttcttcctagactcgagggtggaagcaacattcccggtggccatcggtactgtcggccagctgagatggcctttctcccttggttgctggaatgcagaccctggaccccacgagtttctcgtggtgcttgcccattctccacgctccttttctctgactttttcctccatggacggctcgcagctaagcctggccagctttgctggcccgaaggactcctgttnggaattaaatgtcactggtgacaataagggcaacatgagagcttgggatcctccaatggtcgggagggagatggcatttttgagcaccggggagggcgtttctgtgaacacagagtccgaggtgctgttggcccggaagaactcattatgcccagggaactggcccaggtgtgctttctcctggtttccaggtaaaagctcgtagttcccttgaagaaaggaaatatctccaagacatcgtgctggccctctttgccatgtggatggtgtggcgaaagtctccaagcgggggactgatcatatcaggagacagaatgtccctcagtttaaatttctttcctttcttgttattggctgctttcaggtaaattggggtcttggctggcattttggaatttgagaatgtctattttgcaagcgggagaaagggccactttcttcacagatggtatatgtttctgaatcctttttgataggaactgtcacatcatttttctcaagtggcttgagaagtggcttcgaaatgagatggggtcaaagagaaccttcctgaggttacggccaagtgaggcttcctagagagccagttaccgacgcgtgggtcgacgatatcccgtaattccggccggtac

SEQ ID NO: 324153 - DNA, 620 bp, Homo Sapiens
  misc_feature (76)..(88): n is a, c, g, or t
  misc_feature (111)..(123): n is a, c, g, or t
  misc_feature (133)..(326): n is a, c, g, or t
ggggaagtccacccccttttcttccccggggtttttttggggaaaaaataggcccctttcctttgttttttggggnnnnnnnnnnnnnaaaaggttttaaaaaattttttnnnnnnnnnnnnncgcccccaannnnnnnnnnnnnnnnnnnnnnnnnnnnnnnnnnnnnnnnnnnnnnnnnnnnnnnnnnnnnnnnnnnnnnnnnnnnnnnnnnnnnnnnnnnnnnnnnnnnnnnnnnnnnnnnnnnnnnnnnnnnnnnnnnnnnnnnnnnnnnnnnnnnnnnnnnnnnnnnnnnnnnnnnnnnnnnnnnnnnnnnnnnnnnnnnnctttgtgcaaccctttattgggaaagatttacacacggtgacctgtcataggccaagcgatgagaagagggcgccaggagtgctggggtcccgaggtggctcagatggaagccatgggacggccgtcccaggcccgcgcacccgcacctcagtttcccctttgtgaaatgggaagcttatgcttctttccaagtctgcaatattggtgcgatgagctaaaagtgggagcgaaagacacaaggaagaggcttcccactcccagggacctgcccccaagtttccgaccccacattg

SEQ ID NO: 324154 - DNA, 1019 bp, Homo Sapiens
gggagacagttttgaagttttcaaagactggctctgctgttaagaagttgtacttaaagcggaggagctaagccacctgccaaaatgtgcaaaggacttgcagctttgccccactcatgcctggaaagggccaaggagattaagatcaagttgggaattctcctccagaagccagactcagttggtgaccttgtcattccgtacaatgagaagccagagaaaccagccaagacccagaaaacctcgctggacgaggccctgcagtggcgtgattccctggacaaactcctgcagaacaactatggacttgccagtttcaaaagtttcctgaagtctgaattcagtgaggaaaaccttgagttctggattgcctgtgaggattacaagaagatcaagtcccctgccaagatggctgagaaggcaaagcaaatttatgaagaattcattcaaacggaggctcctaaagaggtgaatattgaccacttcactaaggacatcacaatgaagaacctggtggaaccttccctgagcagctttgacatggcccagaaaagaatccatgccctgatggaaaaggattctctgcctcgctttgtgcgctctgagttttatcaggagttaatcaagtagtaatttagccaggctatgaaatcatcctgtgagttatttcctccataataaccctgcatttcccattaatctacatatcttcccacagcagcctttgctcagtgatacccacatgggaaaaatcccaaggggatgttggcttactctttttgcccacactgctttggatacttatctaactgtccgaagggctttctttccccactcaattcttccctgccctggttattaatttaagatatctttcagcttggtaatcagaccccaattcagaatccccagaaaaatccctgcctaagggcaaggaaatattaggacccggactattgatatccatgggaagggggggttttaggaaatagaatttccccgccttaaatgggccctaa

SEQ ID NO: 324155 - DNA, 852 bp, Homo Sapiens
gggagacagttttgaagttttcaaagactggctctgctgttaagaagttgtacttaaagcggaggagctaagccacctgccaaaatgtgcaaaggacttgcagctttgccccactcatgcctggaaagggccaaggagattaagatcaagttgggaattctcctccagaagccagactcagttggtgaccttgtcattccgtacaatgagaagccagagaaaccagccaagacccagaaaacctcgctggacgaggccctgcagtggcgtgattccctggacaaactcctgcagaacaactatggacttgccagtttcaaaagtttcctgaagtctgaattcagtgaggaaaaccttgagttctggattgcctgtgaggattacaagaagatcaagtcccctgccaagatggctgagaaggcaaagcaaatttatgaagaattcattcaaacggaggctcctaaagaggtgaatattgaccacttcactaaggacatcacaatgaagaacctggtggaaccttccctgagcagctttgacatggcccagaaaagaatcccatgccctgatggaaaaaggattctctgcctcgctttgtgcggctctgagttttatcaaggagttaattcaggtagtaattttagcccaggctattgaaatcatcctgtgggagttattttcctctcataataacccctggcttttccccattaaatctacatatccttccccaccagcaggctttggctcagtggataacccaccatggggaaaacatcccacgggggaaggttgccttaactctttttttgcccccccacttgccttgtgggatacttttatccacacggg

SEQ ID NO: 324156 - DNA, 792 bp, Homo Sapiens
tagaaaagcccacaaggttccataacccccataggatacagcctcgacaggcagggctccatcaggctcctcttgaactgggcactccttcacggaaggcaggaatgcacgtgtcttcacttcctgctgctctgcacgcacgtcacgatatctggcagaaggtggtttctgttttccttggtgacattaaacaccttcacatcctttctgtttctgatttcttctacaagagccagtggctttcctttaggaactgggattgtgccaaggattatagtccctggggtagacagcgtctgacgaacagcttgaatgaaaagctgactgaagagctccatcttcccaatctcatcgatgacgcacactctttgccctgggccactgctgcagtcggcattcctcaagacgggtagtgccaactgctcaaaagaagtcaggtcgaccacatactgcccaactcggcattcacgttttccaggtggaggctctaacccaactctcgataaaggcccccgggtgccggacaacgtgacgacatcgaatcctattcttctccctccctgtctgacttcttcggtataaaatccatcaacaggcacaccagaggattttaaaacctcactggctttatggatcaatgttgtttttccaactcctgggggccccgttaggaacacgtgccgggccatactggtgggcgggggtaggggttgcggtcaggggagcagtccaggttggggtcgcaattcaggtcaggtccggaccagggtcgcgactcaggacccgcccccc

SEQ ID NO: 324157 - DNA, 907 bp, Homo Sapiens
  misc_feature (890)..(890): n is a, c, g, or t
tttcctgtctgtaaccatcagatttatttttatatttattaagcagtaagcaaacagagttgggggagatgacctaaaatggttttcttttggaataatattttttaaaaaatcaaataactgttatcactttaagttgcatgaggctgaagctgcacctggagaggaatttaattttcatgacatgcaaaactgattaggcagtgaactctttcctcccgcttcccctgaacacatttataaacttcaacgggggtgaattccatctaatactctgaaaaccatttctcatctcacagtttacccaaatcatgtgcatgactgcaagaggaaataaacaagaaatctttaagcatagataagccacaatggatagttaatcttgtacagacaatccagcattaaggctaatttgatcttttaaacattttatgggaaacagctgttgagttttctctagaaaagcccacaaggttccataaccccataggcatacagcctcgacaggcagggctccatcaggctcctcttgaactgggcactccttcacggaaggcaggaatgcacgtgtcttcacttcctgctgctctgcacgcacgtcacgatatctggcagaaggtggtttctgttttccttggtgacctgtgggaagaagtgagagaacaggcttcagagctcctttcctcttcttcaatcttgtgctaggtaactctctaaaagaaaagcctggaaggctgggagagggtgaggtatgttttgttacccaggcaggaggcccagctcttcaggagcactcagaaacaggacaggaatcaccgagtcccagcatcagtttctgccaagtgacagctcaaaaagtcaaagtgggtttggagcccagacagatttcncgtgccgaatcttggcc

SEQ ID NO: 324158 - DNA, 881 bp, Homo Sapiens; identical to SEQ ID NO: 147084
  misc_feature (70)..(70): n is a, c, g, or t
  misc_feature (213)..(213): n is a, c, g, or t

SEQ ID NO: 324159 - DNA, 968 bp, Homo Sapiens; identical to SEQ ID NO: 246314

SEQ ID NO: 324160 - DNA, 740 bp, Homo Sapiens
  misc_feature (233)..(244): n is a, c, g, or t
  misc_feature (623)..(632): n is a, c, g, or t
gtaacagttgataaaaagaactttaatggaaggcactgttgtccaaaatcacataaagggtaagagcccacacggtaccaccctgctctcctacttctcaaacccacatccaccacccagacaggagggtgcagaccccacaggaaattacctcccggagcactgactgatatttttccttaaaacaaaaaaatggctgtctcagactaataacagaacatcttaagagaagnnnnnnnnnnnnctataccagctattacagcctggtaatagaagcagctttctaagaattcccaagtttataagaggcccaagaaatgcatttattctgttgtctattaagcctccatgacaaggagaaagttatgagtaaatccttggttcatcaggagttaagagctgtgtgcctcatgaggagttaagagctgtgtgcataagcaggttcaagaaacaaactcctgtttgtttgcctcttgatggttcagaaacattcagctgctttcacctctaggacaaatgcttaagaatttactctcatcaacattggaactttacgaaaacaggattcctggttcatcagaagcctgtattaatgaaaaatgcattttgttctttagtgcttnnnnnnnnnngaaactcatctacttttttgcggaactttttttgggatagccattcctcctatggatagtcatcagcaagacacctaaaagacatgttttccctagttcttatcaacc

SEQ ID NO: 324161 - DNA, 1053 bp, Homo Sapiens
tttttcagaacaagttattttattttgatgaataaaagcagtagctggcaattgaaaaaaagttatttgctcaataggacagcacataccttaaaagtaatgggccttttcttacacatgaaaacaaaggtattggttatagagactacacattatttggttccaacttcactgggacaggaaacacaccaaaggaagtgctgaagcctgtgttggtatgaaacctgtgatgaatgtgacacataggaccatcaactcaattcttgtttctgaaaacaaatcctggaagcatcacttccagaaacacttctgtccctagcagagctccagccaggctccaggccacgaggtgctgtgccacagttcctcagctctggtcagttactttcactatctcaatcttcgagcaagtagttagggttaactaccaagtagggatcttcttcatagctctcacttccctctgtggagcctttcaatccagcctgggtgagctcaattagaacatgatcatagtgtgtgagtcgatgaataactttctctatgattctttttttatttataagttcttcttcagagtctatctctgattcgatttccttcaagtaccagttaacaagctcgctcctctttaatgctgactcgtcctcttcttcttccacctttctgaggtgaagcacaataaggttagagattcggcagtactcagagaagcccagccttaaggaggctttgggagcagactcttgatttatgtcttcattgtagccattgatcccgttcacaggagcagggctgtcagcatgaccattgatgccaccagcaccctcatctacctccatctggatctcttcctcttgatctagattgacatcaggtgtttccacacggatgattgatttattcagtaaccggaaagcttccttcacatgtttaggttggacctcatcacagcagtgcatccgagccatagcttcagagagacgaatcatgctctcaagctgtcgcactgtaatcctccatgaagacttggtcactccagaaccatctccc

SEQ ID NO: 324162 - DNA, 449 bp, Homo Sapiens
atttataagttcttcttcagagtctatctctgattcgatttccttcaagtaccagttaacaagctcgctcctctttaatgctgactcgtcctcttctgcaacaaaaaaacacattcaaattatcctagcaactcgtactgtcagtccttgggtaaatctctgccacatatacaacgagataatgtacagattagataaatgtcaagccgtccgaaagtacatctggtgacgtaaggtccgcaatgttctagcataagcctgaaataacaagtcatatcacttgtattaaagcatgccttattttatccataaggagagaaacctaataaaagagattataagaaatatgtttcttaaagctattaagatttcaaagtatgaaggtcttttcttcatcttcttatgcttcaccacctctgagaatgcttgccaacagaaactaaaagcat

SEQ ID NO: 324163 - DNA, 459 bp, Homo Sapiens
  misc_feature (107)..(107): n is a, c, g, or t
  misc_feature (130)..(130): n is a, c, g, or t
agcttgtgaagaaatgttcaggctggcaggtatgctgatactccacaaatttactttgctaaagtgagtttatctaacaacttatcctctcttccgacagaacaacnacggaagtttggcaaatcacaangtggcctatgtgaacagagcttacagaagtgaccgagcatgtaagcagtaccaggtaagcctcaccttcttccaccctttctgaggtgaagcacaataaggttagagattcggcagtactcagagaagcccagccttaaggaggctttgggagcagactcttgatttatgtcttcattgtagccattgatcccgttcacaggagcagggctgtcagcatgacctaagtgaaaaattgaccacctgaatcttatttttgtgcccttaacatccccttgtcaagcatttacaaatacactacttacatttaatactgatttttttcacttt

SEQ ID NO: 324164 - DNA, 487 bp, Homo Sapiens
tgtcctccttaacataatttgcctatcaaaaaagacaaacgaaattttagtccacggacttttgggtgccctattcaagctgcacccgattcccaggggcaagcttaagtgtgctttttcattacaaaaaataaagacattaaaaatgcaaaacaaatgacctggaggaagaggagtgtttggacccacgcagttgtcttggttgtaaacagtgaacattgtgctttgttgtctcatttagatggaggcctgcagcatgggaggtaccacgctggcagtcagcagtcacaccagggtggtcagagacactggtggcagcatctgtgcttgcaactgcattcccagggtgtctgttttgttcccaagtgtctcccacaaaattccccaggaggttctccgattaaatgtcctcagagtgaaaagcatggacaccaaatcactccgtatccacttccatgagatgtcttgatgctccagttcaatgagt

SEQ ID NO: 324165 - DNA, 487 bp, Homo Sapiens
gcccaaatttatttttattttgcacacataggaaacaggatcctatcaaaagagaacaaaaaagagaaacgagccaattgttgcagaggaaaagcatgcacagatctgcttcaagtttactctgaaccacggacgctccgggaattctacacaccaggagctgtctcactccaggaagtgggcacaacccaccatccacacaatggaaacaagaatggccaggaaatgtcaccgaagcgggacttccatatgcaggatcagcgttcacagtagcacaattctaaccaagttcaagggaaaacaaactctgtctcacacaaacatgggaatacaaaattgttgagccctagccatcactgtctcttaacataatttgctatcaaaaagacaaacgaaatttagtcacggacttttgggtgcctattcagctgcacccgattccaggggcagcttagtgtgctttttcattacaaaaaataaagacatt

SEQ ID NO: 324166 - DNA, 864 bp, Homo Sapiens; identical to SEQ ID NO: 150581
  misc_feature (87)..(87): n is a, c, g, or t
  misc_feature (93)..(93): n is a, c, g, or t
  misc_feature (227)..(227): n is a, c, g, or t

SEQ ID NO: 324167 - DNA, 1083 bp, Homo Sapiens
  misc_feature (298)..(298): n is a, c, g, or t
tttcgttgtgtgtcacggcctccgtccttttcgtcattacctcccgacatcagctctatttcccctctgttccaacccccagctcacatcccttctccccttaccccctctcttaatcctctgtgcccttcacaaatggtgccactctgccccccgcgtttgggcccccccttcttgtgtttgttctctccgtgttttttacttaccgacccccgaggtgcttaatagtatgattaacaaagccccggtcggaaaacttttaaagtaaaagtgtgtttcagttccattagggttttcnccagcccagggagaaaaattacttctttttaaaaatcagttctggttagagggagacggagctatttgaaggacagctggatgagtcaggttaaaaacaatactgcccagacctattattatttaataatattattaagtaatttaatcaagacaggactgcacttggcccttattcacattgatgttttcgtccagacacctgctggtgtgaaatggtaccaaatcacatctcttctttgttgtgaggatgccttgttgaaatggctccagcagtggcaggttcagcctgggaactaaagctcttcctattttacagccataaatatccacattgcactgtcacttccttactggaaacttcatctcaaccaatgcgtccgtcattattgaacagctcatgatattcctgctcagcagaattgcacagcagttgttggtagcaagtcaagtcccagactctgagagtgtgacagattgcccccacagcgctgcttctccagtgctggggcagcatgccgagtgcccctgttcgtggtgactgacccggatccgtgccggggacagggatgggaggctacgtggcgccgtcggcatccatctccagcggcgtctccccttccctgggctgctccgcgtcgccctcctctccgctgcgagggtaggcgagcagacgcatggctggagcgcaggcggcctcccgacgcgtggtcgacgatatcccgggaattccggccgtaccagcctgcctttatattaaaaacccaggcgtgttctatattccta

SEQ ID NO: 324168 - DNA, 768 bp, Homo Sapiens
  misc_feature (142)..(164): n is a, c, g, or t
  misc_feature (518)..(528): n is a, c, g, or t
  misc_feature (752)..(752): n is a, c, g, or t
gggaggcttattttccgaataagtgggggccaagtgcgaattttccacgggtttttttaaatgaagatggtgggaggcaactttttcaagagggcctggccctgggttttttgttaggctgcccctaggccagccccctgannnnnnnnnnnnnnnnnnnnnnnttggtgaaagaagaatgttccctgcaaacccagggtgtgagaacgggggagcccctgagttaaggttgaggctagaagggaggcagaggatgggatggagagctgtcttggggggacggtgggatggtgaggatggacggcagagctgccagtggcaggcatcccatctcccagtggctaggaacactcctgatctcctaaggcaagcagtgccgagacagggcagcacaaggccggaggatttgatggcacggggtcctggctctttcttctttgccatttttagctattgatgagggaagatggcgacagggccaggagagaggtgtcctctccttgcgccaccctcccccnnnnnnnnnnngagagcctgtcatttgtaacaacgtggctggaatgggaggtgaccgtgtcaggtgaaaccaccaggaacagaaagaaactgcacgtcttcactcatgggagctgtggaaattcacctcctaaaggcagagagtagaatgacaggaactagtggattgaaaggtctgggtgagcggaaccacagatgaagagagttgagttaatgggtacgaacatacagttagnatgaaaggtataaatt

SEQ ID NO: 324169 - DNA, 1089 bp, Homo Sapiens
  misc_feature (145)..(145): n is a, c, g, or t
gtttccccctccatcaagatagcactgagaaagggggccagagtttgggcttctctgggggctgtccctgcagtacttcctgggacccttaaagcctcgttcttgggtcctttcatggatttgacaaatttccttgacttcttcnttccaaggcttgtttcctcttctcaacatcctcccgggagcgctccatgttgcggaggctgatctctagggctgcagacttcttcttttccttctccagttcttcattgagcctcaccactttagcccaaacgtcataattttccttctcaaggtttttaatctgttccctcatacatttgcttctgtgtttctatttcctttcgtagctcttggaccgtcctctgcaaagaatcaatttcctcttctccagagttcttttttccaggcccagtttcagagtttggactggcaagagtatctcccttggagtcacaggcttgggaagagagtgcactggcttcctccccaggggaccctggcagggaagggacgttatcgtaggtggaagtccgttgggagtcagaaagttggcgcaagtcttgagacatcgttctcctgtgcccttcccctgccttagcctctgaggaaggcgaccagaattcatttttaaagatctccattttgctgctgttggcaccctgaaaagctgatgtcaagaaacatttccggttagggagtgtttgagtccttttacgagattgcattttccagtctcctggcttttccctgggtactttgctgctgtcctccggaaacgcatcgctcggctgctgtccggtggggctggttgtatcagagtcgcttgtcatgctactgaagctgtctgtcctagaaattcggaggtcttcagtggcatcccagcctacagagcttcgggccactggagctttcttggggtcatttttctgggcagggggtgacaggggtatatccttggacttggggaagaggacttcatggtctctgatcatcatagtcatcactctttggatctgaggagtccctctcatgatcacggcagggtcttcgaccttcgacctgatgagattcacaccaatcaca

SEQ ID NO: 324170 - DNA, 1654 bp, Homo Sapiens
  misc_feature (269)..(269): n is a, c, g, or t
aatgccaacttttacctttccctgcctaccctaatggggggccaccccccaattagattcttcatgaaaatattgtttttccaacacctgttagccattaacaccggacttaaaaaacatacgggtgacccggacatataaccctttaaagtccccagtatatttaaaaacagggagaaatctggttaagttgttagggattctaaatttccttttagtctgttcaactgagatattaaattttcagtagacaggaccccaaaaaagangatttcatttctttctaatcactttggcttctttcttttttgttaagtaggtaaaaaccttcttggtgggcacctaagcaggatgcagccaatagttcatgaaccagctgcgcacgtgaggcttaaaatctaagatgctgctgaagtggctgcgggaggagcggctgcgccttacttttaatttcaaatcagctgcagatgtttgggagccctcttgatgaacagaacaaatcacataacatgcagaatccactcagaggctgttattccagggaaagagcgggcaggtgtcctgaggagtacattcttgctgtcacagtctcactgctggcacagaggtgctttgtttatgagatttaaaggccacaaactctggctcaggtggggacaagggtgtgccgtggctgaaaccagcgtggtcactgtgtggctggcacggcctgcacatgctgcaggagctgctcgcagtaggtggccgagcggtgcttgtggatgacggcctccgtctccctcaccaggagatctgggaacagcccgctgccctctttgaggacctctaaaattgcatccctggatggccctctctggatcgtcaaggtgaaccagcaactctcggtacaggtactggacactgctctgatagtaggattttgcgttggcacccttgacacactgcagccaggtgaccaaggtggaggcggctgccatcctcacatcgttggacacgtcatctaggcgttttaagagttcaggataaatcttgatgagtttctctggatccgtcatgccgcccgaggtttttaagaacgtgttgataatacggcatgagatcagtcgcgtcatcttcgaatcctcctccagggtggtcaggacctggggcatcagtgtttcctgcacgtcccgtatctgctctgccgacaggacctcgctgctggtgagcgcccagaggcaggacacggcagccgtgcggatggccgcggctgtcctccccgcatgccactgcagattgggggccaggatgtcctttgtcaccgtctcgaggtagctgggaaactgcccctgggagttgatggtgtccgtggctctgagcagcacggtggacaggatggagaacagcttcaggcgcatctgcgggtcttgggagggctgcagacaggccctcagcgtgggcacgacgtgtggcagggcttctcccagggcagggcctgactgtgcgacgatgacactgaactgcaggagctccggcgagtgtgcggtccagtcaaggtgcggcgcggtcacccgctccaggaggggaccaatgtgcttgcggtagaggtcctggcagctgctgacaccctccaccatggccagtgagtccatcgtctcctgtgcctgtgccgaat

SEQ ID NO: 324171 - DNA, 320 bp, Homo Sapiens
ccccctcctaaaagaaaagactacaggttgagtatcccttattcaaaaacgcttgggaccagaagtgtttcagactcggtatatgtttggatttgagaatacttgcacatatataaaatgagatatgtggaggatgggacccaagtctaaacacgaaattcacttatgtttcatagacaccttctattcatagcctgaaggtcattttatgcaatattttaaataattttgtgcatacaacagtttggactcatcacatgagatcaggtgtgggattttccacttggggcatcatactggtgctcaaaaagtttcaaatt

SEQ ID NO: 324172 - DNA, 487 bp, Homo Sapiens; identical to SEQ ID NO: 62676

SEQ ID NO: 324173 - DNA, 712 bp, Homo Sapiens
cactccactgcttttctccctcttgaggggtcatgactgggagttctgtgtcatttgatttgttgtgtgagagagttttccactgcccgtgggagagtctacactttcataccctgcactgagttgatttacgtaaccactacctcctctgccagttctctcctctgagctgttggaggacttattaccattccctggagaagaaggaaagtcatcttcggttgtgttgccctccctgtgaaatccagacccagacgtcctctggcgggaggagctaccattacttggtccgtttgtcagacgactgcagtctttacttgtggcctctgactgttctacaggttcagaagctgtagtcctgctggtacttggggcagaggcctgagactgctgctgctggtactgagccaactgctggcgtgtctccttcagctgctgctgcagaactagaatggtactctgcataccctctaacttcttcatcaagctggatgatgaagtcattcagttcatcctgactgcttttaaggctcctcactgtatttcttctgtaaagccaactctgcttcaagttgtgcaatacgtccctgggacagctgccttccaagctcttgattctcctggataagcattcgacacttcgccattaactttttccctgtttggctgcaaaggaaagagccatccatcacaaaatgaagacaaaactccc

SEQ ID NO: 324174 - DNA, 412 bp, Homo Sapiens
  misc_feature (332)..(332): n is a, c, g, or t
  misc_feature (348)..(348): n is a, c, g, or t
  misc_feature (375)..(375): n is a, c, g, or t
tttgagatgaaaatagatggatttcagaattgattattgatgtaatagaaacaaggtgtagctgtttgggcactttttgtttagggtttatttttgctgctgtgttggcaaaatactgaaatgcagaagatggatgtgtcccagaaaagaagatggtaattatggggaagcatctgctgtgatatagttatgtttgtatgtgttacatctatcactgtaataattgtaagcaaagacagagagttttgtcttcattttgtgatggatggctctttcctttgcagccaaacaggggaaaaagttaatgggcgaagtgtccgaatgcttatccngggggaatcaaggagncttgggaagggcagctgtccccggggnccgtattgccccaactttgaagccagagttggcctta

SEQ ID NO: 324175 - DNA, 1052 bp, Homo Sapiens
  misc_feature (13)..(13): n is a, c, g, or t
  misc_feature (27)..(27): n is a, c, g, or t
  misc_feature (71)..(71): n is a, c, g, or t
  misc_feature (97)..(97): n is a, c, g, or t
  misc_feature (160)..(160): n is a, c, g, or t
  misc_feature (214)..(319): n is a, c, g, or t
  misc_feature (390)..(390): n is a, c, g, or t
ccctgggtttgtnaattgcccttcccnaggaaggaactgaaaaaataccttcctccctgaagtcctccccntgcgcacccaggcctcttggtgacanagtgcaagaactggcacttgtgatgctatctcccaggatgcgccagtgatgacaatggcttcnagttaggaggcccttactgtgtgcccaggtgccgtgctcggtatgctgtggtcnnnnnnnnnnnnnnnnnnnnnnnnnnnnnnnnnnnnnnnnnnnnnnnnnnnnnnnnnnnnnnnnnnnnnnnnnnnnnnnnnnnnnnnnnnnnnnnnnnnnnnnnnnttgtggctactaagcagcagggccagggtttgcatcgggtgctctcttgactccagcacccacaattttanaccactgtcgctattctacattttgctgtttctcaggtattaatgaaatcagcctcaacccagggtatccagcctcagttggcctagtttggattaggtggcagggtaggtgttgggcagaccaaaggtatcaaatgggatctttaaggattttcagcatttcaaaagctaatactataatacattttcataaaaatgatgttttaagggtaaaagaaaagaagtaagctattttcctagataaagctgcccagtctaacaagacataaaacatgtttttcggcctaggattttatcaatttagagtggtaatgctgggtcagatgttttgattaattaatctttgattaataagtataagaaagctaattattagaagagaaggttgttttataaacatcatctttcaaaattcgagatttatggggaataaattagggagaaggtggttaaaccctcttcaacataaattgctctttggggacattttatgcacagaactgtgcaccctcctcagaacagcaggtcctttaatggcccatggggatgaggaagggccccatcaaaggcagcagggaatgggccacttctcccacaaccccatggggccagggccactgccaacttcctgctgccctggaattccccaaggttttaagggc

SEQ ID NO: 324176 - DNA, 755 bp, Homo Sapiens
tgggcccagagctgggcaccagtgggcaaagttcagattagaatttctaggagttctaacaggcgatccccaaaccattttcctcaacttttcttctgtttccccacatcccaagggcagggaaatcccctgctgcctctcctcatcttctaactcagctgtaaggcggtttaggagccgctggcagaatcaatggcatcgaccaagggagggggggtggcaagggattttcctgtgcttaactactgatcacggctaagtggaaatcctataaacacgagcggaaatcaatggaggctgcttagcggccaggggagaggggcggcccacagattgcatctgacggatgagcgagaggaagcagccagggagggctcaaggaagagtagcttagaggagggggaagaaacaggcagcgctggagagagaggagtcactgtcagaagggacactgaggggaagaggcacagtgggccccaggagtggactccgttagacccagagttcccttccccttctaggaagtgacacccctagccccaggcagtggtcaggatcttcagtctcctgtggcctctctctggagctgttcacttctagcaggcgctgatagtcttgaggccggaaacgctgtagatacacaatcagcttggctggtgctgtctcctgtgcaggcacacctcaaagcccgagagtctctcgcgggacccacagagggggaagggagcccacgccatacactcgcgaggaatccc

SEQ ID NO: 324177 - DNA, 427 bp, Homo Sapiens
  misc_feature (295)..(295): n is a, c, g, or t
  misc_feature (401)..(401): n is a, c, g, or t
ttgaggaaagccatatttgggtatatttgaagtggaaagtgtgtatgaataacagcaagggaagagcattcttacataggaggtatgcatcttcccctgagccttgagaccctgtctcaacacgggggcggggagggggcagctgttggttctttctaaccctctccaggtcagggaacaaatttgcccctaaacttccacaggaggcactctaccctctgggccagagctgggcacagtggcaaagtcagattagaatttctagagttctaacagcgattcccaaccatttccntcaacttttcttctgtttcccacatcccagggcaggggaaatccctgcttgcctcttcctcatcttctaactcagctgtaaggcggtttagggagccgctggcagnaatcaatgggcatcgaccaagggagg

SEQ ID NO: 324178 - DNA, 1210 bp, Homo Sapiens
  misc_feature (1120)..(1163): n is a, c, g, or t
ggtggtaaagtaaattttacggaaaaagttaagatagctttgggaacagagacctttccctaaattgattccatagcagatttgggggaattaacaaagaatttcagtctcatcaatcctttgaatccatcttcaaaacttctgcttttaataactttagaaaatttactaatctatagaactaattgagtaggatataggaaggatacaaggatataatgtcctttttataaaagtttagtatagcttctttacatgtatccacttgttccagaaaatgtgcattggttctgaatgtgaaaatatttaaagagagaaaggaacactcaagtaagtgtgggcttcagtgggaattatcacaaaacattggcaagtatttttatttaaattattttcaaatttgacttctacagccaagtggaattggtaggctgtagctgttacactgaaatttctagtctttgtaagtgcctcctgaaagtcatttaaaatggaaaaatatttcaatggagcttttccttttttcatatttatggacatgaatattttattggagatcatttaactcctagaatttgagattatatttccatacaacatttttataaagttatggttgaacttactacctgttatgtgcaggttattatgtaacttattcccggattgcttcatatattggctttatcttcccatctaacttcttaaagttaaaatccggacacacatgttgattatctagaccagtcattctggaaattgtaacactcccacataaaccccaggagactttttcagaatgcaatgtttctaaatgtactgttactggcagtttactctccagcatataaggttgcattttaacttttagattatgaactgtgcaaactttacccaaaactatcttgcatgattccctcctaaatatattccttgattaagtaaatctggcaaatcactgtttgagctagttacataaaatttgttatcaagagaaggcttttcttacaagtttcccagattaaccataaagaaaagagggaatcacagggcatttaagtgcaccttcccattactttccttaaatcacctcatagttaggctgggcgcgggttgtcannnnnnnnnnnnnnnnnnnnnnnnnnnnnnnnnnnnnnnnnnnngaggtcaggggactgagatcatcctggctaacacgatgaaacctcat

SEQ ID NO: 324179 - DNA, 613 bp, Homo Sapiens
tagaaaactaagtgagcagagaagtgtgaacatgacttgtaagttttaatgtactagacaagcaaggcggtagcactagttctctcttctgatcatgcggtaccttgctctctgcccccatggatcacttactgcattctgtactctagcactgtgtatgcatcactcttccttatgccccgtccaccccaccacctggtctccagactcagcagaacagaggtgactgattccttggaggtagcacagaagggcccaaagtcctagatcctcagggaaagaccaactccaagtccagggaaaagctctatgcaaagggctgcccgtcatctctgccaaacttaagtggcgtggcttttcttctgaccttaaagatgttgttctgggtaggggtgtcaatgcccaaatggagcatggcctctctggtcacctcaaaacaatcctcttctaagctcctctctgggttgggcagccaggagaaggcagctccctcaggaaggtgccactggagcctctcgtcctcactggctcctttgcaaatctgatagaagatgtggaagttcctctcactggaagcctggcaggccactcgagttttctctaggaggtagcc

SEQ ID NO: 324180 - DNA, 833 bp, Homo Sapiens
aaggcccctagtggttcccccgggcttacccactagcccaataatacaagcccctacatctcgggcaaaaataaagcatgggttggctttttttccctaatggtttaaataaaatgtagtgcaaatactttttttcacaactttgctgtacaaagagggcaagtctccagctgcatggctgattatgacacagtagaaattacacttttataactagtaatccaaatgttagtatttttcaaaatatggtgacaagtgttttaaaaaaaacttttaaaacttaagtacctgggttgttgtaggtggcgtttctagttgactattaagtcacagaaacacaacacatattaactacaaaactagttttggtttgagtcaacatcctgtgctttagcaaatcacaaagtagggtttataccaagcccacagaaactgcttttgactaaaacatataattacctcaagttctacttagtaatacatatatactgacttataatttcagccttcattgagcaaataaacttcaacatgctcaaaagaaaagactattgccaaactaagtgatcttactggggaatttggttacattgggtatttcatccccagtatatggggacaatcacctattcctgaaggtctattattatttttaaatttcagttctctttgggatgcctttcttgacagctcccatggcatgaagcttccaatcctgctactgaggtcagactagtggttcgcttcaggatattttgtcatcgtgtgcccatggagagcaaactgctgatggagacactgcaattcggccttttcttgtcatcattcctccc

SEQ ID NO: 324181 - DNA, 827 bp, Homo Sapiens
  misc_feature (23)..(23): n is a, c, g, or t
  misc_feature (32)..(32): n is a, c, g, or t
  misc_feature (45)..(45): n is a, c, g, or t
  misc_feature (80)..(80): n is a, c, g, or t
  misc_feature (685)..(703): n is a, c, g, or t
aacatcgggtggaacgaaccccngggaccaanctggtgtcaaaanaaggtaaaataaggaattggcctgcctaagatcangctggcggcaatggcccaaacatcaaaacacgagggggctctggtgaacaggacatgaacactgcaacaatcagaagatcaacagcgaaatggctttgctgaaggtgtccactttactcctgccccgatcacctccccttcctgattgttagtccttttgtttctccaggaagtctcttctcatccctgttcacgccttcatgtaacaagcatttatcacactagtaccgtgagccacgcgtgtgctgtggttacatccgtggaacagacagacagcagtgcctgatcttgtaattcttccatcctttcattcctttctctcagtctcgtagctgatccacagattgcaacgtacagatgtgatgttccaggcttggccacaaggggacactttccattcttcctccttgctgagaacaatgttgcgtttgattagaagcgcagccaagtcctccggcttggtaggtttcaagctcttttgactgggctggcgctgacatttgcaggggcagctgctgtggattgcctgcgcattgtttggctgtagttctaacagaggagtggctgcgtctgacatcatttccaggcatcaagtgcctggggcnnnnnnnnnnnnnnnnnnnaatggcgaactctctgacccccccctgcctggatttttgtacagtacatgcactgggcaaaaaagccccccctcaggaagcccaagttttgtagcagcttgttgaaaaaacttgggggcctttt

SEQ ID NO: 324182 - DNA, 1434 bp, Homo Sapiens
  misc_feature (844)..(844): n is a, c, g, or t
gtgccgccggagggatggtgagcccttgcagaggaagataggatgccgcgggttccgagaaaaggggggattccccctggcagggccaagataaaaaggaatgagttccctaaagctccagcaagttcaacaggcacgggtaatgcccagcaggtccccatcagaaaccaagaacctccgggcgccaagtagggtgggggttccacataaggtttttcatgagagaggtctctcccaaaattctggagtggcccaaatccagtaatctttataaggacagtcctcttcttgagatgacagtaaaacattctctggctttaagtcacggtgtataataccgttttcatgaaggtactgcacagccaagagcatctggtaaaaatagagcttgcaggtagcttctttcaggcgtttattccccccccactttgtcaaaacagctctccccccttccatcaattcccaaaccaatataataatcttctgcatcaaaaaaagtttttaatcttgatgatgcaagggatgatttagctttttcaaaatttctatttctgtttcaacattgagagctgggtctgcctctcttgctgaaccaatagcaaacttctttttgctgatgatctttatggctactttcttacatgttttcctctcgaaggccagctttacctctccacaggcaccacttccaagagtttttgacatgatgtattcatctcttaatgccttaggataaactgactgatcatctacagtcagatcaaaaaagacaaaaactttatttctgcttagtgacagtgcaatttcagaattgttattcaaaggacggcgttttcctttcccntccaagctctgtatttacaaaggttccattgccactgtgatcttctatgtatgcaatgtaagagtttttaggacccacttcccctgaaaatccgaaagtgtttcttgctgtatgttcggtatttatctgttcttttcagcagtggttcatcaaagcaatattcacagcttttgtccctcccaaaccagtagttgtcattcacacattcaagattggcaaatccatcctgaagggcccataatcgagcccagggggcaggggtaggctcctcaggttcttggtcctcaggttcttggtcctcaggaatagaatagagttcctgagtggacactgtctctaaggagctcagtgtcccagagctggagtgagaggactggctggagtttggcatcgtgctggtagaggagctggatatgccctgggactgtgaggaggagccttgggactgggtaacgctgccatggggctgtgaacaggcactgctgccatgagactgctgagcctcaacatccgactcccgagacatcacgaccgcgtgagcccacctggagccgcacactctccgcagcctcagccagcagagtggcccc

SEQ ID NO: 324183 - DNA, 691 bp, Homo Sapiens
  misc_feature (44)..(61): n is a, c, g, or t
  misc_feature (68)..(233): n is a, c, g, or t
  misc_feature (598)..(598): n is a, c, g, or t
  misc_feature (626)..(626): n is a, c, g, or t
  misc_feature (632)..(632): n is a, c, g, or t
  misc_feature (673)..(673): n is a, c, g, or t
cgggggggcccccccccccaaaaaaggttttaaaaaattttttnnnnnnnnnnnnnnnnnncacaaannnnnnnnnnnnnnnnnnnnnnnnnnnnnnnnnnnnnnnnnnnnnnnnnnnnnnnnnnnnnnnnnnnnnnnnnnnnnnnnnnnnnnnnnnnnnnnnnnnnnnnnnnnnnnnnnnnnnnnnnnnnnnnnnnnnnnnnnnnnnnnnnnnnnnnnnnnnnnnnnnnnnngacaatttactctttattgattaaaaatgaagaaaacatgcagtaaaatacaaagtccaaaaaaaggaggaaaaagttgaatattttacatcttccataacctagcatacatcataaggaggaatctccacttattggtacatcattattctctcctccagattattaaatattatcagctggctctagggatttggttcaaaacttaaggcaaaaacccaacaaatcctttagtcgtttaggaaagaccaaacatttcacaaataggcattgggcacatattactttgtgctataggttaggtccctactccgggggacaagggggatcccggggacctaggtcaaagagggtgcactctggantcaggcattcctaggaaaggagtacagntcactncactaggttacgtgttgttccaccgggggcagtttctgttncatgttttttcctcagtt

SEQ ID NO: 324184 - DNA, 793 bp, Homo Sapiens; identical to SEQ ID NO: 62687

SEQ ID NO: 324185 - DNA, 577 bp, Homo Sapiens
  misc_feature (176)..(211): n is a, c, g, or t
gaaactatccttactgtctgattcagtttctgacatggagctttccagaagatttatgtgaacggttcttctttttctttctccgttttccttgtttcttatcctcatcttcagaatcagaagaactgctggaagaatcagagcttgatgaagaagaagatgaatacctaccagannnnnnnnnnnnnnnnnnnnnnnnnnnnnnnnnnnnggatgagctctcacttccacttaacaatttctctctgtgtttttccagttctttcttccagttctcattcattttttcttcaaattcagccaaagccttggagcctttctttttcttttctagttgctcttttacttcttcccaggtaggccttggtcgattcagataatcctgtattgttggccctgaagactggattggaccccttgatctcgccattgctattgggttcatataggccacccgattgtcccgcttccccatggtgctggatcgagcgcacagtagcacgccgagggaaaccgggccggagagactgccgaagagggcctgccgcaggtcctcttgccgcctccccactccccc

SEQ ID NO: 324186 - DNA, 908 bp, Homo Sapiens
  misc_feature (752)..(762): n is a, c, g, or t
caatatataagattttactttagttttaattgacgttttgctcaaaagcaaagaactgaacatttcaatggttcaatgttacaagattacaaacaaaatccttacacagttacagtatcctacttcggttacttcacattaaatgcaggttgttaaaatcagtgctgtgcttgaacacaagataagcatttcaatttaataacaaaattaaatctagcaccttgaaataaatattgacgacagctttataagtatgaaagtatcatttcaataggaggaaaaaatccagttcaccaacagtggaaactaatagcagtattttcaaagctgagatgaaatttgtgtaaacacacactggcccgcacagtggacatgcacttctgttggctgggccctccccacccagggatgaacagagtgcccactgagccttttacattccaaatctggaaagctgcctcaagtttcagaccgtgggctagaaagactcaaatgcagggcaagggagatcaatgtgtttaagcaggatggggtcctttttgtaacaggccaacctagtaacatttccagtccaacttcagagcattccaggccaaaggtgcatatagtaacaggtctacctgatgtgaccctgacttcagggggagcacctgagtgcagggcaggatgcaggtgaggaacgagggcccaagatccccacagctgacaccactttgcaaccagcgcattctaggctaactcaggtgagattnnnnnnnnnnntctgtgattcttaacccactgtaaccaaatggttcttaaatagggaatgtctgcatggtaagtctccttcttaataacattttcaagcattaatgatgagttctttacagtgtggttcttacaggcactcacaaggttaccatgtt

SEQ ID NO: 324187 - DNA, 716 bp, Homo Sapiens; identical to SEQ ID NO: 62702

SEQ ID NO: 324188 - DNA, 1030 bp, Homo Sapiens
  misc_feature (12)..(12): n is a, c, g, or t
  misc_feature (79)..(79): n is a, c, g, or t
  misc_feature (85)..(85): n is a, c, g, or t
  misc_feature (102)..(102): n is a, c, g, or t
  misc_feature (118)..(118): n is a, c, g, or t
  misc_feature (141)..(141): n is a, c, g, or t
aaaccaaaacantcccttgtcccctgccaataccctgaacaacagctttgtgaagttccccctgccatgtaacacccanccattnacaaaatgatccctgtnaaaggtgaagactttncaaactaggccacaaagcctaanaagacgaaggcccagagccagctttccatagtaattagccagtgtgggaaactgagggtcccagtcaacacagcaagaggacttcaggtgatgaaggggccgtccccccaggtggagtgcagggcctaacctagccttaacctccaaaggcacctggggtggggagaacagcttcctcccctacaacaggaaagaacaaaagggtctttacctactcttaatctaatcccctaatttccccttggggttgggaaccgtgcgtggatagacctagtcaggtagactggctttgagaaattgcttagggtgttgaacttaaatttgtgacttttattcactattggggctgggtagatgccttgtatatttagaagagatcactgtttaagtttgggagctaacaggagttgccactggggatacaggtctgtggcatgtagtccctgaggaagaagaaatattgtggtctgggcacaaatgggtctctgctgaagggcctagaatttccaacgcaacctccctccaggagatgggggcaagtacactgcctctctctccctcctgtgactagcatggtgatcagcctgagccaagtgtagcattgtagcctagggacaaggacaatgacagaggactcagtgtttgggacttgaaagggggtggtcccagggctccagggtcccttccagtacagatggggtgggctgagctgtgcaggaagaatcaaagcgaccagcccaacactggacagcaaccccttccttcctcacctcatcttcacactggattatgaccagacctctgctgcctcctgggaagccccagtgaccagagcaggaccaagccgaacgcgtggttcgacgatatcccgtacatcccggccgggacc

SEQ ID NO: 324189 - DNA, 662 bp, Homo Sapiens
tcgtttctcttgattttattgatcttttaaaaaaataaaaggacatcttctgtggatacaggttaggatgtttctagggtaagaaacccaccatcgcagcgtaattctctgcggaatttcagtagcacttggaaagttctgttttcaacctgaaatttttgctgttcttccagaaaataacttagtaacaaaatgaaggccgtgaagctgcaggcacactccagaaattagtgtgttcttttaactcgtgtcccaaagagacagcagttcctaacatgcagtgatgagtggacacaccgtggtgcgttggaaatcccacgttcacgtctttgacaaaggaagcctcctacaatgatcttgtgctttaattttacttgatggtcaccctggttacttcattatgcctttgaatgaagtcctgttcttagtggctgcattaccaaggccatcttgccccaaagacccctcagggtcctgaggcagaattccccccaccccaccaggggactcaggaaaatgaatgatcgcagtttgccaaaagaggtcagatttcccactgacgctggttggtctggaaaattactctgaaaactcgaacgcacctctaggaatctcaatgagaagctaagaagcaggctacagtctcagaggtttatgacacc

SEQ ID NO: 324190 - DNA, 741 bp, Homo Sapiens
  misc_feature (365)..(446): n is a, c, g, or t
gggactgaattcctttattcagtcaacaaacatttccagagcccccttctgtactgaggcctcagcccagcccccaaggaaccctgaggtcaggggagacagctggacacagacacttccccagccccagggccagagtggggctggagggaaggacagggctacagtagtagtgggggtatatgagggaaggctgcaaggatgtggtagctggagttttgagagatggataagagttttccaaggaggcaaaagtggcagaaaagctttgcaggtgaggaggagcagcagaagcttaacctgcatgagaatccctctcaccagtcagaaagttgaccctgcacagccaaggggtaagctctgannnnnnnnnnnnnnnnnnnnnnnnnnnnnnnnnnnnnnnnnnnnnnnnnnnnnnnnnnnnnnnnnnnnnnnnnnnnnnnnnntaggctccaatacttgggctcttaacctccttactctgagccttctcacgcttggcatgctgttccctctgccaggaatgcctttccttcccttgattgcgtgaaaagttcctgccaggtttggtgtcatccctttgtgccccttgtagggtgaggacagaaagggtcccattggacaggtgggaaaactgaagccctaggacactcagataccattagggtggactgggaccccagcctttcctgccccctttcaggatcccaaagagatacacgggctcccctaaaaggcacc

SEQ ID NO: 324191 - DNA, 804 bp, Homo Sapiens
taagtcccatttcacattttccaaggtaccccggcagggcgaatttaggtgggggaggcccaattggcttttgctgctacagtaattccacaaccatcatcttgaagatttccatgctgttttaggaatatggagtagtcctttttttatcggggggcttaaagtaggaataaaccaggcgctgctggatactctgcatcagggttttttccgccatcattttcagttttggcttcaatggcttttatctttgcagtgacacttaggtttagactgagtagggctcagtgcttgaggatggctcgagactgattggaagaatcttatcattcttgttatggatcatatctctttacttgagcatgtgcccatcgcaccaccagcttcttgtacaggggccaacttgccattgagacactggatggcttgctctgcttcctgcttagtttcaaagttaacaaaacagtagcctcgaggctgtccctccaaagcacctgacttgtggaagaggaagtcaaactgctttaccttgccaaacttctggaggagcttgaggaggtggtattcggtaattttggggtccaggttgccaatccataatcggtgtccttcctgcagagagccctctgaaaggatggatgcattctccaggggaagagttttggtttctgcttccatcaatgtctatgaaatactcgtggcctcggcgtggtgctctcagctcatgcccggaaaccaggtcccgacgccgcggtcagacggacctctagacgcgtccgcctcaatgccgccagctgccagccc

SEQ ID NO: 324192 - DNA, 341 bp, Homo Sapiens
  misc_feature (181)..(192): n is a, c, g, or t
tttttcagaactgcttttatttggataactgactgaaggagtctcatttgtaaccaagatggaattcacagtatgttgttacattcacacttaaaaaatatatctctatgtacaggaatttgcaaagagatgtaaacatacattaatttccaagtacatttctccccttctccctggaggnnnnnnnnnnnngccatccaatgaggcaaccccttcaaaataattttaatacaaaggatgcaaacatctataaatgaaaaatgtggttcttctgccccttctgggtgtcatgggagagaatgtcaccgaatgaaaatgacaacagcttggcttcagatgcc

SEQ ID NO: 324193 - DNA, 653 bp, Homo Sapiens
gggctacccacctcctgccgtcccccctggaggacagcctcctgtgcccccgcccattcccccacccggcatgcctccagttggggggctggggcgggcagcctggatgagataacgtgagccttttttccctctttgtttttttaacaagattttctaatcgacttgcagagtagttgaagtgggtaagcagcagggtaccttgtataatgcacgacagttgcagtatgggaagaatggaccgggcccctgggataaaatcagagtggtcctcacacctagaggacggggacaaccagctttcagagtagcctcatcagtgcccttgcagtctgactgtgtacacttggttcagctaatgtctgagagtcctgcactgggttactttatactagtgaggacgttaaccagccatattggcttcaataaatagcttcggtaaggagttaatttccttctagaaatcagtgcctatttttcctgggaaactcaattttaaatagtccaattccatctgaagccaagctgttgtcattttcattcggtgacattctctcccatgacacccagaaggggcagaagaacccacatttttcatttataggatgtttgcatccctttgtattaaaattattttgaagggggttgcccga

SEQ ID NO: 324194 - DNA, 351 bp, Homo Sapiens
  misc_feature (306)..(306): n is a, c, g, or t
tctcagtgttttcaattcctccttggttgaatccatggatgcaaaacccacagatatgaagggctggctatatatgcattgatgattgtcctattatattagttataaagtgtcatttaatatgtagtgaaagttatggtacagtggaaagaatagttgaaaacataaacatttggacctttcaagaaaggtagcttggtgaagtttttcaccttcaaactatgtcccagtcagggctctgctactaattagctataatctttgcacaaattacatcacctttgaggtctcaggttgccctcaccnggtaaaatggaaggacctgggatcctctcctagggggcccttccc

SEQ ID NO: 324195 - DNA, 418 bp, Homo Sapiens
ttttttttccaagttggtccgagtgcaagctggtaaaagagattttttttccaaacacaaacaagaacatgtattccaaagacaatgaatataatactgataaaaacacaaacatagtgcttaagaaaagatggggtgaggtggagatgtagattgggcaggaacaattttctagtaaataaggagctgcaatctttagaggcaacatggtatgctagaaaggacactggaataagaatcagaagacctggatctgaatcatggctctgccatattctagccacatgaccttgagcaatagactttacttctctgagcctcaattttcacatctgtaaaatgaggataataatacctatatctcccagcactattaagtttctatagatatagggctattcagattatctacttcttc

SEQ ID NO: 324196 - DNA, 850 bp, Homo Sapiens
  misc_feature (22)..(22): n is a, c, g, or t
  misc_feature (29)..(29): n is a, c, g, or t
  misc_feature (88)..(96): n is a, c, g, or t
aacccgggaaagcagaggttgncagtgancccaagatcgcgcccattgccactcccagcccgggtggacagagcgagacgccgtctcnnnnnnnnnggagtttcagttattttcttttcttgctatatcctcaggacaaacctgataggtttctcactcacacatcattggctatgtgattagttttgtgataagtacaatggcacaattcttaaattcttgtattatagcaataaatctcattttccatgtaaagtgtcagtggaactaagaatgatttatgatagtaaacatcaaaatgatcaatttttaataaatttccacagattcatccagtttaaaaaacctttcttgatttcaggtgttttctctccttctccttgatcaaggttatttgggtttctatctgtgacttcttttgtttttataagggtctcgtatattttctgggctctgacaatttctttctgagcatcaaaatggactttttgcctggtcaggatgggaacaattaaattaaaatcattaattcgcttgtttaattttctgatgttttcttgaaactgctcacaaacatggttccactgtttcttttcagttggtgtcattggattcccaagttttttcctagacactaaaattgcctctctgagttgctcaatagtatcgcttatttccttttgcttaaggatccattctggttggtatccattatcgatcagtattcggttcaggttgtgagtcatgggatcaatgtaagaacagtcagaaaactttttcagaggttttcctttcccactgagattgtcaaagtctccttttgccatggattcttgaatgaggtcctccc

SEQ ID NO: 324197 - DNA, 816 bp, Homo Sapiens
tattctttccaccaaggccattaaaaagtggttattttggggcatcagaattttggttggtttaaatttcttttcggcttatttggtattttcatatgccatgaggaatgttaatatgcataacctgtactcctcccaaaagagtagtacagctaaaaagagaaagcagtgccaggtagacaaaatgtctctttcaacactggctgaccctggatattatactggtaacaagatgatagactctgtgttctaccatgttcctgctgtgacagctgcatggcataaagagacagagatgctctacttccaggattccttgaatgtacttagagtcttcttcctagtgggtctgaccaccttcttagtctgggctaagagctggccgacattcagcagcagcaggaaccccaggcagacaatggctgggatacaggtgcttagtgactctttcagagctgccaaggtgaagatagcccccatcatgagcagaatcaagaacaagttactgatctcttgcagcatcggtgggcccatgaccagcagcaacccagccagcagttccagaaagcccacagctatttggtagttcaggggatctggctggtagccaaataccttcagcgggaacacctcagcaaactgcacgaacagggcattcatccgctccgaaactggagccgagatctcctccgagagcttggccaaccccacgagcgcgaagaagccgcccagcagtacacgcagcaccgaaagcaggagcgccatggccgcgccgacgcgtggtcgacgatatcccggaattccggaccggtacca

SEQ ID NO: 324198 - DNA, 212 bp, Homo Sapiens; identical to SEQ ID NO: 246319

SEQ ID NO: 324199 - DNA, 892 bp, Homo Sapiens
  misc_feature (803)..(850): n is a, c, g, or t
cttcacaaattacccgggttgttgtttttcctctttaaaaaaaattccaccattttaattcttgttccacagggatacccctttccacgtgtaaacccccttgggaagatcaatattttatcccctcttcccattaaaatccaaaaagttaatttaaatttcattaatgcggggttaatactaggaatttatttaattcattctggttaaatcgggccaaaattattaaggaaaatttttaaaaggaaaaaaggcaaaccaaccccttggaatttaaaaaatagttatacttacatttttatacggtttaatgttccacagtgtgtgttaaaagttatattgaatttcttaatattaaaaataacagtatttatatttctgagataatagagaaagggttttttgttttgttttaaaaacaagcttggaggtcttagatacacaattgcaactggtaatggaggcatgagaaaaacgtaggctaaacacacgagcacatttttatattacccctttcgaactctagaaattatacaaaccctacaaaatgcccctcccaacccctgttggacagcaatacaattatctgtctcagttcagaattcacatcattcattacaatacataatagttcagtttttttaaaaatgcaataaaaccagacagccaagatacaagaaattagaagtaaaacattaaatgaatttacacatttaagaatacttaaatactgctttaaaatttttaaaaagaatttgttacataccacctaagacttccaagccactttctgttgcaacagnnnnnnnnnnnnnnnnnnnnnnnnnnnnnnnnnnnnnnnnnnnnnnnntcatgttgaaatgtcacagctctgaggcacattctggtgccc

SEQ ID NO: 324200 - DNA, 1084 bp, Homo Sapiens
  misc_feature (164)..(207): n is a, c, g, or t
  misc_feature (914)..(923): n is a, c, g, or t
tgcagttcagagaatgatttcttatgatgataaaaatcgaatgggatcagacgatgtttgcatttttttaatacttgaataggacacctcaagtttgagatttcattttcttttagaacacagtcacaagattaatctggtgaatccttttgtcacagttctcnnnnnnnnnnnnnnnnnnnnnnnnnnnnnnnnnnnnnnnnnnnnaaaactgaatggtcacatttaattgctttttggaccattgaatagttgggaagtaagaattttttaattggcatgagacggttcctcaactgttaaattaaccaactttgacctgtctttagaaaaaggcttatttgtatgattttgggctaactccccggggaccatattaaatgacaaaaatgctcctttgtgtgacacaccctacaaagtatttgctgttacgaacataaacgcccacattcttaatatctaatatttttgaccagtgatgttttatgctgtcatctgaaccctagagaagcagtgtcagaggaaaccttggtgtcacatgtgtcttagcaaaagggttaccatgatcgggggtcatgtgaccaaaagatgctccagagaagcttgagaatttgtttcaagttgggaggagggttggagatacaaaaatcactctgctctacaggactcttcagctgtctatgcaagaaattccgttttctctttcagcacctggaaagacacagcagcccaccgaggcgataggtgattcactaagcacaagaggaatgttttctaagcaaggcgtcccttgcctctcaaacaaatgccctccaagtttgttagggtttctattcctgcaacttgtggtatcaaaaccacttcctggaattgtcaaagcactgccaaaataaatgtttttcccccttctaagnnnnnnnnnntgacagtgctcatatttgacacttgtgtattggactctcttttgaatgaataaaaaggaaaaggggtttggtgtaattcctgatggggtgcgtgttgtttttcatgccatggtttgtgaattttaattgtggtttcccatttcgttgttgtaactgggcag

SEQ ID NO: 324201 - DNA, 858 bp, Homo Sapiens
cttgaagtttcgcttgagttaaaagagctcatctcaggtaagtaacaggccaagaatggtgggcaccgtgaccactagccaacttgcaatccattctactccaaagggaccggggccagggtacagggtggactgaggcagaccgtgccattcttgctgctcacagaattgctgacttggcaagtataacacctggagtaattatgtggcataagggtggtttcaagcacactgttctggagctcctttgggaagggccttttgtccccataccaggtgtagtttacagactcgccaggtatcacacatgacagtttcagataacagttgtcatccatgtcttctatcttctcaattttgatgacaggcttgggtacagggtcaagcacttgcagcttgatcttccattcttgctcattcccagtctttttcaacaccctcatgatgtaggtgctgttgtcctctttctggaccttagagatgtacagtgcgccactctgaggatcaagtctgaccctgcctttaaatttggattcaaagtacttagattttctggaatcccattctacaatcttctggtcgaaagtataaaaccaggttagttgtttgtagttctcaggcaggctctcagagatgttcagagtcacgttgctgccggagaccacggtcatatgtaccaagtgaccttgaatgctggtcaccaggagtgacagaggcagcagtagcaattccagagccagacacgaatcccaacctctggagcacatgcttccttccagaacttcccagcaacgcaggagacagttgagagcctggctagaaaaaggccggggctaaaaacggaacttaccaaacccc

SEQ ID NO: 324202 - DNA, 692 bp, Homo Sapiens
gagctatgagtggaagtttttttgtcctgcccattatgaaagttgaaaaattctcctgataactcctgccccattctttatattaatacattctcttttttcttaagtccaatgaagcctaatttcggagatataatcaagatgagctgagctgatttaggttgatcacaggacaaaatgaaggaaataggaaaaatctctagttttccttctcttcaaagcttaggactcactaacttcaggaagaggtgttaaatgtcctaaggttgttaatttgggatatctgttgacctaggctcactcccaaatagaattggatcaaggaaaaatgaatcaaacctgtcctgaggtttttctctcctcctccccgagagtgccccatgcctcccaggaagccctacagtggtccatctggggccactggagtggggatttgctctttggctcccctgactcaccaagcacttgcagcttgatcttccattcttgctcattcccagtctttttcaacaccctcatgatgtaggtgctgttgtcctctttctggaccttagagatgtacagtgcgccactctgaggatcaagtctgaccctgcctttaaatttggattcaaagtacttagattttctggaatcccattctacaatcttctggtcgaaagtataaaaccaggttagttgtttgtagttct

SEQ ID NO: 324203 - DNA, 371 bp, Homo Sapiens
aagggaaatgggtttattaagaccccctagggggaccttctttggcaactaccacaaattttaggccatttaaaatccgggccaagttcatatttgcttctccatgatcaccattacaacaaccacaggtcacacagtattacagaacaaaagcatggtcactttatttttacccaaatgcaaatcgtttttcacaaccaagacttttttctttcctacaatgttacaaatgatgtatccaagtccgactgtaatttggagttaaacagggatcatagaaccaaggaattatctctgaagctgctctttgggccactgtgccaccccaacagctctatcctgttgttcttttttttaattaaaaaatcatt

SEQ ID NO: 324204 - DNA, 810 bp, Homo Sapiens
caaagttttcccgggaaattaaggggggagggagaacttccaaaaaataaaaaggggggatgagggccaatatttttcaggaaaattcaaaaaaagcccagagggttggataaggggggatggggtggaaaccggtgggggcgtagacttaaccaagttaaggtaaaagtccaagggagaagggaaagccccaccctggtttttcctttaggggcactaccagggaggcactagggagactgtcaaaacaatcaggggcaaatgtgatatttctcaattcttaaacccaaagaagcaaaaataagcttcagagggcaagtgatcatagctatggatgaggcctcgggctccaggaaagttggggcagtatttattgctgcttctactttctctttcctgtcattttaatgtttgggtcactttactcctaaggttgcttttcatgtctgtgggtctagtcactgctacttggtacaaagcatttcccagtataaacagcatagggtagttctagagttttcatcctaaatccgttttcttactttcaatcttaaaaccatattgagaggacaaacagcctccataaagtttttttcccaaggagacagagtaatcttattatgtgaatgacaacagttctaacttctagacttgttatatcacaaatacaaaatgacaaatcagttatggttttaaaaaattagtttggaatggtttcacaagctagatgatggagcagctactaaatcaatggagcttccaagaacattctataccccaggaaggaaaggacaaccaaagaggtttccc

SEQ ID NO: 324205 - DNA, 205 bp, Homo Sapiens; identical to SEQ ID NO: 246322

SEQ ID NO: 324206 - DNA, 1239 bp, Homo Sapiens
  misc_feature (160)..(198): n is a, c, g, or t
  misc_feature (862)..(862): n is a, c, g, or t
ttttccctttggggaacaccgcttttggcccaggttccactttacccttatggggcccccgcgccgcccaaaagggaaaggttcttagaaaagctttttggagggcccgagggccgccccaaaaggtttttttatgtttttgggaataatctgctggaannnnnnnnnnnnnnnnnnnnnnnnnnnnnnnnnnnnnnnctatccaggaattttaattcggttaggtgtgggaactagtttcttgagtcaacccctttaattgtttctctggcatggtcaataataaaaattttgaagtcccactcggtaaaattagtgtaaacattcacatatttaatagtacctttaaaataagcattactacatttaaaatggttccaaaatgaatctataaatggtaatataaattaaaaaatacgaacttaaagtgaataaatttttaaccttagctatggtataaataatggtaaatgtatagtgtacctttgagtcattaaaatgtcttaaaagataacagcttgttaccagaacattagaaaccatagccatgattctcaagcgttaacaatctacatttgatattttcttggccactgcattcttcaatgaataataatttccagaattccattccatgttgttttccaatagatcttttcacactcgatgttgaatacatggctctttgcagatgaataaaacaagtgcattcagtttagagatccattttgcgaaggctcattcgactgaaggaatctctgtggcaggtgacaggcaatactgccttgtataactgagggatctttctgttgatcagtggctgtagggcctctttaaggccgatgatagtttctctccagtntccctttgatactccttttgatccggcccaattaagctcttattttttcttaaggcatcttcacaccttttagtaaaatctttaaagcagagtcgcagtttattatgatgtctgaagagctttgggtcactaggtatttcagacagaaaaacctgggcaacttccaaaggcccctgattcactgtggtgcctacagatccctggagtaccatctgaagcattttggggtctgcgggatcctgatgtgttgcaaatgccaactcctgtgtctttttctgcatgtcctcaatagcaacttcaattggtgttaagatgatctcttctttatgagtgacattgacccttgttttaatataaggaaaggcatgagacgtagt

SEQ ID NO: 324207 - DNA, 772 bp, Homo Sapiens
  misc_feature (445)..(445): n is a, c, g, or t
  misc_feature (461)..(461): n is a, c, g, or t
tttttgagggccttatgatcttggagaaggggcagtatcctttgggaagggtctgcatgggggccaaatcttggagccacagcccagacacttcagggctgcataaatgggagggacggctcttgttatagatgaggaagtctgagatgtcgtgccatacattgctgtcctcatagaggtaggtcatggaggactgcagcgagggctgcagggtggatcggtgatactcaaagagccacagcaccagcccccacaccaccgcagtgagcagcgggaacgggtcccacctgggttcagggatgtagcccttctctacagccaggcggctcagggcaaacaggacgcgtgacaacaggtacatgttgatctggctgttgatgttattgttttctccaaacaccaggatacccccgaggaaggccgccaggaatgcgtgtgctgggtnaggtcttgcccttgtnatgtaggaactgcagggccacggagacccttgtaggtgaacacaaaccgtgcccaggttccaggagtggatatatgtggcctgcagtatggcccacagcttctcctggaggctgccattccggaagagaaaggtcatgaccagcgcgtgaggggcccggattttggctccatagacagcccgttccggaagcccttaagcacggccaacgcagcgtggtagctggcgttgcgcagcagtgcgttgacgactacgagcagagcccttagctgcggcggggctgccatagtgcgggctgcgcgcagggtcccc

SEQ ID NO: 324208 - DNA, 523 bp, Homo Sapiens
  misc_feature (258)..(258): n is a, c, g, or t
  misc_feature (260)..(260): n is a, c, g, or t
  misc_feature (445)..(445): n is a, c, g, or t
  misc_feature (466)..(466): n is a, c, g, or t
  misc_feature (496)..(496): n is a, c, g, or t
tttaaaatcagtgtttttacttcagcaaacagaaccctgggataacaccagttggagtctgaggcctatgatcttgagaaggcagtatcctttgggagggtctgcatggggccaaatcttgagccacagccagacacctcagggctgcattaattggagggacggctcttgttatagacgaggaagtctgagatgtcgtgccatacattgctgtcctcatagaggtaggtcatggaggactgcagcgagggctcaggngntggatcggtgatactcaaagagccacagcaccagcccccacaccaccgcagtgaggcagcgggaaacgggtcccacctggggtttcagggatgttggccctttcttcttacagccagggcggcttcagggcaaacagggacgcgtgacaacaggtacatgttgatctggctgtttgatgttattntttttcttccaaacaccaggntacccccgagggaagggccgccgggaattncgtgttgcttgggtaggtctttgcctt

SEQ ID NO: 324209 - DNA, 819 bp, Homo Sapiens
  misc_feature (40)..(40): n is a, c, g, or t
catctgggcaaaaaaaaggggaaaccagggtaaggagagnagtgacattttaaacacattactaaaaatgtttaagcttttatttacacatccccttctctcagtttcccaggttatatgaacattacagcaatagaaaggggttatcatcacagcatccccttgcaaattccagtttacaggtaacttggtcaggggaaaaatatgggtcaacgaagtaagatctcagctctcccataagctattgctctcttcttctctttcccccttctcttaatgttagctgcctgttacagagagggatcatcaagactgtgtggacatgctagctgaattgacagggtgggttccagtgtcctgtgaagaaccagcaaggatgctttttataattccaaccattggcttcacatcactgaggtaacaagacttaatgttaagggtaaagacaccacgccaccctagtcagtgacatgtactccactttccaggaagacctgggccaaatgaccaagctttgcaaaagaaacctgggaagagcgttggaaaaagcagactctgagttggcttgagtctcctcgtgcatagaagcattcactcatccatgcagatggcaacaaggcaggacactcagaaagcataagatcaaggtactgctcttatctgcacctttcattcaagctcccctcaagtgctccaaaagaacagagctttgggtattgcttcattaagaacacagtaactgcagtttaaaagccattgcattctttagggtcagtttattataacttatcctaccagaaagaatcacagtttaaggcc

SEQ ID NO: 324210 - DNA, 357 bp, Homo Sapiens
  misc_feature (11)..(11): n is a, c, g, or t
  misc_feature (72)..(72): n is a, c, g, or t
atggaggtggngataatgattattttaattatattacctttatacccctaatttatttagagtatttccccntattgctgaataccttaagtagttttaaattttattatgataaattcctgggagggggattatttagtgaaataatatgaagaactttatgacttatgtttgccttattgcattcccaaagagttgtaacattttacagtgttaccatttgagtaggggttttatatgttgttgctaatttagtaaacataggagagaaatcaaagtttttctgatttgcttttatgtgatttatctgtatactttgttcatttatataaataaatgtcttaatggtttctataa

SEQ ID NO: 324211 - DNA, 807 bp, Homo Sapiens
  misc_feature (136)..(389): n is a, c, g, or t
  misc_feature (398)..(407): n is a, c, g, or t
  misc_feature (758)..(758): n is a, c, g, or t
catttgctgctcttgtgattctctgatcggaaatatttggaaaatttcatgttttctatatattgacagtgcattttatgccacctactcaagtgtatgtagaaagagatgttttgggccaggagcagttgctcannnnnnnnnnnnnnnnnnnnnnnnnnnnnnnnnnnnnnnnnnnnnnnnnnnnnnnnnnnnnnnnnnnnnnnnnnnnnnnnnnnnnnnnnnnnnnnnnnnnnnnnnnnnnnnnnnnnnnnnnnnnnnnnnnnnnnnnnnnnnnnnnnnnnnnnnnnnnnnnnnnnnnnnnnnnnnnnnnnnnnnnnnnnnnnnnnnnnnnnnnnnnnnnnnnnnnnnnnnnnnnnnnnnnnnnnnnnnnnnnnnnnnnnnnnnnntctgtctcnnnnnnnnnntttttttttgtacatcaagaccacagcaaggtggttttatcaggatagaatgtactatccaaatttacaaacttctctcagaacacctagagaaagaactcttttctggtcaagagcctcatatcaaagaaagaatacctaaactagaagcatgggtaaaagggcctgcagtaatcaaacaggctctgccaggcaggcaataaaggggagctagtgctcagcttccagaacatgaggtattctgaatatataccccagagcttggtacaccaagagcataataggttcttagatctcttcaaggaaatttataggcttcagaattgctctcccgggatttaatcccctacnaacaaatgatgaggtagaaaagggtaggtatgtatactgctttttatcc

SEQ ID NO: 324212 - DNA, 880 bp, Homo Sapiens; identical to SEQ ID NO: 246323
  misc_feature (390)..(390): n is a, c, g, or t

SEQ ID NO: 324213 - DNA, 851 bp, Homo Sapiens
  misc_feature (61)..(61): n is a, c, g, or t
ccgggacccagcgggataacccggggtttccaatgcaaccaggaaaaggattctcttttgnaagtattgctccccccagttgattgggtggctccattcacttccaatggtgagcatttccacagagtgggttaaagcggttccggaacacgaaacgtgtagggtttctgcccatccacactaggcaaggagaacttatgtctataattccactgattgttcagtccagctgtggtcccagtcagtccggtactgcaccaagtgctccaaacagtggttcaagaatctgttgttccagttcagttctagctgggattcactcagtttgtgaagtgttaggttctctggagcccaggggatcaccagattctgcagttttagcatctgtgtggcctgtctcctgggttcccgtgggtcctggagctgaacaacaaatgtttggtagaggtggatctcctttttttgcaactgacagccagaagtgatttcttcagagaatagatagtggctgcacttctggactttatcattatccgagttcttgtaccaataatgcagagtgaggttggtaggctggggctcagagctgctgttccaagtgcaattcatgtactcgacattgaacacaaaacactgaacctctgggaggggcagagtggaaacactgagggagtcagtgggcatagtggtcaggaagaaatcagctgtggtgtcttcattcccattgggcgtcagaattgtcgtgttcagccccactcccagcaggggcagctgcaggaataagagggatgtgaatggtaatgatggcttcaacatggcgcttgctcttcattccctgggtgtagtctccc

SEQ ID NO: 324214 - DNA, 873 bp, Homo Sapiens
  misc_feature (39)..(39): n is a, c, g, or t
ccttttcaaaaggtatttaagttatatcctccatttgcngcggaaaaaaggaaaagctcccataaggttcccaacagattgtatttgttctcattttaaagataacctttttcaaaggagtagctgccctcatatcgtacagtactatatccctgtcagatgcacacttcccaaggagaaatgtctcaattgggttaaatttaacactacttatactgtcaaatcccccaggtcattgaacatataggattagttctttgttcatcccaaatgtctactggctgtccacatgtggcaaaaacagcttctttccagtgatgatcaatcccagtatacactgtctttcctaatattgtatgtaatggctcttcctcgtctccatagcctggcccatccattttccactgcttcacagttttgtcatcaccaacagtgaaaaaagaagtcccacaaaagcgagtacatattcctcgtacaaagccttcatgtgcttgtattgtacggatacaattccgctgagttagattccaaattctaacctctccatcacacgccccagaaaggacagtagccagcttctctggatgctttgccaagcaattgactccatcacggtgaccatccagcgaagcaaggaatggttttgcaaatactcgttccagtttggtagcatttaaagctcttatatattctcgtgggacctcaaaaggatgtaaagcaggatcatagtttcttggaactctctgtaagtccaacttggtttcgcggacataattgtccggattccggctcagcatcttcaccttcatctcggttgctcttccggccggactccacgaggtgtccgctaggagttccgcccaccgccacccc

SEQ ID NO: 324215 - DNA, 522 bp, Homo Sapiens
  misc_feature (78)..(126): n is a, c, g, or t
  misc_feature (495)..(495): n is a, c, g, or t
  misc_feature (499)..(499): n is a, c, g, or t
aacttttttgtattattatttttacatctagaataaattatttaaattatttcacagcaagggagagggataggtaannnnnnnnnnnnnnnnnnnnnnnnnnnnnnnnnnnnnnnnnnnnnnnnngtttatgttcttgagctgatgtagtggaacttgcctagcacattcaggtcccagccagttggcagagcatgctctcatctccttattccataccctgggcgtcccctttctgttgactcaggaactttctgagaatgaggacagcactaggagatgagctttggcaggtatccaccttaacgctacaataattgtgcttcctgaaacaaaacttgagattgtatcatagaaggaaacaggaagtcagaaatcaaatctatgcttttaattgaaaccgtgcctgaaacagtttgaatgattgttttaatgttgtttctgaaattccttgtacctttgtgaaaaataatgataataaataaaagtgaaaanaaanagatgtggaatatgcaatggaaa

SEQ ID NO: 324216 - DNA, 884 bp, Homo Sapiens
  misc_feature (55)..(55): n is a, c, g, or t
  misc_feature (612)..(637): n is a, c, g, or t
atgtcagcggtgcgtggtccggcggcggctactggctggcgcgactcttcgggtntcattgcattgcgtctatctctcggcggtctggtcgtcctgcgttcgcttccgtcactggttcgctcgtgggcggcgtgtgctcgcccgtgcgcgccgccggcgcgttcccgcccgcgatctcctctgccggcgcacgactagtagacgccacggctcacattcaccgtcgtcgtctctggtgaacccaccttagtgctcaggtcccgcgtagcccccctggggccccgccgtccaatccgagggccttaggaaagcttctctgctggccccgggcgcccgccccgcgtctttttgtggctcgttgctcgtctcccccggccactgagagcttctggccacctctggtttcttcctcaccccgtcctagggtctggggaggttttcaccccagaggcatgggacatggctagaggtgacttcttatttttcttttccccactgaggaactccaagtggccaaacacctgcttcctgaggctgggtgacttctctgtccgtctagcaggcagcgtggtctcaggttctacatgctcctcgcaaagggtgctgacaccnnnnnnnnnnnnnnnnnnnnnnnnnnctagaggcatctcaggtgcctgcccatgggccacactcttagagggggatgtagctcttaaaggagaaacatcagcaaagtaatcatcattgtttaaaactgagtatcgagtctctggttctttgaccactttcttcttctttttcttctctgggagcccaaggtctactttgtgtgtcttggtgatcattccggtgggcgaaatttccccgcctccacgtgagagccagctccgccgtgacccccc

SEQ ID NO: 324217 - DNA, 881 bp, Homo Sapiens
  misc_feature (69)..(86): n is a, c, g, or t
  misc_feature (517)..(517): n is a, c, g, or t
gggaatttgtaaagatcactttctctttcctccaagccctgaaactttgttcttcaaaagagcgtttcnnnnnnnnnnnnnnnnnnaagccagtttataaagtggaagtattaggagattcataaatcttctatattgagaattggctatgttaataaatattacaacatcattaaggttttagctaagtttgattcatgctgtctgttaaatcaaaactgatctaaatcagaattattaaatgtgaggagcttttttaatacaggaaaagaaacatgtcatccacttgagttaatagttttcctacgttgatgacagccctcatgagtagcatccacatttttaaaatttcaaattggtttttctactagtagattgtgtttctagagaaagatacaaggcataggtgattgtttaggattttcctctagcctttgccattacctttttgggggatgaggttcacagtaggactttgagtgaccgtcccaccgtgaagtgaattctctgagctggntggtgtggtgctggaagggaagtttattttttgggaagccactctctcccctttaagggatatttccccaagggcctggcttcaattctttgaggacctttagaagtgaaaaaatattttttaatggagatgatggagaaaaacttcccattcaggaagcccttgccgaggtatatcggaagcaccttaattttgctaagggaaacctggaatggatagcaggaactggggctggtccgggaataatggcgccttggatacctggggtggggaaccaaactgggtttttttaaggggacgggggcaaaaggaaaatttattggagaatcccgggccactgggaatttggtttgcttgtaaaaaa

SEQ ID NO: 324218 - DNA, 429 bp, Homo Sapiens
  misc_feature (17)..(17): n is a, c, g, or t
  misc_feature (70)..(70): n is a, c, g, or t
cacctccaggggggganggtcactcaagtcctactgggaaccctcaaccccccaaaagggtaagggcaanggcctagggggaaaatccctaaacaatcaccctatgcccttgtatcctttcccctagaaacacaatcctactagtagaaaaacccaatttgaaattttaaaaatgtggatgcctactcatgagggctgtcatcaacgtaggaaaactattaactcaagtggatgacatgtttcttttcctgtattaaaaaagctcctcacatttaataattctgatttagatcagttttgatttaacagacagcatgaatcaaacttagctaaaaccttaatgatgttgtaatatttattaacatagccaattctcaatatagaagatttatgaatctcctaatacttccactttataaactggcttaa

SEQ ID NO: 324219 - DNA, 809 bp, Homo Sapiens
  misc_feature (49)..(49): n is a, c, g, or t
  misc_feature (147)..(147): n is a, c, g, or t
cttgggaatggacttcaacgaggtttcaccctggagcagggagcccttngtccccttcccacagcagtgtaggcccttgatggggacgtagggctcacttgcatagttgggctcagggtcttccgtctcgtcaggactgtccagggnctcgaggaaggacgctgggatccagcttcgctttgctttcatctgacagaaccccccaaccgctttcggtttttttctacgacctccaccacgttcccccgtggacagagccatctcggagcccgaggtcttctcgtagttggcaatggcgcggtacgtctgcaggatgatggggcccggtgatgtctgtcgcggtactcttgccatctttgggcatcaagtatgtctctggcttttttgtctggttgtccgtggggagcttgaggtcatcagggcgcaccttgaagaagtcgaggaggtggggacagcgggagatcttggtgggcaggctcatgagcgtgctgcagtactcggtaagtgtgccctggcggttctcggcggcccgctgcccgtcaaaccacttgggagctgggaggtgggggatgatcctgttctctggattgatcgcccctgcctcaatagggaacatttcttttaaggttttatggaactcgtagatctcggtgaagcgccggtagaccaccttctccgacaggtcctgccatttcaccaggaacatgtacacatagtgctggctgggtacgaagcgcttctcaaagcccagcagggcgatgtgacggatgaaggtgtcccccatgactgggtggcctccagtgctcccc

SEQ ID NO: 324220 - DNA, 816 bp, Homo Sapiens
  misc_feature (42)..(42): n is a, c, g, or t
  misc_feature (108)..(108): n is a, c, g, or t
  misc_feature (119)..(119): n is a, c, g, or t
  misc_feature (139)..(139): n is a, c, g, or t
acctgtgcctccccccacatttttttgaactcctgaggtccnccttaagaaaaaatcccactgaaactccccggaaggtggaaaacctttgaatttgtcctttaatcnacttttcctcnacgccttgcccctgaaactnctccctccctgacatgtttatgtttggaggacataggatggctggaagaatttgtgctcacccccatctggccgtccagtgggtcttccacccccagggccactggtgacaaccccatgcttcagtttatctatgacagctgtcaaggacggcttcttgtttctgctgggagattttcctttagaactcccatgctggttctgagaggatgacatggaagagccacttgaggaaaaggaggaggaagatgccgtacaggaattagatgatgggggagttttctgggacaacgagcctgaggatcctaaccctgaagatgacttcatgccagagcttgaactagttccagacatatgagaaccaccagaacctgaactgataggggacttggctttagaggatggaggagttccaggaacaggcttcattggagaggcaagcttgtcagagcctccaggtggccttgaatgagaaggggatatgtttggtttacttaaagaaggattcataagtgatgatggctttccttgaggtttcatcttggtgctgctagagccactgctcagtccatgcttggttatgggagaggagcctggcttccccccagactgggatgaatttttggactggctagatccagaagacccctggctagaatacatactgctacttaaccc

SEQ ID NO: 324221 - DNA, 514 bp, Homo Sapiens; identical to SEQ ID NO: 137025

SEQ ID NO: 324222 - DNA, 951 bp, Homo Sapiens
  misc_feature (179)..(179): n is a, c, g, or t
  misc_feature (242)..(242): n is a, c, g, or t
aaaatgatgaaatggtgtttattactatctggatgtaaaacccagcagtgttgtcctatctgacatggtctagggtttcccagccagtgagagaggggccaggaaggaactaggctgcgtgtcaggcacttgtcaggcagtatcaggcagtcagcaccctaaggctaccatggtggggntggggctggtaagctctgatcagccatgaaaggccctctctgccctactcaggcccaagccanggaccagacattctgagcatggctcagtcgccttccccaacctcaggtctgacccagagtaaagaaagagccctcaggttaatgggaagccacttagctctgctcccaaccagccactttcacacaagtataccaaaagatagcccctgacttcaacagagaggggcttttcctgcctgagatctggtgagcagatgggtgcagggaaagtatgctggcttttgtcacagtgacattttccaaagtggaaaaaagttaaaaatatctcccaccttaagttcagatgaaaagtcaccctttgggtcgggaatagtgaggggatggctaggcccagggactccctcaggggagagcgctgagtgccatctgggctggggctgcagcaaggcagggctggactgcacagggaggcaggcagactggatccagcagcctcagggcccaaggaggagtgagaatgagagggccagccagtgtgtgagaaatcagcctccccaaggcagaggtgaaccctcaatcgcccctcctcccttactcgctcactcagcattcacaggcagcaacgtggtccctggtcaccatggcaaccaatggccaatgcctttctcaaggccaggcccatctgcccatcccacagggagatgtctctgtggaagatgggaagcccagccacaactcccagtggcctagaaagctaaggccatgcacc

SEQ ID NO: 324223 - DNA, 1346 bp, Homo Sapiens
  misc_feature (770)..(770): n is a, c, g, or t
  misc_feature (807)..(807): n is a, c, g, or t
ccctcacaacgtgagattcctttacttctgcagcataaaagcaaatgaaggtaagaaaatctcctggtacgaaaaatttgagtaagaattctctctagaataaacaaggtccccacagatagctgaaggaaagaggaagcagttcagtctggcacccggtactctttgggaaaacaaaaagggaggcagattgcattactgctctcttctcatagaaaacggtaagtttttgtggcatggtccattgtccaagagtgtaagaaaagaagtgagttggccattcagatagctaaaatgcagtttcatctgaccaaaaacccaagattatctgcacagtctctgcagtgccaggacaatgcaggtgagagaccaggagagcagggagtggccacgctgggctgcagaagagtccacctctctccggtcgggatccactgcgggggcctctgtggtgacaaactcaaactccgtgggacacacgtcatccatgcacccactgccactccctgagccactggattcatcacttgtgtcctggaaattgacatcattgccattgtaggcgttttttagtttgttggtcatcacacggagagccataatctgctgtctgatgaaagtgtcaggccgagtgatgtccacatccacctcgggattattgatctggttggtgagcccatcattcatgatctcaggcaagtatctggctttgctgtgcccgttccagcattcctcctcgttggacgtgcccgctgtcacgctctcgtccntgcagatagtgtagggtaatgctgaccagaccttttnagagagcttcaatttctcttttatgtctgtgaccagccggtccaagcttgtgcctgcagcagttgttggtctttcctcaggattgtagggcctgaaacgtgtattaaaattttcaggagctgagcgggcagatctgagggctggagcaggtttgggctgaccacatccctgaaagacctttgcagacacctgcatgctgttttcttgcatgttcataatggcttcagaaatcttgacatctatcgggtccatgaccgactcaatgttgaatggcccctccagtcgctctgccaccaagagcattgcatctataaacagattccactctgtgtcgaggtcagcctgatttgccaagcagcccttcatgacgttgagacagtagttgttgcagggcctcacagtgggaagcccccgacagtatgggcagtacagcatcttcatgagggcacggatacaccctggggttgggctgaccttggaaactcggtttgcaacttctctgcccacagtcagcccctggacaaaggtcctggcagccc

SEQ ID NO: 324224 - DNA, 776 bp, Homo Sapiens
atgcccaaggccggttaggttcctggggcccgaggtttctccctttgggggaagccagctgtggtagccacgggttccgcttaccctacctgggggccccgcgcccccaaaacggaaaggttctaggaaaggtttttttgaggggcccgaggcgggccgacaatgttatgtgtatttcggatcatcacgacctttggtttaaaggtttggcatgtttatttataattacaatttacattactccaacagaggagcccccttgctatgttctaattcttagccattaagtcctacaaaaataaacccaagcttttacagtaacttaatcaatacagaactaaagcctttatagctattagaggggtttagttaccaaggtgcttattttcgacaaaatgccctgtcactcagaggacgcatgcgtatactaaagttctgacccatcgactcatgcaacaaatgtagaccccaccctccctccacccactgttacaacacaaacacaaaacaacgatgtacaacagaggggaaatatgctcttggtcaactgaccttgcagaaaagactggcttgtttccaagtggatgagaacgccagtgtgtggccagagtccagcaatgactgaccggcccaggtcagaggctggcagggaccacagaagggccaaggcgctgccggggctcatcccaggctccaaccccaacctggaagcttgtggacaccaggctctgtgcagcagctccgtggctagcgtccagggcccctggccactaccc

SEQ ID NO: 324225 - DNA, 1000 bp, Homo Sapiens
  misc_feature (398)..(398): n is a, c, g, or t
  misc_feature (536)..(536): n is a, c, g, or t
  misc_feature (922)..(922): n is a, c, g, or t
  misc_feature (931)..(939): n is a, c, g, or t
  misc_feature (950)..(950): n is a, c, g, or t
  misc_feature (959)..(959): n is a, c, g, or t
  misc_feature (976)..(976): n is a, c, g, or t
gggaaattgggaatatatctttacaatgattgataccatggtatattgactcttagatgctattgatctgtagcaccattttttacaaacgactaaggaaaaaacctgccaattaaatcatgatatgccatcaattatgagacatcccaatttgagagatgttagattatagaaaagtatgcatttatgactgaaatggtagtggaattatttgaattctacaccaagcacttaccatgtgccaggccctttgcagagtgctctactgaccaagaaagttgttgctgccacattatagatgtggagcctaagggtcacagaaattgtgtgctatgccaaaaaacattgaactggtagatagaaaatgacagagctagggttcaaacctagatctggcntgactccagagcctagttttacctgggattataggcataagccaccatgccctgcgctaagtaactgttacttgagttaatgtactagttaattgacccttagaaaattatatttttctgcttgcaagtcttcattanagaaggaaattttaaaatattttatagtataatgctatccaaactcatttttaaaaacattttattatggaaattttcacaaatgcacaaaaagaatagcagaatgaagctctgtgtacccatcctccaacagctgtcctgtggtcagtcttgtttacctgcatccccacctatcccctgccccaacccacagggatcagtttgagtcccattaacagggcatagtattttcatgtctgtgtgatcagagacattcaaatataactccaaagataggggtacttttttggaacataaccacaataccattgtgttaaggactggcttaaaacattttttggatggccaagttaccagtccaatatttcaaacttcctggattgtcntcggtaggnnnnnnnnnaacagttgggnttatttcgngttcaggttccgggggnaggttctgggtcttggccttttgt

SEQ ID NO: 324226 - DNA, 814 bp, Homo Sapiens
gggaaaggaaggttctttagccagtgggcggaggggtttggaggccaaaccaattaaaccccttaatgctcccaggttccacactggtcaccaccaaataaagccaggttacacttgtctcggacagggttctcttcgtacccttcggcagtgcttaacacttcagtaggtggtgcaccatatctcgcccaggagtgacaggtacttagcttgagctgattatcctcttgaggacatgcccaaaggtaaacaggagttctgggatggtgggtgcccccaactttgtagattttcacatctgaaaatttgacattgaaggcatggggatagaaacagcctcggaatccataaaaatactcacggatacgctcatccctacattcccgccggaagtccttggagcgctccaccacacccccagatttagggagcagcacagtgcgtacaaagtgggggaggtcccgtttcagttcattgtacagtcgttcttgatccagaacaacaacgacatccacctcaaaagctgaggctgcatgcaccagagcctggtaaccagagcccttgacccagccacaggtgttaatgacacagccactcacagattgccttcggttcacctcacacctttggttgaacacatctgctaaacgagatgtaatcttattataaagcttgatgttagtgccaggagtggtggaaccaaaatgatacaccagaggggcctggatagagaaaccctcttcgacatctgcaggccgctcgatgtagagggcccccatggtaccagggatggacacagaaccctggcccaccc

SEQ ID NO: 324227 - DNA, 835 bp, Homo Sapiens
ttttacatttataggacttttaacctggatttttggttttttccagcactaatgaaattagtagggttgaggagctcaggatactttttcctctctaagggaaaagacttgtgaaaaggaaccttcagttgattcaagcagtaagtggaaaatgaactcccacattaggccccctgggaggttgtgaaatttctttaactcggtgaagaacacgaggttctttttagaacaggactgaaggatatcactagaaagttcttttagacttctttttccaggctcttggttcaagcaaacagaaatgagggctagggtatgctttcaggtgtagctaggcttaaagtacctcaaagatcattctaaaagcatgctcagcactgttctcaaatctagaggcagctggtaataacaacatccaagggatatgttcagccagagagctgttcttcagattctcacttgtaggcccacttaatcagggtcaggtcttagagtctccaagttttatctagtttatcccctgcttttagctagaatatacttcaaagcatgatcctactttacagttcaaatcttaacactgttctgcttttataaacagctgcttgtcctaatcttaaaaggtcttcaggaaaaagacggtttgctggtttccttgataaaatatccccgagcatctcattccttctctttgtgcatctgtttctctttgggtaacataagcactcctggagaagttgcatccattttattttacgggtccacacggcaggggcctcctttcaagggtgcggcagttgctgctgttgctggaacagcagctgctctgtctccc

SEQ ID NO: 324228 - DNA, 815 bp, Homo Sapiens
  misc_feature (264)..(264): n is a, c, g, or t
agccagcctgtttgtggcccattgggcccctctgcagatgtgagctttttgaccaagctggtttgtgatgtttccttccgaagtttccatttccacagggttgagctcagagggcttcttcagacttttgcagaagtgtttctgcaacatcatttttcaggaaacagttgttcaggccccagcacctgaggactgtcggcggcaaagcctcagatgggggccgaggcaggttttctgggctcttctgggtcttcctccttcagngtgtgactttggctcttggccttctcccagggagttcttgggagatgctgagctggtgtcatccataccttcattctgggaggccaagctgctgaggttaaactccgcaggggtgatggtaatttctggatttgttgagttggaaggggagcctgttgagtgggaggtgagggcgcagtccccgttgggcaggtcactgaagctgagcgacagtggcattttctcctcggctgcctttccattttcaaagatgtcatcaggtagatttgaaaagaaggagtggtctttgaaggtgggcgtttccggggtaccctggctgtacatggacattctcctctgaagggctgctgccttgttcccagcgcctgaggatgcggtcatgtcctccacgtcaaatggataccaggtgatttccaggttcagtttgatggtaccaaggtcattgatgtcgacagccactacctgaggtcgggctgcaaacagctctttggtctcacaggtcacgctacctaccaggatgtgagttgctagccctttgagctccgtgaccc

SEQ ID NO: 324229 - DNA, 1295 bp, Homo Sapiens
  misc_feature (74)..(74): n is a, c, g, or t
  misc_feature (233)..(233): n is a, c, g, or t
aattgtaaaaggtttatcaagaaaaaagattcaaggagcagcatccaggaggagaccatgacccccccggggcnaacggggggcagtggtgacacatgtcagcaccccacagcaagctgctggaccacacccttgaccttggttgggaggaggcagaaacccctcggggatcgtaaacataggtcagagacagcacaaacctgacggggagcaggggcccacattccagcganggcagacagagggcaggtgggcatggaatccctcgcatggctgggcaagcaggcccctgtcttttttcctcttaggtttcccattgttgcaacaggaaggatcttgggaagacagtgccacagagcccaaggaccctgagatcctgggtttggacctgcttcgagtgtggggagttattgctggtgaactcaaatatacagtcacttttgagagtcttctccaggaaggtgtcaccagggatctggggcccagggcttatacctcagcaccttgagtccgaggaggggaggatgctgcaatggtcccctgcccgagataagctgagggcccaaaagtggaggggagtcagaggcctacaggagggagatggcctgtagccccctcctgcaggggacagggtgatgtacggacagccagcaacatgggagcaagggagatcccttcctaccacacaggccagaatccccatggaaagggtaccgtaacttgcttggaaagtaagggagagaagagggagatgtttgcatgcctcccataactttgcccatgctgttcctctcccctgaaagtctttctccccccatgtactgtctggcaggcccttgtcattcttcaaaacactgcccaaatgttgcctactctatggagtcttccctgaccagtggaatgctgtggtcccttctatgagcttccagaaatccctcactttaaacatcagtcatactgcattgactctgtctgtgtctgaccccgaccttcactgaggactcctgaagagcaggcatgtcacagccctgggtgcccagcatccgacccaagggtgcagcaggcctcggtgtctgctgaatggataaggcagcagtggccaggtgagcaagcaaaataggctctaggggaggctgagaccctggcctgaccttcactgactgaccggcagcccagcttctggaattccttgcggaagccccccacatgtttacgcaccagctctgatgccacagtgctgagctgcaggacgctgtcgtccatcttcttactgaaggccttgaaagtgtccaccc

SEQ ID NO: 324230 - DNA, 474 bp, Homo Sapiens
  misc_feature (123)..(132): n is a, c, g, or t
  misc_feature (156)..(169): n is a, c, g, or t
gattacaaaatttcaaaggcattaagcattttagagaatataaagtacgccagtatacatacatttccagtatatgtcagaccactaagcgcattacagtcccatacaggccgatacagccannnnnnnnnncttaaaaaacatgcataggcagannnnnnnnnnnnnnacagaatatagatgctttatcactgtacttaatatggtgtcttgttcactatacttaaaaatgcaccactcataaatatttaattcagcaagccacaaccaagacttgattttatcaacaaaaacccctaaatataaacggcaaaaaagatagatataattattccagtttttttaaaacttaaaagatattccattgccgaattaagaagaagataagtgttatatggaaagaagggcattcaagcacactaaagaaacctgaggtaagcataatctgtacaaaattaaactgtcctttttgcc

SEQ ID NO: 324231 - DNA, 815 bp, Homo Sapiens
  misc_feature (377)..(377): n is a, c, g, or t
ccaaacacccaggaaacgtctgggttgtggacctgaaggcgaacgtgatatcaaagagcatgcatttttccggtatattgattgggagaaacttgaacgcaaagagatccagcccccttataagccaaaagcttgtgggcgaaatgctgaaaacttcgaccgatttttcacccgccatccaccagtcctaacacctcccgaccagggaagtcatcaggaatattgaccaatcagaattcgaaggattttcctttgttaactctgaatttttaaaacccgaagtcaagagctaagtaggatgtgtagatcttccgtccttcatttctgtcattcaagctcaacggctattgtgggtgacatttttatgtttttcattngccaagttgcatccatgtttgattttctgatgagactagagtgacagtgtttcagaacccaaatgtcctcaggtagtttggagcatctctatgagatgggattatgcagatggcctatggaaaatgcagctgcataattaacacattatcaaagtcctcttacaatttattttccgccgcatgtcagctaagtagacccaatgggggagagaaaaatgcctgcctttctttcccctcttttttctgcactgcccatatttcaccccccaaccattccaatctgggggataatttgaatgttagccggtaactccttccacttccggggccctggagccttggcctttgtatccaaaggtgtatggggttgccttttgccctaagaagggaatcccctctaatttcccccctgtttcttggaaggccaccacgaacctt

SEQ ID NO: 324232 - DNA, 769 bp, Homo Sapiens
cgggccccgggttattccttgaggaaaacaggtttgggcccatgttccgcttggcctatggggggcccgcgcgcccaaaagaaatggttttagaaagcttttttaaggggcggaggcgggcggacagggtattatggtagaaggggggggtgaggggatttcacacacttagcatatgcaattttaatcaaccaaaagaaaatcccaaatgtacaagtgaaaaaaatccaaactgttgacacaggcctaactaatatcagctacttttatgtacagctgtatagttcaaaaaagctatcctatatgtatatacaaaagttgtttatacacaggtctgtacataagggtctatacatttatttcctcagaacccttaggtgccacctcttggtgaggacaccaacacttcattcacatatcttacaaaaaagaaagaccatttccaggattgacaacattgtgcatcctgtattcagacaatgtacactccactcgactggttaagatccttccatcataatgcggaccacaccagatgcatgggttccaccaaacagcttcacacagagtgctccaaagtaaaagcccataaaccaacccgagatgaagcagggtcctgcccagtgtgccaccacaggtccgggcttagttgagtctgcctgccctgctcactgtcggtattccaattcatctacactgataactttggcgggcatggagggcaggggttgctgtagcacatctgagccaaaccatttggcaaggcccc

SEQ ID NO: 324233 - DNA, 1373 bp, Homo Sapiens
gcagcatatcttacaaaagaagaccatttccaggatgacaacatggggcatcgtgtattcagacaatggaacactccacttcgactggtaagatccttccatcataatgcgggaccacaccagatgcaatgggttccacgaacagcttcacacagagtgctccaaagtaaaagcccataaaccacccgagatgaagcaggtcctgcccagtgtgccaccacagtccgggcttagttgagtctgcctgccctgctcactgtcggtattccaattcatctacactgataactttggcgggcatggagggcaggggttgctgtagcacatctgagccaaaccatttggcaaggcccacaggggagctgctcctctggctggggcgatgctccagctgggagtgcatgtggggcaggcctgaccggctgggcacgttctgaggggttgtctgaacgctgacagctgctgcatgggaaccagagcctggaggatgcagaactgagcgctgtagctgctgttgcaccattgccagatgcagaggtgttccaggacgagggtttaagagagggtgactagcagcaggtaaagggtaaaagggctgacccaggatggggccagatattccctgtaaatgactcaagtccatcccaggaggaagcacaccagtttggagcaaacttggaagatgcttgtggatgtactccctgggccagcatcctctgtaccaaccctgggtgaagctggtgagcaggcctaaccatagggacatgggggacaaggggaacttggtggacagggcggagaaaaggtgttgtaggaaactggggatgcccaaggtgggtgtttttctcccagttgctttaggtcgataatcttgttctttggtgtaacggttgggcctgggacagtggggtggaacacgaagacctctgtaatgctgacagtttggaatttgtagtgggagaagagtctcgatcggcactgggtacagagctggatgacaggaggttttcttcactggccttctgagtatcctctttactgtcaccaagagctgcttttccagatgctggctcctccttgcttttctctttgctctcgtacatcttacgaatcactgaggtaggggtaaaggaaggagaaagcatgcttgtgatggaggcagcaggggcaggggaagaggaattccctcgatgcacgggtgctggtgacttggtcactcgctgttgcctgtttctgaatccatctctggttctgtccacctgtggtttgccaaaaccaggctggtagaagtttgctgcctgtacagcaaggtcatgtggcaaggccagcccttctaaagctgcctgttgcaactccagctggctcatctgggc

SEQ ID NO: 324234 - DNA, 268 bp, Homo Sapiens
ttcattcacacacttagcatatgcaattttaatcaaccaaaagaaaatcccaaatgtacaagtgaaaaaaatccaaactgttgacacaggcctaactaatatcagctacttttatgtacagctgtatagttcaaaaaagctatcctatatgtatatacaaaagttgtttatacacaggtctgtacataagggtctatacatttatttcctcagaacccttaggtgccacctcttggtgaggacaccaacacttcattcacatatctta

SEQ ID NO: 324235 - DNA, 249 bp, Homo Sapiens; identical to SEQ ID NO: 149622

SEQ ID NO: 324236 - DNA, 978 bp, Homo Sapiens
  misc_feature (454)..(850): n is a, c, g, or t
  misc_feature (906)..(936): n is a, c, g, or t
tggtaccggtccggaatttacgggatatcgtcgacccacgcgtccgaacggacagactttccatatgtttctgctgctatgccatgtttgttattattattattctctgtgtcccttgttgcaagaagaaaacatcagcggcagagggtccagagcttgtgagcctgcaggtcctggatcaacacccagttgggacaggagaccacagggatgcagcacagctgggatttcagcctctgatgtcagctactgggtccactggttccactgagggcgcctagactctacagccaggcggccaggattcaactccctgcctggatctcaccagcactttccctctgtttcctgacctatgaaacagaaaataacatcacttatttattgttgttggatgctgcaaagtgttagtaggtatgaggtgtttgctgctctgccacgtagagagccagcnnnnnnnnnnnnnnnnnnnnnnnnnnnnnnnnnnnnnnnnnnnnnnnnnnnnnnnnnnnnnnnnnnnnnnnnnnnnnnnnnnnnnnnnnnnnnnnnnnnnnnnnnnnnnnnnnnnnnnnnnnnnnnnnnnnnnnnnnnnnnnnnnnnnnnnnnnnnnnnnnnnnnnnnnnnnnnnnnnnnnnnnnnnnnnnnnnnnnnnnnnnnnnnnnnnnnnnnnnnnnnnnnnnnnnnnnnnnnnnnnnnnnnnnnnnnnnnnnnnnnnnnnnnnnnnnnnnnnnnnnnnnnnnnnnnnnnnnnnnnnnnnnnnnnnnnnnnnnnnnnnnnnnnnnnnnnnnnnnnnnnnnnnnnnnnnnnnnnnnnnnnnnnnnnnnnnnnnnnnnnnnnnnnnnnnnnnnnnagggttgtgggggcccttaacagtgccatattaattggtatcattatttcctgttnnnnnnnnnnnnnnnnnnnnnnnnnnnnnnngaggacagagtctcactcctgccacccaggcctgcagtttcc

SEQ ID NO: 324237 - DNA, 769 bp, Homo Sapiens
tctccatgaagggttttgtagctgaagggcaatggagcttttccttttccacttagccagccttttccattttcatcctttctgggtatcgtctttcaaagaaaggccatatcatcctcttcaggtctccttaatgaagaaacttgactacttgtacctacatctgttaacgtttctggagaagaactagatgatgcttgaaatgcttttaggaatgggctgtctactgccgtaatgggagattctaaaaattcaactgaaggtacaccaatcccactgtcatctaaccgcatgtagccttccgccagcgagctgaaaccagttaatcctcccatggctgcataaggaatgtcctgtcccactggtttttcctgagccaatctttcttgcttagtttccactactgtgtcatgggcatatgcaggctgaccacaagcacaagtgaagcagctatggaatcctgaacacttggaacatgtattgcatgtaaagccaggcgcagcactgtgctgatcagcaaagtgtttgcacctgcagcgaatgggctggctaccattcaaggggacataaaggtaagccctgcactggcagccagtcacttggcagggcagatcaatggggcactgctgaggaatcgcttccaagtcagttttatgttgtttatacctccggtactccaggtactcgtccaccgccgccgcgccgccgagaggcaacgtcaaccgctccattgccggtggggaagccataggcttccctgcggaccccc

SEQ ID NO: 324238 - DNA, 1210 bp, Homo Sapiens
atagcaagaaggtagaaatcatcataggaagaacagatgaggcagtggagtgcactgaagatgaattaaataatcttggtcatcctgataataaagagcaaacaactgaccagcctttggcgaaggacaaggttgcccttttgataggaaatatgaattaccgggagcaccccaagctcaaagctcctttggtggatgtgtacgaattgactaacttactgagacagctggacttcaaagtggtttcactgttggatcttactgaatatgagatgcgtaatgctgtggatgagtttttactccttttagacaagggagtatatgggttattatattatgcaggacatggttatgaaaattttgggaacagcttcatggtccccgttgatgctccaaatccatataggtctgaaaattgtctgtgtgtacaaaatatactgaaattgatgcaagaaaacagaaactggacttaatgtgttcttattggatatgtgtaggaaacagaaatgactacgatgataccattccaatcttggatgcactaaaagtcaccgccaatattgtgtttggatatgccacgtgtcaaggagcagaagcttttgaaatccagcattctggattggcaaatggaatctttatgaaatttttacaagacagattattagaagataagacaatcactgtgttactggatgaagttgcagaagatatgggtaagttgtcaccttacccaaaggcaaacaggctctagagattcgaagtagtttatctgagaagagaagcacttactgatcccatacagggaacagaatattctgctgaatctcttgtgcggaatctacagtgggccaaggctcatgaacttccagaaaagtatgtgtcttaagttttgactgtggtgttcagattcaattacgattttgcagctgagtttttccaatggtcatgatcatctatacaagtatagtttacaaaacccccggaagataataatggggtgatgccctacgtttactgaattttccacttggatcctagatattggatcccaaaagatggcaaattaaagggcacaccctgaaagaaacctgggaagctaacttgggtattccaaaggaatttttccccaaggcatttgcccttctatacccaagacttcaggttcccctggcaaaaaatttaacaggaaaccattttagatccttccccc

SEQ ID NO: 324239 - DNA, 296 bp, Homo Sapiens
atgtaggcataaatttacctccttgatattctgcgtagaaaattttaaatgatcgactttagcattccatatcatggtatcttaattattaagcccaaattggcattgtaattcctgcttaaagattaactctttaattatcaatgtcatgtgagaggcagaagagaaaatgaagcttattggtgtatacagaagtcccatgtgggcaagtgtttgcttttctaacattttctttttaaaaaattatttttattgggatattgacaagttataattgtatgtatttatggggatac

SEQ ID NO: 324240 - DNA, 787 bp, Homo Sapiens
  misc_feature (208)..(208): n is a, c, g, or t
gtgcacaatttattacatttatgagttcataataaaatggatacttaggaactttaaaaatgagttagaagtaacaattagatgtaaaattctcaaatcttggaaactgaaatattaaattcttagaattttctttaaaaactctttcttatgaaagagaaatttgcatagtttgaaaattattatgtcctttcaagggaaaaagganggaattaaaaaacagacacattgatgaaggcaatgagttcttctcagctggtttattctccactgaagctcaatatagggattatattttctttacttacagggaagtgggtcactgctctgttttccaataaccctcaaaacagaacaacaatgcttacgcgaaataacacaagccttaactattatactttgcaggctttaccatttcaatacacttctagtccaactgctttcccaactctaaagttctgtgagtgaactatgaatatttttaaatattttccagattcatcagggaggctgcttttcttctctgcactgtaatcacactgagctgctgggaagctgaagcagctctctcttctgcctgacttagacgcctttgaagtctgttggctttttcttgatgctctagaattagcttttcattctcagctaccttttcatttgccatttccagctgagaaagcagctcttgggtatgaagtttctgtcgactcagctcactctttagattattgattctaatttctgcactttcagtaagtttcttcgtttcttctttccacctattgcc

SEQ ID NO: 324241 - DNA, 877 bp, Homo Sapiens
taatttgtaagaaaataaactcttgtattgtagcacatttcatcacagcctgactaggaccagtgctcgactttctggtggcagggcccagagctcacggacaccactgacagtatggggggtgttctgcttggcaccatgtctggctttttggccagaagtcctttgcagagctgaatatccccttgccagcccgccagctctggctgggaggacttgctcttgggtctgcagcctgcatcaggagcctccactttccccagtgctggattatgcatcctgctctccagggtccaccttgttgctacagctgcatggcttcctgctccactgactggttcgagggtgccaggtacttctcctggatgcccagtgtggaagagaaatggaagtcggctcccattgcggcagacatcatggcttccaagcttcgctgctcttgggctccgaaacagtatccattggctttatccacagcctgcaggactcgctggatgctctccttgtcctggatgttgagagggataaaggagacaaggctatagtcttcgatgagctgcactagcttctcattgagctggcggtagtggcggaagaaagggtcagaagccaggtggtcaagcaggtaggagaggtccagaacctctgtgtagtagtccaggttgaaggctaaagagagaaaccagtgttcaggagcaaccagtatcaggctaaagacctgaggacgaggttcctttttccttttttcctttgtgcactcatgcactcaaatatttcttgacacagtaaaatgaagttactaagaaaaaaagcatttggttttacctgctggctctgctatttactagctatataggcaggtatctacttcatagga

SEQ ID NO: 324242 - DNA, 544 bp, Homo Sapiens
  misc_feature (459)..(459): n is a, c, g, or t
tggttggctttccaaaaaccaaaaccagcttccatttatttatgggccccaccccctgacgtcctggggagaggggccccccaaagagcctttctctctgggacaaaatacaaatggcaggaagggtccatacagaaaagaacgtctctgaggtccttgcgtttttaataaaatggtaagagtctttcgtgtggggcctcccagctgggcaagccttgattggccaggagtccaggtgcccgaggtgtgacctcagcccctcgccctgagcaggggcgcctgggcagaagcctaggcccgcagagaggcccggggctgccgcccaattcacacggctcatggtcatccctgggcgagtagcttttcgctcgggaacgggttgcaggaaggtcccggcggccgcattttcgccgtcgtcccgcggggttgcccggggcgttgctcaggccggccacggcncggggggaactcttcgggaacccgttccatgtcgccgagcccagggatccgtttaagtggtgaggctccatcgcgctcatggggg

SEQ ID NO: 324243 - DNA, 609 bp, Homo Sapiens
  misc_feature (134)..(134): n is a, c, g, or t
  misc_feature (170)..(223): n is a, c, g, or t
  misc_feature (225)..(226): n is a, c, g, or t
  misc_feature (229)..(229): n is a, c, g, or t
  misc_feature (231)..(236): n is a, c, g, or t
  misc_feature (238)..(242): n is a, c, g, or t
ggccccgggtttttccttggggaaacccgtttgggccccgggttccctttccctacggggccccgggcgcccaaaagaaatgttttgaaaaattttttaagggcccaaggggggccacaaatttctttaagtgntggtgaatgtgtttgttccgggggaaggttgatgannnnnnnnnnnnnnnnnnnnnnnnnnnnnnnnnnnnnnnnnnnnnnnnnnnnnntnnttntnnnnnntnnnnnttttcccagttccacagaactgattttattagccaatacataccaaagacgggtggaaaagaagtattatttttgtagttttctttcataatggaagccttatgctattacagactgcagttttccagtcttttgattaagccttgccagttgtgtgccgctgcagcaccaaagaaactgttttgcagcctgtcacctcctctggcaggcagccatcctggtctcggagagtggggtcagcaccagactggagcagcagctctacaatatccagaaactcacaggcagaggcataatgtagagctgtttggccttcattgtcctgacagttaatgtcagctctatgttgcagcaacactgtgactcc

SEQ ID NO: 324244 - DNA, 790 bp, Homo Sapiens
ggcagggaaaatttagggaggggtttttattttctccgggaaactctaaaaaaaccaaacctccagccataagccaaggccctggacaaccttttttaaaaaaataccccaattctggtgggattccttgcttcccagagccaggctgctcttcccagtggtggtgagaaaacggctgggcagatacgggtcttactttctcgagggagcccccatccttcttcacaggatgtggaacatggggggggcaggcgtcggacagcggccctgggaagggccctgtgcaaggcagcctcagccgctctcccccaggagacattgtaaggatccgtgcacaatctttatgatatgaagatgctgcgcacgtttcaagcggctgcatctgaaacaagccaggcagtcagctgggggcttccgagtaactgtggcttctctggcgtgtgatgtttatgaaatacggttcatcactgtgaggatgtggagaaagctgggaggaggtgggctgaaacacagccagagcagagaccacagcactgacgactgctggggaagctctccttggtttggcctccccaaccagggcctcggctggcaagggatgcagctcatgaaatcttcttcctcggggtggtccggggtggccgcagctccgcaggcccatgggcaaacgggcagcagtccgtggacagagcgcagccatcagggtgatgcatgaagaaccagcagaggcgggttttgcaggcttcagagagcagtctctgtttcgcttccggttgctttgtcttccacc

SEQ ID NO: 324245 - DNA, 980 bp, Homo Sapiens
gggatagatagagacagggccgtgtccattgagttgaaaattactggcactgtttaaggcgcgcgagtctcactgttggcatctttcctccggggctgcagcctcttgcaccgaaacccctcctgataattggtttccgccccgcgcaaccgagtacagttaaccgcattatgacttgctttgaagcctaagcattgaatcaagacttctagtaaagaagggaaaaaaggaaagatgttctcagtagagatgaactcaggtgcagaatctgagtctcagcacaagggctactatgcagaagtgtgtaaaggaatgagaacactcaggagctcggtgggcacacagtcatggggactaggcagttccaaggattgaaatacggataagcaggtcgagaaaagcgacatccagagaacttgtagatgagtgctccgtggtttgtgacattgaaaaatgagacaatgcctgcctcatagtctaggaaaaccccaatacgacagggaggcacagccataaagagagtcaaaaccttgggatcagaagaggaggagtcctcaaaagcattatattcacatgtattctgtaatcctataacccagtagccatattgaggtctatatctggagtaaacttttgaataatttacacttggatcaaaagcaaacccagagctcttccttttattcagactacttattttactgtgtacgcccaggatccaggcaatctttccagacacatctacttcccagtaatatttccccgaagagaaatattggcagccgaagacaccaaaagcagaaaaatcacatggatttgaattcttaaatgtgcaggtgcgtacagttttcacttgtctctgatccacagaaatagcaacattcgaagtggcactgcctggattcagcatcacgtccacccagtagtactggacatccggacgcgtgggtcgacgatatcccgtacttccggaccgtacc

SEQ ID NO: 324246 - DNA, 898 bp, Homo Sapiens
  misc_feature (269)..(557): n is a, c, g, or t
gggttctttacccgacctgccaatttacataaccatctgttaaaattacctgtttattcttacacagttttgtggtagctccgatcgcttctgtataattataatttcttactaagctaagttgtatacaaccccactgtattattttctttagattctgatttcaggatctgtgctttgattccttgtctgttttatcgtatatttgcttgctttttaattaaagcacatcagttttaaagtgttaactatatgttaacaatatggannnnnnnnnnnnnnnnnnnnnnnnnnnnnnnnnnnnnnnnnnnnnnnnnnnnnnnnnnnnnnnnnnnnnnnnnnnnnnnnnnnnnnnnnnnnnnnnnnnnnnnnnnnnnnnnnnnnnnnnnnnnnnnnnnnnnnnnnnnnnnnnnnnnnnnnnnnnnnnnnnnnnnnnnnnnnnnnnnnnnnnnnnnnnnnnnnnnnnnnnnnnnnnnnnnnnnnnnnnnnnnnnnnnnnnnnnnnnnnnnnnnnnnnnnnnnnnnnnnnnnnnnnnnnnnnnnnnnnnnnnnnnnnnnggaattccctcttggcagatattgaagtttatttgaaaaatttaattccgtccctttttttcattgtaatatttcatggtttactattttccttttagtattcatgaaaatggtattttctggttgaataagggtgctctagttttatgtagatgatttcagaatgtgaaggctggtttgcctgtcagtcatggaaattcactggtaaaattgttgcatatttctctctcccagtcttaaaagcccacaggcaagaattaatgctttcttaactaagttactttgagtattaacaagtagcttatactgaggtgtgcttcaagggagcattatagggcaga

SEQ ID NO: 324247 - DNA, 682 bp, Homo Sapiens
tcgtgattatattggttactttattgctacattagaaatgcaaataaactgtgaaaagctgcaaaagcatgcaacttcatgaagattatgaagcaatggaagcacccatcatagcaggttaaaacaggcttatccagtataggatgcaagaactacatacacaaaggtcatcaatggtgagattattgacagcatctgccatctggaacatatgcaccaatggtaagtttaaaaatgaatttaaggaaacattggctacctctgacttcttagccagggaacataggtgagaagatatccgaagatgtctgaaaatctctacaaacacatgggtttacaaaaaaacaagcctaaaatcaagactgtcaggtaatgttgaaatctgctcgttgggaggcgatccccattttatgatgtttgaacacactctttctcttgctggatagtttcctttgagggaagagtatttttttcttcagtattagttttcttcagttttgacctgtcaaacttctccacttccgacaagtctggcttatcactcatcttgactagaagatagcctgaaagcttgaagactcgtgaaaggctgttcgcggggctgagacccagactcgctccggaccaggttagcgttcccgcgcagagccctgcagtgctaagccacccagcaggccccccc

SEQ ID NO: 324248 - DNA, 1909 bp, Homo Sapiens
  misc_feature (201)..(247): n is a, c, g, or t
  misc_feature (306)..(306): n is a, c, g, or t
  misc_feature (345)..(365): n is a, c, g, or t
  misc_feature (395)..(395): n is a, c, g, or t
  misc_feature (421)..(421): n is a, c, g, or t
  misc_feature (966)..(992): n is a, c, g, or t
  misc_feature (1506)..(1506): n is a, c, g, or t
agcagactcgtgtcgcccatagcgggggagaagaggcgctcagttgtgtggggtgcgtgcgctcgcggaatgggtcgtctctttggttttatttttctgctcccagcgcagtatctaatttctactagttcacctgtctcaacggttttattttttctaaaagtacattagactccagcgatgcaagaccatctgtgtatnnnnnnnnnnnnnnnnnnnnnnnnnnnnnnnnnnnnnnnnnnnnnnnggccggtcggagggagcgagagggagggtggcgcacgtgggcggtggtgcggcgtagcnagattggtggtgataagcgactggagccaggagagaaannnnnnnnnnnnnnnnnnnnnagagtgcttcacgataatatcacatacacnaagccagttgggccgttgatgacgcntgtggggttggtttgctcacaggtgtggtgctatatatctctttatatgtttcgctttgagtgagcgagcgacgtgaaagaaaagaacgagggagggtgagacggaggaggctagagcgggaggatggacgaggaaggatatcatggagcaggacagggagtgggggcgggaagacaggcgtccagacacagagtgcatgtcgtgggcaggggtgtgtgttggcgcggacgaccgagtaggtctgtgcgacgagcacaaaacacacccttccaccccgccccagccctctaccccaccgtaattggtgaggtgagagggcggaggagggttgcgtggtgtgggctaggggccggggcgccgcccggcatcgtgcactcccttatccgagtagaaagagtattttcacaggcgcaggcgggatggggtgtgttggaggggcgggcggggtggagaggggtctagttgggtgcgaggacgtgcgtgccgaggggcggtcgggggagagggtggggcgggagttgttgttgggagggccattcattcnnnnnnnnnnnnnnnnnnnnnnnnnnnattcattcagcaaatactaagctcccactatgcacataagagatgttcaatcaatgttagatgaagggaaaatattcagaaattcacaagtcactccagcactccaaaaacatacaactcttcatgctcctcccttctccgttcttggcctcatctctgcccacatcacaggttgttaaatgctcacatgaacaagaacttaagcacagtatgacatggcctgtgacttatacaaatgtctgtcccaccaagaggccatcttttaaagtaggtactagttccaagcctaaaaacaccctaacgggtcttcagcttcatctgaggatatgccacagtgatcatgcctgctatagaggacacaagacctccaagtccaatgatgccaggattggatttatagatccccagctggtccaaagggttcaggatatcacaaaggttcttcactgtgtccaggagcaagggaggatgctgcttcagagatcggaataaaagaagtaagaaaggattggangccattctgtttcctccctcagccacgctgaaaccaaagaggatccctgggatgctgatttctctttctttgccctgtcacatgtaactcgtttcatctgcagggagatttcatacagatccctgacaaggctcagcagaagagaatagtagtagtggtgagcagccctcgttcgccatttctctttgttgatgccagaggtgagacctacgctcctcacccagaggatggtgtcacagatgaaataaatcacacggttcaggttggctaatgttaagcataagcgaggtaccaggtcagtggcatgaatgctctgctcagttgcctgtatagcatgtaccacattgcctagtctgaaccctgcaagtagaacccacaatagtgaacagttatttcattagtc

SEQ ID NO: 324249 - DNA, 731 bp, Homo Sapiens
  misc_feature (79)..(87): n is a, c, g, or t
  misc_feature (114)..(128): n is a, c, g, or t
  misc_feature (137)..(292): n is a, c, g, or t
ggggggaaacaacacccttttttcttccccggtttttctttgggacaaattttggcccggttcccttccctttgggggnnnnnnnnnaaacaaaagggtttaaaaaaatttttnnnnnnnnnnnnnnncccacaaannnnnnnnnnnnnnnnnnnnnnnnnnnnnnnnnnnnnnnnnnnnnnnnnnnnnnnnnnnnnnnnnnnnnnnnnnnnnnnnnnnnnnnnnnnnnnnnnnnnnnnnnnnnnnnnnnnnnnnnnnnnnnnnnnnnnnnnnnnnnnnnnnnnnnnnnnnntactctgaagaaagtcttaataaatactttattattaagcataattattcatctgttggtgattgagaaatgaaaaccacaccttcgaagatttcttttaaaaaatgaaattcctttaactacaacaacgacaacaaagggacaagtacacagaaccaggcacttctgggaaacttgtcttctcatccctttgccctcccttcctccccctttagtaaagctggttgggcacatttgctaggatctgtgggtttcatcacttcaagccttactgcttaaaaaaatgaggtaagaaatttctatcggaaaagtgaaactgacacataaaccaaaccaaggtcttccctggctgctgcggcagccgttattgctctaagttggagtgttctgtttgcttttatgtattcggagtccttattgccattctggctggcctccc

SEQ ID NO: 324250 - DNA, 846 bp, Homo Sapiens
  misc_feature (85)..(157): n is a, c, g, or t
agggcgccatggagaggtgttggggcgggttttgcgcccgagctaggagacgggccggtaaaacgtgggaggtaggagtaagaannnnnnnnnnnnnnnnnnnnnnnnnnnnnnnnnnnnnnnnnnnnnnnnnnnnnnnnnnnnnnnnnnnnnnnnntgtggtaagggagccgtccctttccccagggccaggggcctagagttttccattttggggactttgtgttttggaagttttaggacataaagctttagatcagagtattcagaaagggttataactccgtcagtcatttacatgttagtagtataaattatctgagcttccctgttctaacttttagctcttttagcaataaactcttctgtgcaatttagctgcaccgaggaaacgggagtttttctggaagggacttttgatctctttagactgagggaacgtcctttgggagtagaggggcagggagcatacgcaagggattccaggtgcaggtaaaaggtggcactagttcaaggttttgctgactcagtctggtagtcagagtctgcaggagaagacagttcaaggcagggcctggaggattggatcagtttagggacaggtcaaaggctggcttacagaccttagaggcaggttgcttgggtcgttgaatgctagtctggtgctgagagcccttttctctggcaactgtggactcagagctaaccaattgtagttggcagtgggggtgaagggtgatccagaggcctgagctgcagagggcacaagagagaaaagatgtcttagaaagagctttgagaacatgccttggctgctggcagggaccttggatggggtagtctccc

SEQ ID NO: 324251 - DNA, 1065 bp, Homo Sapiens
gaacaccagtttgaagggagtgaggctaggaaaacatttattacctcacccttggtagcagaagcaaggaccaccccagttctaggccactagcatgtatctcctacacaggagcactgagtcctatgatggtggcttagagaagggatttgatggttagattatacagcccatcagggatgaagagagaatactgctaaggagagatggagctctgaggacaggggcaagggcaatggaacctggactggttatgttcaccactgaaaccccagtaattgccactgcaactccatatacttcaggcattcatcaatcattaacatagagaggggcggagggacaaagaaaccagatgactctgttacagaaacaacatcctgaaaaagtagaggcaccttagaagtaggtaatctaactgcctcatttaaatacttggtagagacaatctagtttgatagaaagagagaaagaattagaacacaaacccactatctcctagactactgcatttcccatttaatcattcactcatccatcagaaattttctgagtgcctatgactgtgaggcctaaatgtcagatgccagggaccggatcaggaatgacacattaccagccttcaagggttcacaaaacctgtttctgtaaaagatgatgaggttgtatagttaagatacattataggctaaataggtctttgcaagccacttaaaagtttagttgtcaacattagtagagtttagagctttactataggaaagttcctaatgtgggaaccaactaataaaaaaataagcactgtataagacaatctatttatagattgaagtctctatttccctctatttttacatgccagtcaggtattttcaaccattcacacaattatggttattctcaagtcagaatctaactcagttagtgcaaatataatcatgagtattacacattaaaactaagtcacaataaaagccaagtatctatgatctatagaaaaggaaaattcattttttaaaaatcattcttactgcgggacatcatcaaatcacatgtatgcatccc

SEQ ID NO: 324252 - DNA, 1015 bp, Homo Sapiens
  misc_feature (31)..(31): n is a, c, g, or t
  misc_feature (43)..(43): n is a, c, g, or t
  misc_feature (61)..(61): n is a, c, g, or t
tccagctggtaaggggttgcccctttggggnctggaaccgttncccgggccagacccccangaaggaaagggccctgctggccaagatgctggccagggaacccagtaaatccagtcccttccgggaatttctgagctaagacttttagaccttgctccacctccggaaagcatgaagaggttttcaaatccacgctcgcacatggtggtggccgcctgactggccagcctttcatcatcgtcatacagaatgatgatcttccatgggcatttttatattccaagaatatcatttgaataaggggttcattgttctaggacagagttgcaatttgggtaactgtaagctccaacaatgtggcactgctggtaagaatctctatcacgcacatctagcagcaggaaggggcagtcaggataaggtttgtctttggtatggggctctgctttcttcactggccctttgtctagatccagttccccaacaccactgatgacactctgaagagttgagcggctggagtcccctgctcctgcgttgtttatgaactgctcagggctcggcgactgctcacctggatttcctttcccattggtcctggcagtggtttcagcatcagggtctgaagctgcagaatcattgtcttccagcctttgaatctcctcagctgtcacttccagtgtttgatcagagagggaagcaacttggatgatcagctgggcaaaagttgtaacttttagtctcttgaaaagctcatcttttttgtatctataatttttcttaatctcttcgagcttctcagtatatttagtcatactgttaccagtgtccagtcttgatttgatatgctggtatcttgggttctgtggtatcctttttatcagatactcagggttcccaatgtgcctccggagggacatatttgctccaaccgaccacgttcggggttctagcctcacgggttgcctctaaccctagcttcctacccccacaaccttgttcagccgcctcccc

SEQ ID NO: 324253 - DNA, 809 bp, Homo Sapiens; identical to SEQ ID NO: 246093

SEQ ID NO: 324254 - DNA, 608 bp, Homo Sapiens
tttaacagtgatatacataattcaatttttattatcaccagtctttatcaatttagctgttctcctattgttcaagaaatgttatttggacaagttttccatagggcaacttgacttcctctttattcatttaaaagttgttgtctccttcaaagatatttagaggttgatctggtgagccctggaagtctaaagtcattttgtggcttcagaggcaggaagaactcccaacagcgatgtgtcgctagcatcttcacaaccatggttgggggtgtcatctgaggttcttgtcccatgtgggtcctctctcttgaggcaggtctccatctcatggaataaattctcctcgagagaacccctccttctggttgaaactctgaggggcagatgtttttgtttctgaactcggcaccacgtgagaaatagaataaacagaaccaggagaaggagcccaaagatactggataaaataagtgctaaatgacctgaggaggcattcagtgatttcagcgactgtccagagcacctcacgccagcatcttccttgtgtccacagtcactctgtccccagggtttggggtgacagtcccatagaaatgactcatttc

SEQ ID NO: 324255 - DNA, 760 bp, Homo Sapiens
tgaagggaaaattggaagccctggggtttttcgcaggcacattattcaccggaacaggggtccttccaggtgaggacgtgaacacggacaggtgacctccacgtaaaagcaaagcctcatcttacgatacaagtactcagcggtttcttactgcccatctgacaagctgctcttcctaacttctcttagtaccttccaacatgttcctaacccagcccctaatgctgtcctaacatacaagctgcaaagagaaaaagaacaggctgctaatttcttccctttgatttacaaacagctccattaacctgctcttccaaacatactcaagggctggccttgcagcctgcgggggagacggcctgatgctgggctctgtgaatccaggaaccggactcttcaccatgtttaacttctgaccttttcagctgctggagcaagatggttagtgggcattctactgggccaagccgcggacatgccagcaactccctgtccaacctctggcctttatttaaaacccagataaacattgagtgagtgatgacactggtcaggacaaagctctgagagtacagtacctttcagtcacatcaattgccatattaggaaaacctataatggtttctagtatcattcatgcttttgactagctaggcagactgtggtaaagattcatgagtcattctgaaaatacatgaggctggctgaatccccacactgaaagattagaactaaacatcaacagtaatttctagatccc

SEQ ID NO: 324256 - DNA, 837 bp, Homo Sapiens
  misc_feature (73)..(87): n is a, c, g, or t
  misc_feature (99)..(99): n is a, c, g, or t
  misc_feature (152)..(160): n is a, c, g, or t
  misc_feature (224)..(232): n is a, c, g, or t
  misc_feature (387)..(396): n is a, c, g, or t
ggggaggaggggataacaatgtcttgtgtgccctcccccccctcccgactaattttttcttcgccccagtgcnnnnnnnnnnnnnnncggcgtccgacnagaaggtgtttccgccccgagagagtggccgccccaaaataaaattgtatgcnnnnnnnnntttttcaccaaacccgccgcattgaaaatgggcgggcttcttctgtccctggacggccgacagnnnnnnnnntcttctggcgggggacacgcttgtcacaaaagaatttgcggggttgtgtcccgctatttaggggggggagaagaaaaaagacccccgccgcccacaaagggggtgaggccccccctctctcacaaagttttaaaaaacagctgtttctgggacgnnnnnnnnnngggagaggggagggagcccaggagaatgcgccccttttcccaaggatggggttttcaccaggggcggggaggttaccgtatgggttcttccaacccacccaggtaaattagggagggccactcatggccaggatgggaaaggttcaaaggcccccggttattacttgagtggccttttttcgcttggcagagggtttccccttggtcccaaaaaacagggggaattactcaattcccaagataaaggaggaggcatcacccacatccagtactagggtttagctgttggatatggtagcaggacacctttattacagaaatatgaaaagttccagcaggaaatagggtagcattataccacccgttcagaaagaacaggatttccagcggggtggaggacaaccgtttacctcgcggcgccatcttcagtccccgtggccc

SEQ ID NO: 324257 - DNA, 882 bp, Homo Sapiens
  misc_feature (118)..(118): n is a, c, g, or t
aagatgtccacagcaactccttggaatttggcctgaagtttcaagtttgctgactgcaaaacgttcggatataaccctggttgattctgatgaagccagcacactgttggaaggattnttggcccagccctttcactttcttcagctgttctcggttgataaagggtccatttttctctcgccattcaataatatttttggccctgttggcattgagtcctgcaatatgccttaacaaaacttctgaacagatgttaatatccactcccacaaagctgacacattcttctacaacactgtccagtgttgccttgagtaaagtctgggatacgtcatgctgatacattccaactccaatgtgctttggctcaattttcactagctcagctaatggatcttgtacacgccttgctatggaaactgcacttctcaaattagggtccagccctggcatctctttgttagcttcagggctgacaatgtagattgatgctcctgcttcactgacgatacagtaaacaacatccagtggtgcaaaataattcttcattatcaggtcagcaaagtaagcttctgtttccctgcaggcagttccatttccaatcactactgtgctgcagttgaaattcagcaaaagtgtctttattttctccgcctctcggaagccttgtccacaatgcaagtaaaccacatcagtatgaagtatctgactagtaggagaaattatagctaatttgcaaccatgtttataaccaggatccactcccattaaggtgcgccctggaacagggcttgttaaaaggagctgacgaaggttccgtccaaacatcattactgattccttctctgcatctgatgttagtttggctctgaattctctcc

SEQ ID NO: 324258 - DNA, 821 bp, Homo Sapiens
  misc_feature (43)..(43): n is a, c, g, or t
gttttggaattgaaattaccagctttctgattcggaaaccaanctgggacgattacaaagggtaatgccgaagggctgatatgcccttaattggtctggtgtcactgggttcacttgaagacagatttctgtatcttcccctcggatgtcaatttccccatacccaccagtaatttaaataccacaacggacatcaggtcatcatgattttcctgagcaccctctgaatttgtactgatggcatctggagaagtttcaccataattctgtaggtttgcaccagcattcacactttctgctgtgcccctgtaatttgtagttgagttctttttatttcctttctccaaaaacatatggctatcacttccatcactttctaataactgttcttccaatatcatgctgtcaagtgaaatggtatccaatgacatttgtgaagagcttcttttcatattcttataagaaacacagagaggagccaggttgggtgggcaacgttccttaggctttccacttaaagatgactgtgatttaagtgttctaactgggggggtctcttctttactgatatccaggttttcagagagtgaagctgcttctggaagcaaatcttcagctttaaagatggactctatggtttcatttcctttactagttaaagtacttgaaagtatgttttgattaccatcactatcaaatgaaagtatattcgaatcttctctgtagtttaagatactacttgaatctgtataaaatgaatcctttttgtcacttgtttctgatccaatttctcctgagccacttttgtaaacaagtccact

SEQ ID NO: 324259 - DNA, 823 bp, Homo Sapiens
ttttgcagtttaatgtttaatgcccaattatctcaatacaaggaggcttacatggtgctcataaagacacgaccaggcgaaaccaggccggcaggaaatgacccgcatgagtcccagcacggggaccatgttctctcggttccagctcaccctcgaaaagtgccacaggcaaggttcttcagctcacccaggagccagcaggctggccaggcgtgtggccaccatggtcactgaggatcctcgtgggagaatagggttctgggacctcaggatacaatcacaagaaccagaaagctgcttccaaacaaccccagaaggttttcacttcacatgcgctaagccacacaacacctggatgctggggcacccaaaccctttccctaaaactctgaacactgcagaatggaggttgagaacacttggggagggagaacaaagtcagaaccatcctaaagccagtttttcaagcttgaccacctccctcttcctccctgaaggcacaccagccgatcccattactgtggaaaagggacaccctctggtctattctaacacctttaatgggaaaggagttaggagcatgtccctggcttcaagaaatctctgaatctccaactctactggatgatttcctggagccccaagctttagaagtccctggggacacgagtgattttttttagggtggctgctggtggggctgggaagtttcctggcagaaattatttacctcagaaagacactggcttttctcttaccctcgttttaaagtctacctggtccgtaaagaaaataccacgtcaggctgggcctggtggctcgt

SEQ ID NO: 324260 - DNA, 1078 bp, Homo Sapiens
  misc_feature (412)..(436): n is a, c, g, or t
  misc_feature (903)..(903): n is a, c, g, or t
  misc_feature (912)..(912): n is a, c, g, or t
cctctgattgccccgttttctctgcacacagtgatatccgtattccagtgagaggtgctgttggcacccagcagcaccctgggcacacagcatttcatgtcatgtcacagtgtacaagctaccctctaattcagaaagaagagcattttgcacagagaaaaataaaaagatccatgaatgtcatcttttatcttttattttcagttggctgatgttggaatttttgttcttgtcatgaacttgtaaaccaatcttgccaagatacaagttgttttggtttttcactacaatgacctcttgttcctcctgtcttgactgctgacgttcctcaatgattctattgtctattttatgggaagcagccttcccataggtttccttttacacactgcagggctatctttatactttnnnnnnnnnnnnnnnnnnnnnnnnnggacaagaactgtcactaacctcatggaggggtttgcgtaaaaccatttagcccaccttgagcaaagggtagattccgtgttgtttttttaagctcactgtaataaaataaatctaattcagcattattgtgctacctcaaaggtaaaaaatgttttaaggtcttcttttggtcctgagttctatatacagtgtttgaaatgtctttcatttggaattattttttaaattcttggagtgaattttattttaatctgttttaatcttgtattttaatctcagaagaataagtgattgaaacgtgatcaattcttgctctgtggtgttaaacatataatgaacagtcattaagaattaagtcactgtttgccataaacaaggttgatgttctttttgttgttgttaaggaaaccctagggctcggctttactcttgattaataaaggctgacaaagcaaaacccaatancaaataaanttaccgtgttcggccgccctcgggccctcgaagaaccttttctagaacctttccgttttgggcgccccgggcccccacttaggtaaagtggaacctggggcccttaaccttgttttcctaagggaaaaaccctggggcccatggaattaagcgggcttggggaatt

SEQ ID NO: 324261 - DNA, 769 bp, Homo Sapiens
cggatctgtatctaggcgtatagacttgcaggtgtcaagtcacgattacgcagtgcaaagtctgtgtcttctgccgacgtgatgcagccaggttccaccctgcgagatattctttctatattcgcatggtcagaacagttctcaagcagtaagtgcctccttgccacttttatttggctgcgcctctgaatttctgtccatctacttctacctccattacaaagcgcttgtcatggcttccaccagtctctgagatgagttcatacttgagacctcttcttttttcattgagctccattacagggtttttgccacttgctgtgaggatagggccctgagttcttacctctaaggtactggaggtttcagttgtagaatttccagtattattgcttgagtttgaagacactgtttcatttttactttcattatctgatttttcatcggaactcatacattcaatatctgcatcaaagcctgttggatatcccattgcctgcaataccttcaccgctacgtgaagttttgctgttttcttggatggtcctgaggcttcatatgttgtgccatccacatctacagacattgtgaagactggggcatgaacggggccagactgagataggagcttatactgaagcccaggcctgatctgatttagcctcattagtgcattcataagggtctattgctttactatccagaattttccttaagtttcgtttcatcttcttgttggggtctttatcatcccctaatccatcttccc

SEQ ID NO: 324262 - DNA, 622 bp, Homo Sapiens
aagggttctctggaccaccagtggcttctggtctggtgaattattgcggaaggcctgggggtctgcagactttttcctgggtgtgcagagccaggccccgcacggtggcacttgcaatgcccatgggaagcaggccctctggccaacaagagagacctgttggggagagggctatagcttctggcacagggggtcacttttgcagagtcatccactgaccattggagcctttgctcttatgtgccctggggccaggggagaccatccccaagttacaaatagcaagaagttaaatacagcttttctgggcatcttaaaaggagcacccttcttaaaagtaccccagtatcctgctctaggagagagagcaggtaggtgagagagctcaggatgggaaggtatctgacaccaacaaccacaatggtcttatgttattacaaagccagcaaaccggtggggcaggacaggggacacacccttgttagcttttctaagccccttggaaatggattaaacagtgcagagcagttttacttatgctgtatatttgatggagaattctatcctgaagtctttagtagccctgggcctagagtttattcagcttccccaagctacttgc

SEQ ID NO: 324263 - DNA, 1121 bp, Homo Sapiens
agattaaaaaatgcctttatttttaaaatgtggcttaactacatgcaatgtactgagccagttttggaatccaccctgtatcagagtaaaactggaccaaaggaagtgaagtcagggctcctggctgtcactcctccagcaactcaatctacagagcatttcttcagctgttttttgtgacgtgtggtgattcgttttggattcctctgtatgacagacaggtccgaccttgaggaagaccggtagcccacgtcttctgcttttatggggttaatgatatggcctggcttggtgacgaccttgggagtagtcagcttttggaaagccctctgggtgttccatgtggatcctatgggggtctggatggtcctttcaaattgccaatggtgggtaaatggatatggaagcactcgtacctgatgagcagctgcgtggatgttgcgcttctcattgataatcacatttggcaaattcttatcttttcttggaggaccctcaggggctttaatgagaaaccggcgtcttttcttggcaactgggctttaggcccacaccaccccactcgccccagccaggtagtgtcaggtccacgtcctttggcttactcgcctccacagcttccctcttctctttcaagaaatctctgatgacatcatccccagcaaaagcttcctttatcatctgcctatggtttctctcctcttcatcttccagctcctctattgtgggaactgccaaagacttcacggagggagattgtgtggttaggaggttctgtaggtcgatcatttgctccttctttttcttctccttaggggcatcagggcgattatttggggtcctctctgactgctgcccttctaacacaggtctgggaagctccttattttgaaaacattcttcttttcccagctcttctagctcttccagcgtctgtactctctctggtctctgtagcaacaggggctcctcttcttctggggcaggttcctctctctggacctggggaatagtcccctctgaacttgctttttgcttcctggactgatggttttccttcaatttctgagatagtactctcaattcagacagcacctcctggctgccagaatcttttgttt

SEQ ID NO: 324264 - DNA, 1132 bp, Homo Sapiens
tttttttgatcaataaatcaatttatttaaaagaatatgttacaattaattacactaagtgacattaccaaacaattttagagtggttagctctagaacaaggaatgaaagaaacaatgttagccattattgtgtctgtgtattttctcttcacatttcttaaatcacaaataaaaaatacaagatactgcagtgaaaatacaattagagtttctctgaaataaattaaatgtgcatggcctgggaaaaactgaagcccagctcactggcttaaaagggggtcatgatataaaattaatgtccaagtttagcaggcggccaagtgcccccaccccgtatcactcccctctttgattctattccttaccacagccctgaccttcccacataccctagattattgctgaggagtgagctgatgctgtcctggcagcaaagagggcctggcgtgatgtgctcaggtttaggggaacaggaagtcaagaggtggacctggaagatggggagctagagaagcatacccactatctctcttctccctcccctctctctgagtgttctatcacatcatcctcccaaaggaagctactgtgacacaatgaagctggtgaagaaacagcagtatgctggggtcaacagatcaaacagcttctactgctgaatgaatctagccaaacagtatgatggcgagaagggagagcacagcagtccctcctggtctggaaaattcaggtcaactaggatgcagtccccttcaagaaaactacctcctaggagcccagcccagaagttggcaaattctgagataggagagagtttcatctcctgtcagtgccctattttgctgctccaaagtgctgggtttggagctacaggaagggataacccaaagctactggcctgggtaactaaaggatgaaactaaatgggccaggcatgaggatgttggaatatttatctaattcccccgagagctcagtccaggcctaggagctgccctgagcatgcacatatctgtacctgtgtttaggcctagggtaaggacggggtggaaaaatggagaatagaataaacatataaagagcagaggcccaaagcatggccaaggaacctttctgcagggacaggttct

SEQ ID NO: 324265 - DNA, 989 bp, Homo Sapiens
  misc_feature (28)..(28): n is a, c, g, or t
  misc_feature (44)..(44): n is a, c, g, or t
  misc_feature (81)..(81): n is a, c, g, or t
  misc_feature (92)..(92): n is a, c, g, or t
  misc_feature (110)..(110): n is a, c, g, or t
  misc_feature (138)..(138): n is a, c, g, or t
  misc_feature (208)..(208): n is a, c, g, or t
  misc_feature (221)..(221): n is a, c, g, or t
  misc_feature (272)..(272): n is a, c, g, or t
  misc_feature (295)..(295): n is a, c, g, or t
  misc_feature (300)..(300): n is a, c, g, or t
  misc_feature (304)..(304): n is a, c, g, or t
  misc_feature (328)..(328): n is a, c, g, or t
  misc_feature (364)..(364): n is a, c, g, or t
tctataaatgcatgttaaattaatgtancagtaatatacaaaanacattaactatacagcaaattagtccaccattaccanaagggtaacangttcacacataatctccntcccaaaatttccaaccatgatgatttntggaattgtagtaaggcttccctttgtagatttattgaaaatgtttcggtactcctacgaagtttgcccntgccttcctatanaagagtgaaacttcagtttgaatccgacttggtggataatttttccaattnttccctcaggcaatttgagttanctccnaatnaaatccaaatatgggcccagaggnaatcatctctccagatgggcagtgattggccagtcnagcaggagaagctgcttatgccttgtttggtacattgtggaaaaacacactttaataaatacgcagtcatgcctgagtacccatcctccatcccgccaccccccagtatggcaaaaatctggtcagagtccatttgggaataattccatggttcctgggatcccaaagcttccagagtgctggctgatcagggagtgtacagtcagtcctgggtggcaaatgtcccattttttaagtaccagcaagtccttctccagggttgcagggccacagtctccacgaatgaagatggcttttcttagctgccctgtgacaactgggtttcacatttcctgaaactagatctgtggaaggagtccctcttttgactctcaactctgaatattggcttgtacagttctggaattttccgctcgatcattggcctgaggttctcttttagcttgttatagttctttttgagttcctgctgatattccctctggtctgccgtgatgagacgcttgtttttctctacagcttcaccacatctcatgatgaattccttaaagcataacctcaacttgttgtgatgtcgatagagttttggatcagcaggaatttcagccaaaaacacttgggctcc

SEQ ID NO: 324266 - DNA, 441 bp, Homo Sapiens
  misc_feature (283)..(283): n is a, c, g, or t
  misc_feature (292)..(292): n is a, c, g, or t
  misc_feature (311)..(311): n is a, c, g, or t
  misc_feature (332)..(332): n is a, c, g, or t
  misc_feature (368)..(368): n is a, c, g, or t
aaagaggttaatttggttttcctttcaaaatatattttatttctttcttacatgtattttgcaaaatttccaaggtaaacattagctccacatacagaaataaaagagttctttaagaactagcattgaattcatcacaagaatcatcaaattatgataatggaaaacaaacttgcctatgaccaaagctactgagctgaagtgaagagctgtctttacaaagatccctctcattaagcccactgccctgcggctgactcaagccatcatcatgtatgtacgntgtataggnaaaggacactgggccgggncatgggtgggctcgcgcctgntaatcccaggcactttggggagggctgagggcgggncgtatcacgagggtcagggagtttgaggaccagccggggccaacatgggaggaaacccccgtgtcttacttaa

SEQ ID NO: 324267 - DNA, 896 bp, Homo Sapiens
ttttttacaaatgtagaggtttatttcaacaaaatgtgtaaagagtgcatctgaagctcctgctcatcacagtatgtgtccatcaaattctgagacaagtgaaggctgttttgtgaacgaagagaacagataatatggcggtctccgtccaagcaggtcttggtcaatatccatcatttatactcctcctgccttagtagccttgcatgtttgaggggctgtgggaatgtcagattgctcatgttctgtgcctccaacttgaaaaaatccttgtccagggtaagacctacagtaaggagctctggggatgggggaggaggcattacagggttctagagaggaaacatactcgtttgtgtcataatttggtggggagaggggaggtaaatgagtgtaacccaccctgcctctgaagacatgcctggacaggcctcctggggggtgcaggacttcataccacttgtagatatgtgggatttgatttattgcaaaaaagcatagaagaataatctggtcaaaaatgaatccaattcttactaggtaagcaaatagccagcaatggtcaatgcattttcctggactgagaattgtcccccaccactttatgcccttttctgaaggtgctgaacacctgtaccttccaccagggcagccgggctgaggctctgactcctggggctgtccgctccatacccagccatacagtgcccacctgcaacccagaaccattgaaaagtccagccaatctatccgcacagattcctcctgaagaaggggaggtggagctcgttcttgtgtgcaaactacagggttaaggctcagaactgtggcttgtccaagaacgttcataccactgcttctcaaatgtcttagtgatttcctccttggtcatcacc

SEQ ID NO: 324268 - DNA, 862 bp, Homo Sapiens
  misc_feature (42)..(42): n is a, c, g, or t
  misc_feature (81)..(81): n is a, c, g, or t
attctgcacaatcagttttaatcactggaatgaataactgcncaaaaaagcagtacggcttcaattgcattgggatttggntagtcaatattcctgttttcccaagtaaaaggggagatttcatggaacggggaacactgggctcctttaatggtttcaccgatcaaggagaacggtttctggagcagcttctggagcaaacatttcttaatagattgatcacagatctggggtcttcactcctcataatagcactgccagacacaatcatgttagctcctgcctctgcacatttatggacagtgtcaggacctactccaccatcgacctctatatccaaagatgggaactgggtcctcaaccagtgaacctttggcatcatatcttccatgaatttctgccctccaaaccccggttccactgtcataaccaaggccatatctatctgattagcccatggtgccaaatactcaactgaggttcctggtttgatgcaaggccaaccttcatcccattctcccgaatgtctttaatcaaagcccctgggttctcagtagcctcgagatgaaaggtgtactgattggctcctgctacagccattggctttacccactgttctggcttggacaccatcatgtgcatgtcaaagaaagggtcctggcctagctgctttcgaaggctttctaccacagggtgaccaaaggtgatgttgggaacaaaatgcccgtccattacgtccaggtgcagataatcggccccagagtctagcatccggaggcactcggcccctaaattggccaggtcgctgttgaggatggacgggccaatcttgcagcccgacgccataccgctggctcccccc

SEQ ID NO: 324269 - DNA, 818 bp, Homo Sapiens
  misc_feature (50)..(50): n is a, c, g, or t
  misc_feature (588)..(588): n is a, c, g, or t
gaaaaccctcactttctcttcaccggctgtaccacaaaatccctaagcanatcttgcccgtggactagaatacctgcaagtgctgccaatgggactcaatttattcctgggacctaacgaggagagcccaggcctaggcaggaggcctggaaccctcttggctaaggtgctgttcctgttcctgcaaggtctccaagaacccctttggaaatggtgaaggaaccagcccaatagaagtacaagagccagctgacaagtccttgtaaagctcactcctcaagtccttggcacaggcattgttttgtcttctctcttggtatttcttctcttccaactttagccatttttgctttggaatcatgattacaatttttttcctttgcagatgccttcctggggggatacttcttcccaccctaaagggtcgcttgcaacttaggcggtttgggtctctctgctgtggcgttctctcttgagagaccctctgaattttagcacaaagtgccttctgtttcacagctgccaccacctttagaggaatttcgtcagaaaaatgtggaggctccatattaatgcattattttttanaaagttttgataactcttaaagcatcatttgcacctatgtgggaactttgcctgttgcaaagtattgtggccgagctgcagctgggagcctgctttctgccagtcttgaggttctgaagatcagctttgaaaagaaaagatgtcctagcttagcccttcagaagagaaaatggaatatcagagttacaggtgtcagtgaaactatttttggattttaaccctcttaaagg

SEQ ID NO: 324270 - DNA, 1197 bp, Homo Sapiens
  misc_feature (742)..(742): n is a, c, g, or t
atcatgagtactctttgtttattactagcattgcaagttctcccctgaggcgcagagccctgaagacatcagcgtggaatgaaaagagtcaaggatggagcccccacaggacttagcaagaatgccaagtaagggctgtataggagggtggccagcacaggccctgaggcctgggcaggaaggggaagggcttggaggctttgcagaccctcagattcttgggcctcgagcagtacccgcagacacaagtcctagtgctggaatattgtgcacacatctgctgcagaatgccttgggagccaaaggatttgatgaagctcaaatcagagtagatagaaagcaattatgtttttgcatcctcagctcctgccaccctgcacctccctggggatgcacttgtggcatttgggtgtttttctcacaaaggcagtctggagggagaaatggacaaataaataggcaactgcaaaggcgtttgtgatccattctataatatgatgctatgagaacacagaggagatgagccaggatggaggtcaaaatggcttgttcttcattgtggttgaccggtctctgcgcctctattttcagactccatttttcggttccttaatttaaaatcctcccaatggctcttcattgactggcttccagggagaggtgcttccaaattggccctgtaggcaaattcacttttttcaccctctaagcgagtaagtgcttgttcccaatttccatggtntagtcttcagtttcagtctttggtctcctctggtctatcagctctcatctctctcccagtctttttctttattctgtgacaccattaagagccgaccacgggccagtcctcttactagattctgctgtcagtttacgaattcttcaccagttatgcaaggtggctatcttttccccatttcacagacgaaataaattcagaagggtttaacgacgtagttaatgctaggagcagaaaacacgggtctgtccgagccactgttaagatcctcctttaaaatcccgccacatggttctgagagtcaatctctcttatttctgtcggcgtcaaacaggaatatcactaccttgcccacctcacagggtgagattccaactagaaagtgtttatgcaagtccgccgtgggtcgcgaaacggcggctgccgtcggaactgcgatgccaaacacagtaccc

SEQ ID NO: 324271 - DNA, 830 bp, Homo Sapiens
  misc_feature (364)..(364): n is a, c, g, or t
  misc_feature (672)..(672): n is a, c, g, or t
gcccgccggcggcccgcgaggtccccgccccacgctctttcgccacattttgcgcttgcgctcacgcaggcgccccccgcgcggctccggagtctcccccagaacctcgctccttcttgcccgagagggggagagttgcctctgtgttggggtaagggcagaagggccacttgggaggtggcctagtggctgggaagtcgacgtgtgttgcaagatcccagagggctacttgggccttcgggaagaggagtgtaagttccatcattacctataaaccgccaaggttctgctgcagggcggataggtgggagtccagcaggggtaaagacggtcccccccaatgacacaatggtatttaaacganaatttgtggccagtaaattggcccaaaggttaggggaagatctcctttaatgcaaggaaagaagcaataatcagtcaaataaatagaagggccaggagcactggggagcctgagggcagggacagggctctccctcctccacaagctttggcagagaactgctgggttggaggcagagatgctctaaggctacatacacaatacacctcccctggggacaggaagggggctcagaatgaatgcagtgatttgaggtcgtcgcctggggttctaaaccccaggtctcatcacccgcccctggtctcttntgtggagggggttgtgggggttcctctttcttcagtgatcttatataagaacaataattctaggctcaaaagggtcgtagaaccaattatgaaaccttctggtctcaaaacaggcatctacttacttgaatcagctctttttacagtgctccaggacc

SEQ ID NO: 324272 - DNA, 1418 bp, Homo Sapiens
  misc_feature (696)..(708): n is a, c, g, or t
tgtttttatttttgtaaaaatggtttattccatggccattgtaaaaaataatgacctgatgagtaaatattggcttaaggcatatagcagagcagctcgctacctctctaacataatgtgtaacaaggtggagagccagctgctctccaaggataggaggttaaaccagtacgtccattttgaaatgctactatatatacacacccaaactactacatacatatacaggacttaaaaacaacaagcccagctcagaatgcttacagcctggcacctaagccttatccacacctcaccatagctctgcagggtgacacctcgaatgttcccaccacagaatttctctgtactggcttctaccacgagaaaggcaaaatgtgaaaatgctggcaagagagtagctcgggagctacagctgccgtgtttttcatgttaaaaagccacttaatgtggaggtcttcagttccctttgcaggaagagtcgtgagcaccatcaggccccacagggtttgagggtggggcagacgcgcctctctcggcaaggtgaaccgggacagagacggcggcaggctgcctaaaggaccgtcacccaggctgtttcaagaagtgtggtttccagcaggtgcctctcttccaaatcacggtctgctcaagaagagtgttgacttggaattgcggaggctgatcccaaaggtnnnnnnnnnnnnntgtccctgcttccctaaatcatgtccagagcgtgaggtgtgaatatggcttcccatacccttggaatgtctgagttacagcaagaccctgctgtacccaggacaggctgggcctcaccaggaagtcactagagtgtcatgccaggaattaggcaaatgcctattcctggaaaactgcaccctattgctgagcgacaatgacttcagcaacaggcttaggaaccacagccatgtaatgatcaggtcatgcacaggcaggttggacttggacatggggcacattagtaagcagagatcaaagtttctcatttcaagcacatatttttcatcaggacacaagaagaccttacatgcattctaatacacacgggggagcagtgattgagaactagatctagcagataacagggaggagaataagcgggacaaagtaatctcacatcatgtttcttattaaatacccacgtgttcattatatattatagcattgttctatcttctcacgttaccccacaatatcactaaataacaactgcttacaaccgtcctccttcccagtactggtctgacgcagcaggcccatgcaaagccttccattcccagtactacctgaggatttattattgtactttttgataaagcccttgatgcaaggctgacatcaaaaaattttaatacattattggttcaagaaaatgctagtgcactatg

SEQ ID NO: 324273 - DNA, 823 bp, Homo Sapiens
  misc_feature (383)..(383): n is a, c, g, or t
acacatggcctattgcacaagtcttgacaaacaacatatattttctaaaactatccagatttcattatcagggaaaagtttgcttaggtttattacagcagtcctttgcatttgtatggtaatttgtactttacaaatactttgatatattataactctattggtctttgaaacaaagcgatacagtgtaggtggtatcattctctttctcactcagtgtggcccagagttgctcagaattggagcagagcctgagacgtatctgcagatcctgtcatcagctggcaagtccaggagactggtgtcatttagagactgtgttgttaagttatccctcaacatcttctaaggtggcaggaaataatattggaaataacattttnaacgtaaaaaatttttaaagtttaaagaagagttttgccacttaaacaggggagctttgtctggaaaatacactgagttgaaacacttcatccttggaaggattatataagatgaacagttgtgataaaatgtgtagattagaagggatgtgaatgggcagttagtccagtgccctcatttaagaggccaagatcctgattcagaggaggcatcctttacccagagctgcttagctaatctgaccaaatgttgggaaaaatgtctcacctaacccactattccttaattatggattttgtgaaaaacaatagaacatgttaatgagtaatttatattagttcgatgtattacaattttttagctttaaattacagttttcttataatgttgaaatgttttagaatcctttgaactagattgtccaaactgcctggtaaaa

SEQ ID NO: 324274 - DNA, 1040 bp, Homo Sapiens
  misc_feature (133)..(143): n is a, c, g, or t
gtgccttaggactataaacaccttgtttaaaaagcggctggtacggtcggaattccgggatatcgtcgacccacgcgtcgggcagctactttatgaataagaccacttgggttatttaagcagaagcgtttcnnnnnnnnnnngggaatggggtgggatgaggagtgagttgccagacctttgattagtttgctggtttagaaacagccagtggctgaattagtgagtaaatgaatgaaagtataaaggacttgttttttatgatagattttctgtaagaatcttaaatgttccttttcaaattagatgtgttgatgcacacatgactattctgtttttctcactgactatataacattaaaaaggggttaaagaaaaacaaaactctggccttttgtgctatgaaatatttttagtccagaggtttttaagctgtgtgtccattccctactctgaaaatgcatagcttggttctggatgtcatctcttgaaagtagaaaactcctatgtgtttatcacatgcagggcttcttatgtatttctggcagacttgcccaaatctttagatgggctgggttatacagatgccctcccccaaataagggatctgaaataacttactacactatggatagtggcgatatattaattttaaaactgtaaagtaaatgtggtctctaggttgtggtgtgtcctttgtgtaatgctgtagggaagagacagggactggaatgggttaatgggggaaggcaatcctgaaggtgcgtataagggggaaagaatggctaaataatttacaagccttaattccgggcgaggtcagtgaagaaagggctaatacggaacagtgaaggacacaattggaagttgccaatgactgaatcgcaacggatttggagtccatactacacagggggggcaaacagtggcaggcgctcggtgggaggggcaacaaacacgcgaggcagacagggggacaacaccctcccaccctccaggaccacggggcacacatcgcgccaccgtggaacaccttcccc

SEQ ID NO: 324275 - DNA, 408 bp, Homo Sapiens
  misc_feature (54)..(54): n is a, c, g, or t
gggagagttggaaaaccgaaagcagagacagcagtggtatgcccaacaacatgngaaaaaatttttgagctgattttttaaaaatttaagttttgtaagagctttaaaatattttcacagataaaaaattgcaaacaagtactctggttaataaatgctgcttcctttgtggaaattataaaattctaactttacatgtattttgttattagaaattttcttttattgaatgagaaaaattagtctatcattttaagagccaatatggcaaacactttcaaatactgtatattaggaaactgttttggtattcttgatggaaaaaaatgcagcggaaatgtcattatgaacagatgttaaataggaaattattacttgttaacttcttacagcagtagtaccttcttt

SEQ ID NO: 324276 - DNA, 823 bp, Homo Sapiens
ctacagacttggggaattatggagacagttttgcgtacaaaggtttggctgcatctgtcatgccggtgtcactgctggtggtctctttactgccatcagttgtcggccagactgcaacaaccacgatagccccaagcagcagtaaaatcacccatgatcatcccacaagagggctgcttttctgtccaccatgtttaccccgcctggtttcattgcgaagtttttcatctgtgttctccactaggttggcaaggtcgtcaattatctcattttgttcatccaattcattcccaatttcctgccccatttgtttttggcgacttatgatagaggaaagggcatcaaggcctgcatcctgttcttggataattttctgctgctgttgccggatttcatcaaaacccaagcctctggtctcctctggctcctcaaagagccaagggttgggtgctcctcgcttagcctcttcactcatcaggctggacctgattagatctggttcggcaccctcattcttaaaggatgccagaagtagtctctctcgagttacaagatcatccaagaggttctgtcttcggtccccttcaagctgtgttatctgatgtgttgacacagctcttagcaataagtccttcaaaagggcgatcttttccttcaggttctgcaacaaagctctgattgtcacggtaagctttggtgccttttcaccttttcgttcatattgatttcgttgttgaattttctcagcaatttcttgggcaatttgacaagtagaatcgtatgtggagaaccaggggtccggtgccatcctgcagactccccc

SEQ ID NO: 324277 - DNA, 1177 bp, Homo Sapiens
  misc_feature (471)..(471): n is a, c, g, or t
  misc_feature (877)..(887): n is a, c, g, or t
  misc_feature (981)..(996): n is a, c, g, or t
  misc_feature (1006)..(1006): n is a, c, g, or t
acaggatgatacttggaatcaagtgaaatgagttatatgggtcatcactaaatttagaaatctattgtgaaacaaagacaaacaggaaagtacagaatagagacttttagtaaataaatggaatttaaaggaaagtgtttatttacagtgtcacgacagaaaaggatgtctttgttgtcatagtctttgagggatctccgtaaaatctggggcacaggtacaagaaatagccaatatttagttcccagaccatgtttagtagtgtccagtttcagatcatgctgccaagaggtatctccccctcaggtgggtcatcactgagccctggaattggagactcatacttgcccagcacaatgttactggcagacaggccgacatctatgattagctagaagccataaagaaaagctgctaagtggccactaggtgccacttttctgtttttgtaatgctttcattagcagatcnttttttttccaagctccatggggcctatgagaggcatttatgatttttgtgcctacaataagtcagcctgtctggtgtgagttgttttatgagaaatgctttccaagggaggtctaggaagatcctgacacataagaactttggcttagagagctttccaggtgtagtgccaataaaaactgacctggaaagaaaacctgcccagcacggaacatgctttctgaactcacttgagagtgtatggtgtatgtcacttctcatatattcttgagtttagatttgtcttttatacaatttttagctcttttccagttcacttgtgctcgtctgtatattggtatttttaaatttttgtggtaaataatgaaaagagtgaaattatattttataattactcatttgtagnnnnnnnnnnnaatttaataaacttcctccaaaaaaggagagggcgagagggaaaagacccggccccgcgcccgacagaggagaggcgcgagcaggccgcgaagnnnnnnnnnnnnnnnngggcgttggncccgcgcgcccgaagagagaagcctttggggggccccccctcgggcccccaaaaaactttttcaacactttcctttggggccggggccccccggggaaagggaaacatggggccaaatttggtcccaaaagaaaccccggggccgaaaatagggggtgggatcccccccat

SEQ ID NO: 324278 - DNA, 1639 bp, Homo Sapiens
  misc_feature (95)..(95): n is a, c, g, or t
  misc_feature (354)..(354): n is a, c, g, or t
  misc_feature (640)..(648): n is a, c, g, or t
gggtggttcaaaatgcccattgattttctgagaggagaatattgtgagtgtgccaaaaaataaatgagcttttttaaattaagggattcaaccanctataaaaaataacacccgtaagcaatcctgacctttgcccttcagtctttataagacatcctcaaatgaatcaagaatatgattttaaagagccctttggaggttggtaacaattctatgcatttgtggcatttacaaaatcaatttaggggttaaagtaaaaatgcctaagctgagtatttcataaatacagtaagtaacttttctttaatatgtaagaaccggttaagccaggaacttctcctattttatctcatntaaaacagatcatttttcataaggaaaaataatctctacctaaaaaatcctttgcaatctctgagaaaagttgcaatacagaataattttgattgacaaaattcctttctccctcttgcagtcctgtcagtctgaaaaaccccaacattgtcccatgagagaatgtcacacacacaagggatagggtgcaggccattgtttgcaggaagtggggactgagctctgctgtcagcttgcacctctgtgatacagattctggctataatgtgtaacttgcattgatttnnnnnnnnngccaagctgcttatcacagaattctggattaacttcgattttgtgactgtgaattccataaggcttagttggtttatggggtttaatttttaatactgttaacatcatcgagccagctaaacaccaagaatatcaataaatactaatagtttgttttcacttcctccttctgttggagcactttgactttatatacattccagtcttagtgccaaggccccattgggttttcaaattccataccagagcacatcacctgggatgtgactctcatatgctcaaggatattcctgggagttgaaaggaaaatacaaaatgagcataagaacagattacagacgcgtcagtatgaaagttgatactcgtgaaaaacagcagtttgctgagaccctggaagttagctggagcagtcaggcaagaaatgactcgtgaccatggctgcaaaatggggcttgttctcacaaagggctttccaccattcttttcttggcttgcaggtagaagatgcggttttcttcaggataagtaactttactgaggggcatcttgtagatgttggaattttttgtggtcatgatgaggaacaatagcgtggccaaacagaagggccaggtacaagctggcaatccaacctcagccataaagtttgccatgccgactccaagataggccgtgaacaggcacagccaagagccaggaggtgggtttgccaggtgagcgccatgaacattcctcccattgcaatgcaggccagagagctgttgaaaccccagagtccaaagtagatgtcctcaaatggggctgaaagactgagtcccgctgctatgcccagcaatgatcctatggcagcatgcaggcacatgagtggggaggagagtaggatggctcccaggaaaatgccccctgtccatggattatcacagccatagatctgaccaactcccactggtatagatttcaacaactccagggcactgaggtcagaccagga

SEQ ID NO: 324279 - DNA, 820 bp, Homo Sapiens
  misc_feature (222)..(255): n is a, c, g, or t
gttcttttcagttgaaatgatttggcagcaatgtaaatctttgcatttttttaggaagaaaagatgcaatgtgcttttcattttatctttgaagagaaaggttactgtcttttattctctcaatctagccatcagcaaatatatagtaattttaaacttcacatggaaaggattatctttaaacacatgaattccatgctcttgcagctctctctctgtggnnnnnnnnnnnnnnnnnnnnnnnnnnnnnnnnnnctatacatattatttggttggtcagcacaggagaaaatgcctttggactttatttgtcatttggcttcggagtgaagaaatgcattctgttcgagtaaacattgattgcgtcactcagtgtgctacacagcagccagattcctcatgtttgtgcaggagagacattctggagaaggttttggagcagtttttgcactggtatttctttacatcagaatgggtctgcagatgagccctcagatttgacctgtctgcaaatgctctgttgcagtgagggcaagaaaaaggcttctcccccgtgtgagttctaatgtgtccttgaagcaaccagggtctggaaaacgccttgccgcagatcttgcaaacacaaggtaatgtgtgggtccgaatatgcatcttcagggcgcccaggctcacatattccttgtcacagtatttacagctgaaagattttctagactgggcaatcgcagtgcagctgcttatgtttggccagcccagaaaaagttgaataggtcttattgcataaattgcactgaaacttttcagcttcaatggcatgggg

SEQ ID NO: 324280 - DNA, 1221 bp, Homo Sapiens
  misc_feature (29)..(29): n is a, c, g, or t
  misc_feature (33)..(33): n is a, c, g, or t
  misc_feature (372)..(372): n is a, c, g, or t
  misc_feature (396)..(396): n is a, c, g, or t
  misc_feature (585)..(599): n is a, c, g, or t
  misc_feature (834)..(835): n is a, c, g, or t
  misc_feature (837)..(838): n is a, c, g, or t
  misc_feature (1203)..(1203): n is a, c, g, or t
tgtgttttgtttgtttaccaagtacaaantctntgtgcacaagaactggcggccgatggtaggagaggataatttttgctggggggagccccagtgattcttatatatgtgacatctttcgtgtggtcacacatccgtaattgttgggtctgtgcggaggaggaatgctgggagggaggcggggcgcggccggggtttgttggtgtgccttgcattcgtgctgcttgtggattattttcgtatgtggagtgggcggctcttcatagtttggttgaagagatctacctcctgccgaggagagaggcgctcgtcggtggagtgcggtcatgggggaggcattgattatgggaaggtgttgttgaggaggacaangccaaaccccgtctcgcgtttgcnccacagacccgccacgggagaccagggtgcatgattctaaagctgtcgtggtcggggggggagtattctctccccgggtgtattggtgattattgtgttaacacattgaatgtttctcctcgttatttatggaaacaaatatataattaagccccgtttttctcctccattgggcggtggggggcggannnnnnnnnnnnnnnactccacgaggtgtgtggtgtgaacagctatcttcgcgcggcgcgcccagagggggccccgttcagaagaaagtgtgtaaaggcggggatatagggacagctttctcctgtggggtgggtgtagcaacacgcctctctttcacgggaggggggcgcggctggcgtttgatttggtattatagcaacacatagtagaatagtctgtgggtgtgggtagcgtcgttggcttcgctgnntnntgtttttttgacttgaaaacagtttatttaatttatacaaataactactaaatacaaaaagtagattaaaacaaaatagttatttttttctggcagagtttaaatgcacgtaatggataattctgaagaaaatgcattttccccgtagcgttcaggactaaaattctactgaaatctttgcttctaaatcagtaatatattcggtggtgtcacgtgggtaatggctaaatacgttctgcatatgaactgaaaaaaagttacagtctacacacatacaaatgtgaagcacttaaaatgtgattttaactgataataaaagaaaatgtccattttagagtatagtgttaaaaagatttctgtaatanaatcataagaccacataa

SEQ ID NO: 324281 - DNA, 804 bp, Homo Sapiens
  misc_feature (226)..(226): n is a, c, g, or t
ttttggggtaaccacaatcttgttttttgccaaaatttgtaaaaaatctgctaccgtgcgaaaatggcatctggcaatggcatttgtgcaagtccctgtggttttatgttaaatgtctctacaaaatgatgagaagaatttttagaattggatttaatatatttcattgcaacaaatcttgcaaaatgatacatcagatgaataaacttaggaccaccaggagaanagaaatagtgaaccaacaacttgaggaaagctgcttccacattcaccagaaatcctttttatccattcacagcaatgttttcggaattcagtgtcacttttttggtcaaatgggggccaacaaaatttgaaaacttctttggtgagagactggtccagaacttgaaacaaaaaataagaaattatatgaaaggcatcacggttcagcttgtcaaacatgttcactccgaggtgcgtgtgcgacacgatctttccgcaggcaatggttgccgggcctggctcgaagccgagcgcctgcagatacatccagagatgctccttctcgaaatcggtgaccgaggccgagctcatcctcgcggtaggcacggtggctgcaaagaaagaaagcgcaagcccaggggactcggagggccctcaagatcccatccctacggtcagcctgaggtcgcggtggtccttccattgccaacgcctgctcctttcacgcccagagcgatttcgcctcaaagggcctcacaacctccgggaaattgagtttctaacggtatagtgcggccaccactgcctcagcgaagcccc

SEQ ID NO: 324282 - DNA, 1341 bp, Homo Sapiens
  misc_feature (25)..(25): n is a, c, g, or t
  misc_feature (272)..(281): n is a, c, g, or t
  misc_feature (305)..(305): n is a, c, g, or t
ggtgccgcccattatatagtccccnccgggtttgttactaagaagtagatgattcccttaaactttgttccgcacaaaaaactcgggcccttcatggttggaaagttatctcccctccgcgaagtgagcggtgggggagacgagcaggttgaggtagatgcaggtgaaaggggcgcgggggtcaaaaaaattaggaagataggtgtgcgccgggcgacttccgggccactggcgcagactgctcgcccggcttttccggaattaatggactnnnnnnnnnngtcaatcactgcgcgccccttgancagcgaagacctttgctcgccgtctttctgagggtaatctttttgtttttggccatgaaaaacccccgcatttcgcggggtgtcgtgcgtcgccgcgcggcggagggcccaaatgtgtgttattgaatcgctgtgtcccgaggggggtaattacgccccaacaaggccccctcattagtgtgctgcgtcgggggacgccccgagggggatgtctttcccgtgtgaggggagatataagagggttttgatggggccacaatgtgtgtcgccgctctggcctctagactggggggcccggcaccgcccccaatagcgaaatggtgttctagggagaagctttcccccgaaggacccgagggcagccccgacgaggtgtgtatagggtttggtgcgcttttcgccctgttcccagacagcccaaggggatctatttaatttgttaggaggggggtaccatgctgcccattcccagctgccctgcggtgaccccagtgggcacttcaccccgctcacttgtcagaggcttgagagggtctgtgaggctgggtcatgaggcgggtgggaggggacaaggagcatgcatcctggtgtttgtcatggctgtggtcttgctgaagaggcgggggtcagtgacaacggagaacaggcacctcgaagtgctggagccagggcacgacccagacttcagagtagcagctcagagtctgcttcaaggtgtggttggtttggaagtcacagtcatccagacgcaggtgctggtttttcttgcaggtagttctgccaatttccacctcgagcatatatttcaggcctttcactatctgaactagggcccttgtgatgcgggactccttgaacaagaacatgtcgttcgtgcagttgttgaacttttcaacactgtatctggctgcttggaggactcctgggtcattggtctttattgttttaggaaatcctggcttcacacgtgagttaaggtcctgggaacaagtatctggggaagggcccccagtggtgctcaagaccaggcagcacc

SEQ ID NO: 324283 - DNA, 1065 bp, Homo Sapiens
  misc_feature (63)..(63): n is a, c, g, or t
  misc_feature (133)..(133): n is a, c, g, or t
atgttcagcgggccctcatcaaaacagctgcagcatgatggtgagcacatctggatgggcctngtctacttcatcaaagagcaccacagcattggggcactgcttcaacttcttggtcagctggccaccctcntcatggccaacgtagcctggtggagacccaataaacttggccacctcgtgtcgctcctggaactcggacatgtccagcctgatgaagccctttttagcatctttgtgcatatatttggctgtctgctttggccagctctgtttttccctattccagatgatcccaagaagaggaagaccagagggtgttcttcatcgtaccagccattctccttcctccggatcgcagcacccactgtggcgatggcgctctcctggccaatgatgtgctcctttagtcgctgctccagggggaagcggcgccgctcctcagcctcacgcttccgctgcttctcttggtacttggcttcagaagtcctcagaagcttcatcacttccccttctcgggcataatccaagggtgtgtgtcccatttcattcctctgcagggggttggctcctccatcaagcagctccttgacagtgcggtagtcatcagcaagaacagcatagtgcaaggccgtgcagcccttgaaactggcgcggttgttcagcctgttgttgaagtcatcctctcgggtgatcaggacttccaaagaatggattccctgttccttggcagtcttgtaaacactgctgaaatcatctccaaggtttggatcagccccagcagcaagcaggacctgtaccacactgttgtttcggttgatggctgccaccatgagtgctgtccagccaagtctgtgctttgcattgacatctgcaccttctgacaacagcctgctgacttcttgcatattgttggcacgggcagcttccaacagggctgcatccttgttggacggactcttgctgtagcaatgaaccaccagcgctgcggccagggcgcacatgcccagtccggcctgctggggaccccgttccagctgtcctgtcctgggagtgtttcttcgg

SEQ ID NO: 324284 - DNA, 1265 bp, Homo Sapiens
gaaatgactaccagggtcctggaggcctgctggattacattgatagattatttcagatttcctgagtggggagtgcatgtgcgaagtgccagagggtggactggtccccaaatctctgtactggactgtagaggagctggagaatgaagacctgaagctctggactgatatcatctaccagtctgcaagcgtcttcaaaggagccccacatgagattctcattcagattgtggatgcctcttcagtcatcacttgtgattttgacgtgtgcaaaggggacattgtgtttaacatctatcactccaagaggtcgccacaaccacccaaaaaggactccctgggagcccacagcatcacctctccgggtgggaacaatgtgcagctcatagacaaagtctggcagctgggccgcgactacagcatggtggagtcgcctctgatctgcaaagaaggagaaagcgtgcagggttcccatgtgaccaggtggccgggcttctacatcctgcagtggaaattccacagcatgcctgcgtgcgccgccagcagccttccccgggtggacgacgtgcttgcgtccctgcaggtctcttcgcacaagtgtaaagtgatgtactacacccgaggtgatcggctcggtgggatttcagaggttccatgacgagcctggagtccagtcacagcggcttctcccagctgagtgctggcaccacctccttcagccagtcccactccagcttcatgatctccaggtagtgccgcgctgcctgcacctagtgtgcaaaggggacggccgcccctcctcggacagccagctgcacccgcccacccagcggcgacattgtacagactcctctcacctctagatagcaaatagctctcaaatggtaaacgtagtccgtttgatcccaaaactaccttggcaggaagttttaactctgatcctaacttaactcaataaccatagattttgtatacgtggggcacaaaatccaaccagagcgcaagggcttctcttgaaaagaaaagtagtttcctgtacccaattaaaaggattgacgtgggtccttttcaaaggacccagaacagaccggggggagagacccttgtcggccccccttcgggtccttcgaagaacctttttcaaaacaatttgctttgggccggccgggcccccggcaagggaaaagtgaaacatgggccataagccggcttcccaaggaaaatcccgggggccatgaactaacggccctgggaattcccccccc

SEQ ID NO: 324285 - DNA, 773 bp, Homo Sapiens
  misc_feature (216)..(216): n is a, c, g, or t
gggcccacttaaggaacccttgggctttagagggaaaataggtggggggcttttttaaggtttccaggtttctttggtgtggcacaagggaaaatttctgaccattacattccttttgaaaaggagatggtttaaaaaacccctcccctatcttcctgtaatttctgtctttgccagacaggaaaataagaaggccagaagatggtctgcaaaggnataaaaacaggtgcatctaagaatgagaaaaatggttcatgaaagaaatgtgtaactctccaagagatgcagacactctgctcagagaagtcaagaaccataaacaactcttcatgtttcatggacaaaggggaaggcaaaggcatacaaaaatactcagttgtcttgaaaagtgtactggtagtgatcagggctacaaaggcgagccctgtactgacaatggaggagccttacaactcagcaccttaaattgttggcctgaagtggtggcggggagggaggcgctgacggagagacccatggctcaccacttattgcgtgtacacaaggcctgggcaagcctcacaagtctaccatttcttccactcaactgtgcttctcctgaatccatgtgcctgaaatgacatatgcaaggtgaacattctttatactgtgttaatactgcttatatcaatgttcgtgaggggtgtgtgggggatggggtgcagcaggaaaattagaatggcaggaggttcttatttattattaagcactgttgaccaaacctctatcttaga

SEQ ID NO: 324286 - DNA, 1574 bp, Homo Sapiens
  misc_feature (46)..(46): n is a, c, g, or t
  misc_feature (437)..(437): n is a, c, g, or t
  misc_feature (621)..(621): n is a, c, g, or t
  misc_feature (1225)..(1390): n is a, c, g, or t
  misc_feature (1428)..(1463): n is a, c, g, or t
  misc_feature (1467)..(1518): n is a, c, g, or t
cgagaaatgggtgtgaaaggggcgggggggaaatagcacgtaagtnttacacgaaataggcggccgggtgcgtgccccaccttttgtgggggaaagaaaaataagagtgtggcgttgtggccgggggtttgtaataaagatagagcgcaatttgtgtttggtagaaatgaatccccccggagcggcggctttcccgaggtttttttgttgcttcaaaacgaggtgtatgaattgggttcagatgagaaaggggaatgctctgtgtaattcgggggggtatttttgcggcgggggtgtacaaaataaagggaaaggaaaatgcggcgaaggtggttgaattagagaggggtcttcacttgttgggcccacaagaattctaaaataatatggtgggggaacaaataatgtggcgtggtgttttatatagacccccctgntgtgtaatctgtttggaaggatgtactcctcttactgtttgtacggaagaggcgtaatgggatttttcgtgtgggaaaaggagggggattttgtgtgaaaaccccattctctgtgtggggaagtgtgaggggggggagtggaatgccaagtgttgaagccatacaaagagggtataggtggtcnggtgtaaagaagagcaacctgttttcccaatatagaccagaagagggtttaaacggccatttgtccgagccgaccgaaaattgggagggggcgcgggggctttcctaaaggcggcacaatttaccacgtttgcagggggcggaaacaagcccttggggggaaggttgcctattagttcgtaggttgaagccgttgagatgagtgtgtttcaaggaagaatagcgtttgtttgggtgtggcgggtgtaataggtgtgcagtttcggaggatgagaaaggtttacgggagttggaagctttaaagtgcggtaattcatatagggggtggggaatgtggtcatggaaaacaaagagggctattgttgcgattttagaagtgttaaatgtgaatgaatttctagggatgtaccacagtatctgttttttacaatggtaatctttgtcaaatgggatttgccagtggttgattaactcaagtgattaaaatgcaaaagacataagatcgattccagtaatgcatcaatgatacagcctaattaaaatcagcccaattgaaatatttcgtggaatatatctatagggaatttttagtgtttccctttggnnnnnnnnnnnnnnnnnnnnnnnnnnnnnnnnnnnnnnnnnnnnnnnnnnnnnnnnnnnnnnnnnnnnnnnnnnnnnnnnnnnnnnnnnnnnnnnnnnnnnnnnnnnnnnnnnnnnnnnnnnnnnnnnnnnnnnnnnnnnnnnnnnnnnnnnnnnnnnnnnnnnnnggccgaattcccgggcatatgtccggtaccgtcgactnnnnnnnnnnnnnnnnnnnnnnnnnnnnnnnnnnnncggnnnnnnnnnnnnnnnnnnnnnnnnnnnnnnnnnnnnnnnnnnnnnnnnnnnntagcgccctaagtgattggtgtgtgtgggcgggtggtgggaagcggggaggagggg

SEQ ID NO: 324287 - DNA, 1199 bp, Homo Sapiens
ggtatggtaaaaaatgtccagaaagtgggctgaaagtaaaaaagccagccagcctttgtggctggaaagaacaccccatttccctctgaactcccagaagctcccacccatctggtcctcaagatttttcccctctgaggaaacagctgtagagaggtagccccagttccaactttgctggagacagtgaactttgcaaccatactaacacctactgacttgcagagaacgctgagaaagacagtgtgctttgcaatggttaagtccacagctcctgagattgcctcgcaagtcatcttgggcatgaagcagagcggtgcatcagaaaaacatgacgattctgctgagaggtggctttaggaacaaaatagatggctctcctcccttaaagtcttttctccccaccctcaacatttcacgagaacatcagttcataaatactaccatctgtttctatcaccaccctccctggagaaagaaagttaaggttttacaaccacatgtgctcaagagtaaatatcatcaggaaagctctgtactaacaggcaggttattaagactcccaagaaatcctcataagcttttcaatctgaggaaaatcctgagaaggtaattagtaagcaccacctagcgatgtggtgctggttttgttagttgtcagtttttccccttctttgttttctcacccctcttaacttccactgagaaattaaagtggaaataagttcaaagaatcctaagcctgatagagcctaggtgtctcttcattttatatttcatatggatgaagctattctagttgataatttggtataattaaaataactgaaaaggtaggtataaggaaaatttctcagcctttaaaaatccattacattttgataaataaaacttgcatactcattctgtagtttgtataataaaaaatgtattgcattttccaattttttttaacatatagcctggttaagaatcatgcatatccttgtctctccgaaggataaactgagctggcccttgggcaactacttaagaatttagtgttggaatgatagcagcaaatgtcagcttttcaaagatcccaccctaatccagttctaaggttaggtcaggaaggaaaaaataattccatctttcaaatacacatgaaacaaagtcttttccaaccaacggttgagtcataaacacagtctgtgccc

SEQ ID NO: 324288 - DNA, 456 bp, Homo Sapiens
  misc_feature (193)..(193): n is a, c, g, or t
  misc_feature (266)..(266): n is a, c, g, or t
ttaatgaacattttaatgttatgtataacagaacattatgaatataatggaaataaagttttatcaatttaataaaaaaattttcaacataacatggggaggtaataatttgatatctatattatagtatttattttgaaaaatattcccagcttgagggtaaaacaattaattttgcattccaaactctagnaatcgtgattttcatgtgaggcttaatgcagaattacagcagaaaaacaaaaacattttcattaatttccttngtcattaaatcaataaaatctttgactgctacagggtctcctttaacaatatatatttaactcctctattggaaccatattgctaatgctgcattatatacactcaaaaccaaaacaaaacaaatactgtataaaatctaaaagcaaacattgagttgtaacatttatatttaacttaaggttttaatcc

SEQ ID NO: 324289 - DNA, 792 bp, Homo Sapiens; identical to SEQ ID NO: 150565

SEQ ID NO: 324290 - DNA, 401 bp, Homo Sapiens
  misc_feature (376)..(376): n is a, c, g, or t
gaaattgacaccatttattgttttatgaccaaataagagtgtcagagaatacatatcttgggcaggtcccagaaagcgtctgccatctcccccactttaattctgtgtactggcctaagggcaaacagctggcaggaaggtggtgtctttaggagagagagtacttggatccactggagagtatgctctgagggaagctgcggcacttgcagaggggagtgggctggaaccaaatggagcccttttccggacacgcacaatgctattcccagtgaggtaatctaggaactctacagggcactgcggtccttagctgaggtgctcaaggactccggaaggaagtcatgttccccatttacaacccgtttccctagtncggggaagccagccacggagaaagg

SEQ ID NO: 324291 - DNA, 656 bp, Homo Sapiens; identical to SEQ ID NO: 125383

SEQ ID NO: 324292 - DNA, 987 bp, Homo Sapiens
  misc_feature (62)..(62): n is a, c, g, or t
gcaatggattttattttattaattgtatccacttacaaaccgacctaaggcaccccgatgtntagacacaatgagatttttgttgtttatagtctttaattgaagtgataagggaaatagatctatttaaaaacaaaaccaaacagctatttctgtctagattaagaggtggccccgggtgtgggattcacattttgagtggccacttgtggtgcgacctcgatgatccggggtttgtctatgattctggctgtgcggttgcccttctctacaatcccaataatccatgcttggtggccttcaccatatttgggggactttatctctgcacagaaccgagctgcttgctcacgtggtaaacagatcagaaggccgcctgaagtctccgggcaggtcccgtgcatgaggccgaacatgtttccgcaggccttgctcaccgcagccatcttggccagcaccgggaggttgtgaattacaaacgacacctcgttcctctgctgcttggccaggttctgcgcatggcccaaaatcccgaagcccgtgatgtcagtggcggcgtgggcattgaacgtgtgcatgagtcctgcagctgtcctgttgagcctcgccatgttcatcatcgcctcctggtaggccagctctacatcttcttgggtgaccactagtttaatcttattccatttctcagggatatccagccactggtgcacagccactgccacctgtgtccccaggggttttgtcagcaccagcacgtcccctggcactgcattgtctggcatgataaattcattgggttggcagacagtggtagccactcctcccaggacaatccaggggtttagtactgtttggccgcctgttacagatgttcctgcttcctcagctgcgtctttaaaaccttggataatcagaggcatcactttatccctttccctgtcggtcattttattactgactccaaggagcatcagcatattgtcaccc

SEQ ID NO: 324293 - DNA, 606 bp, Homo Sapiens
  misc_feature (442)..(442): n is a, c, g, or t
ggcaggtccagagtcacagtccgcagtggtgacagggttcttagatgcctgcatgggtctctaaatgtctctttaagcacagtttactcctcagaatctagcctgaatcccaggtctttcctgcagctgcacaaccagcgtcttaggctttgtagatgtcttggctttgacttgacgtcatgtatacatttttagtgtgacctggccgttaattacttaagtgagagaacagaccgtattaatagctttcctaagtaggttgaaatcttccgttttctaaatgatatcagtaggagacgatgggtgtatttcttttctgggccaggtagctggcagctgctagagctcgctgagggtctgttgggaagggtttggtgagatgcgttcacaagtctccccagccaggtagtgggctcgatgggtagggagcacagggacaggnccccagggatcatcctgcatcccctcactctgctcgcaacgcagagtcagagacacacgtcccaagagcctcatcatgtaacaggaactcaggttttaaaagctaagtgcatctccctaatctagtaagaagtagcacatcagtcaaaaaaatgaccaaattta

SEQ ID NO: 324294 - DNA, 1092 bp, Homo Sapiens
  misc_feature (404)..(416): n is a, c, g, or t
  misc_feature (1006)..(1006): n is a, c, g, or t
ctggtaccggtccggaattacgggatatcgtcgacccacgcgttcgaaacattctgtgtatttagcacttgaaaatcaacaaatccagaatttaaaaaaatgccacagacttttcaaagcccaactgtacttttttgagaatttgtccgtacctactaatatgccttattcttcttcacctagtgttttaaaagtcctgggtagaaagagttttagaaatgtaatcagttgttcagcttcaataatatagagatctaacatagtcagtcctcaggccccctaaagaaacaagcaagaaagtgagggccatcactagggttggctttggggaggggaaaactaaggactgcttttgccaaatgatatttttgataatgtaaggaaacacagggaccacaaaaccnnnnnnnnnnnnnaagtgtgaaagattagtgccttttggcatacttttgattttagaggatatagtatcggcattgacaaatcacgtagaaacaaagaatgctatagatgacaacagtattaaatgttactcctgattctgcagaacagcttttgaagatactggggggtatcttcaagcctcagagcagcttgtttcagatagaaattctctatgggttgaaatgccaaaaacagaaaacatgatgttgactcatgtaatttagtccattttagcagagcctttagtgttaacaccagtgggcgaggagcattgcatattctctgtcagcagtcagcacttcccacaccagggttggttctggggctctctgtagggctggtcctagtaggtgacacccagcaacacccctgttggacaggattgattgttcgcagtcttagaacaacacttcagtcagaaatgttactgggaggaggaaaagaaaatcactttttttcctccatgtggaaatgagggagagaggaaagtggattgcaaaccaaaatgtgagtcagtgtgatgaaacagtggctctgtcatctcgggcttttatcaataacnaaccagcatctctttaaggcgcttttgggctagacccccctgaaagtgggatgaaagtctggggggatttcccggcctggtggaat

SEQ ID NO: 324295 - DNA, 924 bp, Homo Sapiens
  misc_feature (76)..(84): n is a, c, g, or t
  misc_feature (165)..(165): n is a, c, g, or t
  misc_feature (199)..(435): n is a, c, g, or t
  misc_feature (437)..(457): n is a, c, g, or t
gggggagcttgggctctcgctttttatagctccccaggatctcccacacggggaggaaaggggaaaatggggcctnnnnnnnnngttcgaaggaggttgccccaaaattttccattcccagcccaggtttgtggaaggaaacagccaattcccagggcgcggtgncttcatgcctgttattcccagccctttgggaggnnnnnnnnnnnnnnnnnnnnnnnnnnnnnnnnnnnnnnnnnnnnnnnnnnnnnnnnnnnnnnnnnnnnnnnnnnnnnnnnnnnnnnnnnnnnnnnnnnnnnnnnnnnnnnnnnnnnnnnnnnnnnnnnnnnnnnnnnnnnnnnnnnnnnnnnnnnnnnnnnnnnnnnnnnnnnnnnnnnnnnnnnnnnnnnnnnnnnnnnnnnnnnnnnnnnnnnnnnnnnnnnnnnnnnnnnnnnncnnnnnnnnnnnnnnnnnnnnngaaggaaagagcagactatcaggggctattattaggaaccatgctcctgtgaattctgtggaaatgaaagcctgtttcagttcatgccaagtcttttcatggtccgccagcgatccttaatcatcacagctgttcggttaacaaatgggtaatttttagaaatggcagcccagtttccttccccatatttctgcactccagccttgacccactcgctttcttctacagtccacttctgcttttttgttatattggttgtactgtcttcatctggtgctgcctgaacttgaaacagttcatcctcttccacccaagtctccttttcttcaaccccattagagctgttccacttgcctttgggtactttgggattcttctctccagggaggggttggttgagaacggtgggcttggatggtggcgctgaagcggcctcctgggaggagttgaggcctgcgctgggctcc

SEQ ID NO: 324296 - DNA, 213 bp, Homo Sapiens
ggtttctttttcttctttttggctccagtgtcattggctggactcaaaccaccccggttgtagctgttgtcctcctcattctcgcaatcgctgcagtgctcatggccgttcccgttcccttccatcatctgcggcagcggaggtgccggcggcttcactgctgtctcactctcgtccgccatcttgagttgcgagagcagggctccgcgcccc

SEQ ID NO: 324297 - DNA, 891 bp, Homo Sapiens
  misc_feature (127)..(127): n is a, c, g, or t
  misc_feature (705)..(705): n is a, c, g, or t
ggggggggttttttccccttggagagggtctcttttaactatatggccttggccccctttggaaatttcccaggccccccattcttggggtgttaacggggtttaaaggggtggtgaacagccggancccccatccaagccaggtgaaagggagacccccggcccatgttggaaaggcccaggcaataatttccaaaacaagggggtcttccagtctttctggaccccagttgaccagtcgccttggaagacttgtgaatacatcatgtgggccaacatccccaggagacctgccaggacagaggaaacagcagcaaaggcgctcagtttgagcccacaggcagggttcccagtgagtagcaagtctgttagtagcaggaggaagctgatgaattgaagtccgatgtaggtgatctgcgttcccagggataaccataggatttctctcttggctggtggtgtaagttcaatgaaacttcgggcacctctcccctggttcttccacagtttcctcacaggatagccacatgccactccggaagctccggaaggagaaccggtcatccccagtctcccagttgtattgtaccacctcctgggtggatgtgttggtatctccatccagggacactggcatgtcaaagcacttggctgccagacctttctcgcacaggggcttgggcacctttctgtgtgcccacaaancccagtagttgctgagcagggatgttgtggagaagctgagtgatagcatgctgaggatggcagataggagtgtccgctggccagagaaggccttcgagagctccatcttggccatggtcagcgtcttgcagcttgtctggaagaaccgaaggatgccatctgcactccaagtccctttggtttccc

SEQ ID NO: 324298 - DNA, 866 bp, Homo Sapiens
  misc_feature (38)..(38): n is a, c, g, or t
  misc_feature (123)..(123): n is a, c, g, or t
  misc_feature (125)..(125): n is a, c, g, or t
  misc_feature (150)..(150): n is a, c, g, or t
ggggcttttcaagcaactgggaaggtccatccaggatntggtaggtttaatggatgtacctgtgttcctgtttaactcctcccaaaaaaaggaatggccccatcagtttcaccagcccataancncatgcatgaggtactccttttgccntggtcccaaccacaacaaaaggcttttaatccatatcccaagaagaaggctgcacagaaggttagcgtgatcttcacagtcacccttgtttctacagagaagggccagcagagtgcaccactgctcctgtttacctcctcctccaataacaggggctcgttcataaccaaggaccattaacaaatcttgctgcttgccttggagtatcaagaagccgtccagctcgaagtggtttaacataggaacagactggtctatttatcccattttcatcctgtgcaaaaatcttaaccagtcgtgagttgtgtgagggtcgaatttgcaaatattctctccaccactgcttagcatatacaagaaataatcgctctttctctgcagttttctgacgttccaaagcaagctgtgtgttcactacttcttgagataacgtttgattgagtggtggatacatttcaagttttatatttaaaattcccacagaaacttttgattctgtgcctacacccataagttccacagtcagactggtcactccattttctgagcccaaaaccgatcgccattccagaaaatatgatgctactaaagtcgtctcaccaaatatgtctgttttgattagcaccatatgaattggatcacttattgataacattgttgttgaatcagccattctagttccatcacccaagctttctctgtgtacttcaagtacc

SEQ ID NO: 324299 - DNA, 879 bp, Homo Sapiens; identical to SEQ ID NO: 150571
  misc_feature (251)..(251): n is a, c, g, or t
  misc_feature (254)..(254): n is a, c, g, or t
  misc_feature (436)..(436): n is a, c, g, or t

SEQ ID NO: 324300 - DNA, 1104 bp, Homo Sapiens
  misc_feature (18)..(18): n is a, c, g, or t
  misc_feature (23)..(23): n is a, c, g, or t
  misc_feature (171)..(171): n is a, c, g, or t
atagtagaataaaatgcnagggnactggatgaacatggcccctcgtgaccctgtgcaccctgtctgtcttttctgaaagcacgccctgtgttaactctgcaccctccccaggtagcactggcatggagggcaggcacatgttggtgagggacaattgttaccttgtgtganctgcggagatacccaggaagcccctggacacaaatggcaaaggtctcttcggaagttgttggatcccttctgaatgtaagcacttctttcccagagcactctgagtttcctcatttgcagggacaaatactgtgcgtggatcgatgatgacttccacatatacattccttggaaagctgaacaaaatgagtgaaaactctataccgtcatcctcgtcgaactgaggtccagcacattactccaacaggggctagacagagagggccaacatccgttttttgacatgggttatatcaaggcgtctgttcaggcttaggatgtggtcttttatgggtgatgggggtcacaggagagtggtggctcccatgtataggaaatttcttgtttgaaggactgtcagtgagggtgggtaacacatgcattgtctgcaggactaggtgaatgtccatgtggcctagcaagagttagctggtagcccgcctctggttgccaatttgttcttgagtccttgttctgagttcctggaaggaaacagatttgtctggttgggaggagaatacaaggccacatctttgtcgtttgttggctaactttgtccttggttgaggacattagagttttggtcaccaggcatagcctatgtgcctgtgtgcccgtgttgtatcccatgtgtttgggggacatgtacattgcatgaactagtgagctcctgctcattgcttctgatacccaaggagtccctggcttatcctaaacccaatataggttaaagccttttctcattaggggccccagggtcccaagggcttttgtgagtatcattggtaagtattggaaaccacgaatgttgagaaggaatgctgaaacatggctcttttagtggggaagaacgtaacttctgaagggctccctgaccccccagaatgaagcctc

SEQ ID NO: 324301 - DNA, 967 bp, Homo Sapiens
gaaaattcactttaatcttatatttgtaatttactttttttctgaacagttaaaaaaaacccaaaacacactccattatcatgatcctaggttgtgaacatattggtacactgactacacatcaccataacataatcacaaaagtcaaagcagtcagtacttaagagtctagagaacaaagaggtgaaccagctgaaagctctcggggaagcttacatgtgttgttaggcctgtcccatcattggagtgcactggccatccctcagatttgtctgggctggcctgagtggtcaccgctttgagaaagctgttagtttccttggtgcccagagggctaacaccctagttggccttttccttcagtgtccaagaaggggaagggttaggaggggaggtaacactttaaaatacgacttaactgcactgatccttaataaaacacacaaccaatcaggagctaagagcgccagctgtgctggttggaaagcacatattttagatgtcatctgcctccaggacattttagatcacaggtactcaacttccaacagaaggagcttctaaagatcaatgcattaagttccacctgaaaccaggcagccatcatcatgctcttttgatttctctcttcagctccaaggattctgacaccacagatgagctaaagaagcgaaactgttttattcccctaagaaatggctctctttccgatactatgttgacactgtggttaaaggaggtctggtctgttggtgaacaactgtgtggaggaagaccagggaggctgcaccctaagcctccgggctgcactaatctgggttggactgctctgctacagactggagggtgttgccatctaaggcaaaagggagatgctgagaaggtcaacagtaccaaggtatctagtccaattatgggaaagaaaaaaattgccctgattatttccagtattccccacccctccccc

SEQ ID NO: 324302 - DNA, 725 bp, Homo Sapiens
  misc_feature (199)..(199): n is a, c, g, or t
gatttccaggaataggttacgataaaagggcatgtaatcccataggcattttccccttagtgatgagctgggccaagaactattgcatgatttgaagtctttcccaagccccacccaggccaccatttaatggaggtcacagtaggactgttgagaatgaactcctgggtttcagggtcatacgtggctgtggtttccnaaagcctcgaaaggtgagttcccatgaccccatctctgtctgggcaataaagtgcccaatgatctcccaagttcccaggcgggcatgaagaagcgctcctgctgtctccgcagttgccctggtgaagcaaggtgggcaggaacatgcccaagtgaagatccagaggctcaggccgccctcggtgcacaaaatttttaaaccacataatttcatcagggtcagcgatgccaaactccctcatcttcttcaccatgatggcacttttcctgacagccacctcataacgctggctgcgagtgaggaaagttcaagtcctcatgctggaagtctgggtcgttcaaggatcatgttctcgatctctcggcggcgccgggttttctcggggctgccgtccaggatgtgtgtaagcagctccgggttgaagctggcggaatcccgctccctgcgcaggtccgggttcatggcgacgaccagctggcagcgaagtaagcaccgaccgaggtggcagtgacaatctaaatccccc

SEQ ID NO: 324303 - DNA, 968 bp, Homo Sapiens
  misc_feature (151)..(342): n is a, c, g, or t
  misc_feature (354)..(365): n is a, c, g, or t
  misc_feature (670)..(670): n is a, c, g, or t
ggcatgtagaaatgttctttgtgtattttttctacagaggattttctctgattttattttctttgtttctgactctaataattagttggaaactcatataaaatgagctttcctaaattaaatctattttaaataaaggttattactattnnnnnnnnnnnnnnnnnnnnnnnnnnnnnnnnnnnnnnnnnnnnnnnnnnnnnnnnnnnnnnnnnnnnnnnnnnnnnnnnnnnnnnnnnnnnnnnnnnnnnnnnnnnnnnnnnnnnnnnnnnnnnnnnnnnnnnnnnnnnnnnnnnnnnnnnnnnnnnnnnnnnnnnnnnnnnnnnnnnnnnnnnnnnnnnnctattctggcgnnnnnnnnnnnntttggaattccttcatttaaaaaaccttttttccaacagcggcccgcccctgaaaaaaaataaggagaagtttccataaggagaattaaccgcgcattctaccaacaacaatctctgggagaaccttctctcattacaaaataaaaaccccccgccccgggcgcgattcctgtaatttggggaggcgccctctcccgaatagacgtttgtttgcaattttccctcgccaccactctatacatacccccgagcaacagaaggggcccttttaattttatctaaaagctgtcccctccccccgcccntacagcacccctccctccgcaacaaaatagtggcttccccaaaatatgaacaaacgcccgggcgccgccgcaaaaacaagcgactatatcatatgcgcgccggagggttataaacttcttccccgcgcggtgaaaaacaaacccgcccgacgcccaaaatactcgtttgtttattaatcataaaaaacactctctctctctcctccatacaaacacgcccccgtggtggggcgaccaatcgaggcgcacgttatttgtgtcttcttccccgccacccacacaccctctactattctcg

SEQ ID NO: 324304 - DNA, 193 bp, Homo Sapiens
  misc_feature (154)..(154): n is a, c, g, or t
  misc_feature (180)..(180): n is a, c, g, or t
gaaacagagtcttgctatgtgacccaggttggcgtaatcatagttcactgtgaccatgatctccctggttcaatcgatcctctggcttcagtggctgggactacaggcatttatcaccgtgcctggctaactttttttaagttctagtagagangtggtctcactatgtagcccaggctnggtctcgaattcc

SEQ ID NO: 324305 - DNA, 774 bp, Homo Sapiens
tgctgggatgacaggcatgagcaccactcctagcaaaacaaaatatttttacaaataaagtgacgggaggaccactaataagttatgtccagcttagtggggttggggaaaggttatatgaagcaacaaagatacagtttctctaagccaagtaaaggtaaagaactgtggagcaggcgataaagccaaatgcactgaactatgtcataaggaatttacaggctgtattgtaaaagccacagtgaacatgatgacagcaacaacgaggatgaagaacagcaaagaaaaagctgagggaaaccatcgaccaaagcaagcggaggctcaaaagagagacgagcttcaggatcaggaaatgaacagggcccttcagtcacggagaagtcgttgttgccagaacagtcagtcacttaactgcttagaagatcaccgtgttaccatataacctctattgtaggctaattaatttttaaaatctgtctaaaatttactgattttaatataatatcttgtcatttttggcaacaatacactgaagtaacaatgtagtttgctgtattttgtttcacaaatatttacctggaaacactggagactttgtaaagagaaaattactaaaaattactccttcactacaggacagtagatatttaatatttatttagaaagctattgacacttctgatgactactgataactgagaagattcaacatgttataaatatgagttgtaaatattccatcccttttgagattatatacactaagcttcc

SEQ ID NO: 324306 - DNA, 869 bp, Homo Sapiens
  misc_feature (679)..(679): n is a, c, g, or t
  misc_feature (701)..(701): n is a, c, g, or t
gagatggagggcgagatttggatgggacccagggctcctgactctgccctggaaggttcatggggaaactcgctccttctgttggcagaggacagcccctggggaaccccagtcccaactctgtccggtatcccttttcctcccagctgccctcccctacttctcccttgctcccaaagctttccttggagaagggccctcctgcagctggaccctgcaggttggctccctcctccccatcaagcacaagagagggcccagggaaaaaaggtttcacataagtgtagagtcgcaaggacgcttagagtcggcagagtctggggtagggagacagcgacttgtccaaggtcaagcacagagggagaggttcaggagtcaggtcttctgccttctgagttggctcatcctgggcagtcacagactgtcctgcctgcacggctcctatccacctgggggtgtcgcagttgaggggctaattcccaggggactgacgttagttccctactccatccttccctggtgattcttgatcttcaaagcctcggggatcccacggtttccccatgtaactgagacaccctgcctgttagccctgggagacccctaaccttggcccaagacccctttgattctctaaggagcacgaaagggggaatgccccttcccaggagtttatggngagaagggactgggccaggctngcctcccagcgatgcacttgacctgacactccccatgtcctggtgcgtacagcccctgtcggtgccccggcccctcccgcagcgttactgcctgtggatagtataaaaaatatatatttttctaatatataagatgaataattataagggctcaccaaatatatcctg

SEQ ID NO: 324307 - DNA, 926 bp, Homo Sapiens
tcaatttaatttattctatgcagtttaaagtgaaagttaaaacatcatacaaaccacagaagcttcatagtactgaccagttttaaaacaaaaacagtgaatgatcatttacacacattcctcatctttaattttacatcttgttatatatacaaaggtactattaaaacacgtaattctaattatttataaacctattgtcaagcagcaagatggcaatgcatcatagcagaccacagaatatttccttcaaggaatcacagcagcagtatttggtgaatggttatgcatagaaccaacttggaggatcgtgttaaacattccccataaaacaggtagcacatgtacaccaacaaatgaaaaatgtaactttaattgacataagataaaatgttactctttacactttaagttaaaaactataggacactttagaagcagacaatacaaggtgctttagttctagacttcacaacagaacactattccattagtcgcttgagagtccataacctctgaggactgctcaatggctttttaaagtcaacctcaaatataaaaagcactttaagtttaccagtcaaaatctagttatatcagttacatcttacgttacaacatactacttgagaaaactgacttttaaaaaagactgcattgttgactaatttcaaagattgctgctcttaaaagtaaaaatgcaccactttcaaatctttcacatgttttaagatatcatattttgtgaatccattactttatatattccaaccttcagcaaaataaaattaaaatgggttttaaacctaatatctctaaagaaatgggtctgcatgtctgtgaagtggctgtccccgcacagcaatatgtttgtttcaaccggacgcgtgggtcgacgatatcccgggaattccggaccggtaccc

SEQ ID NO: 324308 - DNA, 836 bp, Homo Sapiens
ggaaagaacccccttgtggagctccaaaaccttgggggtgttcccaggggccttgggaagtttgggcttgtgggcccatggggacccacctccccaaatcgtgcccccccgggcgtggggggaaaaccagtgtttaggcaccgggcttggacctttttccccttttttccttttatccttggtaggggaccgggagttctctttctttgggatgggagggaccacctttttggactctttccagttttgaaagattccttgcgttcattttccttcttcttcttccctctgtcccctatcaatttcatctacccgtattacctttcgtgttttggcagatttcaggggtgtctgaatagcttctgctgttagtttgtttatttcggtgatatccaggtcagctgttgccgcctcttccagggcctgtttgtttcctccaagggcgaagtagtcaagccagttcatctcgcgcagagccttggggagccgcaggatctcgatgttgtaggaggttatccacctccttgaggaggttctgcctgtgtgactcaatttggttgattcgtatttccacttcacggtcgaagtctttcagaaaggaggcgagcttccgcctccgtaaggagttggtcttggccacccgactactgcccttcctaggagccatggcgctcggcggaggctgcggggagcggcggagatggggcagggaagcaagaaactgggtagggacgaggagggcggacggggaccacccgaagaagtcgccaggcacgtacctgcggtcccgagacaagggctgagcaaaacctcgctgtgccagtgagagagagccc

SEQ ID NO: 324309 - DNA, 610 bp, Homo Sapiens
  misc_feature (426)..(456): n is a, c, g, or t
  misc_feature (480)..(480): n is a, c, g, or t
  misc_feature (501)..(501): n is a, c, g, or t
  misc_feature (524)..(524): n is a, c, g, or t
caaataatagttttaaaaaagtttttatcttgaaatattgttcctcatattttggtggaataagcctggtgctttctggctatgtttgtcataggctgacctggatatcaccgaaataaacaaactaacagcagaagctattcagacacccctgaaatctgccaaaagtgagtacctttcaaaactccttgttgtacagaaagaactgaggctcaggttgcttgggttgggctgctcaggcagggccttgttggtagagcctcttcccttttaatgtctgggttcttaatcttgtaaatccaaaaacttgcttttggatggtgcatttagttaattttttttcccccgaacagcaattcaaaccagaaatttagttaattttaggcaggactgctaaaaaccaaactcaagacccgtgtgcgagcnnnnnnnnnnnnnnnnnnnnnnnnnnnnnnngctgtgctagaaaccaaacattgntgcctgcttactttctcctgngttaaatagatgacacgatttanagaggtgttaaaagactggtaacaccaactgagacgctccctgatgtaatcaacaaagttgaaagcgaattgaaaaaggaatgact

SEQ ID NO: 324310 - DNA, 319 bp, Homo Sapiens
  misc_feature (43)..(43): n is a, c, g, or t
  misc_feature (73)..(104): n is a, c, g, or t
  misc_feature (117)..(117): n is a, c, g, or t
aaacccagaatttagttaattttagggcaggactgcctaaaancccaaactcaagaccccgtgtgcgagcctnnnnnnnnnnnnnnnnnnnnnnnnnnnnnnnnctgtgcctagaanccccaaacattggttgccctgccttacctttcctccccgggttaaatagatgacaagatttagagagggtgttaaaaagactggtaacacccaactgagacgctcccctgatgtaatcaacaaagttgaaagcgaattgaaaaaggaatgactttctctgcatataattcaaaattactcaattcaggccaggtgctggtac

SEQ ID NO: 324311 - DNA, 914 bp, Homo Sapiens
  misc_feature (41)..(41): n is a, c, g, or t
  misc_feature (417)..(464): n is a, c, g, or t
gcccgttcacaagggagaatttttacaacaccaggttaccnccgccacaaaaagtggggcccaagggccgcggggggcggttaaaaattggagataactccgaaggcttcccccttttgagacctccccccgttgtgaataaggatttcccagttaaaaggcaccttccaggaaatttcccattctgggaattttgtttccaaaaaaccgcttccggttgggcccccccggggcgtttgttgttaattggggtgaggaatttccaagccccttagttccatggccccagggattttccttagggaaaacacacctaatgacccatgtttcaatttaccttactgggggcccggggggcccaaaccgaatggttctagagaagctttttcgaggggccgagggcggcccgacaaggannnnnnnnnnnnnnnnnnnnnnnnnnnnnnnnnnnnnnnnnnnnnnnncccgcaccttcaatctcatggcatggtctgcaggaaacctcagagtcctgccaactcgcaggcttcgctgatcgcatggcacctgggcaccccgccaaagagctgaaactcccaaggctcagccaggactctccagctgtggtgtttctaaaagccgttctgggtgagatgtagagccgagttttcccagtcgctcagtcctcctcccgtgaggacaacactgcttgctctcctggcttgcctcacccatccaggaaaaggtggggaggggctctaggcagcggcctctcctggttgaaagaaactgagacctgggccttccgtccagtttaacctggagcaggcctggcccctgggcaggctcagagcaggtcccccattcagcaaatgagggtatcctcctattttgccaacatccatcttcaccgacttggcctgaacccattctcc

SEQ ID NO: 324312 - DNA, 848 bp, Homo Sapiens
  misc_feature (26)..(26): n is a, c, g, or t
  misc_feature (73)..(73): n is a, c, g, or t
  misc_feature (78)..(78): n is a, c, g, or t
  misc_feature (147)..(155): n is a, c, g, or t
  misc_feature (223)..(233): n is a, c, g, or t
ttttttttacaagattcatttttaantggatttgatctgtggggtgcaaatttgagcattatttacaagagcntttcntgtagagttatttctgttcaaataaaaccagactctcaaaatacaacataagcctgaacctacttggannnnnnnnnctccctctagttaccaaggaatatcgtatctcagatgcatggcctactatcacactggtctttaaagnnnnnnnnnnntgcatggccacagttccaggtagctggatttagtggatttatatatgacagtacagtacatcatcagtttcacccacagggcagaacttgcctccattcaggcatctctttacaactggcagcaatgcagcattaagggtttttagccaggacctgctgtttgcagtcctgccccttgtagtgttactctgggtgttgcacactccatgattactagaagacaaacacctgaggcatgcaatctgcttggagtgcatctatttacatgaagctgctcacgggagctggtgattcttccagatatgggtttcgtaggttggcaaagagttatcacaccatcagagattttaccaatggaaagagagtagctgaagattatattgcaatgttattgtgaaacatttaactttcttaagtttaaagtgtactatctcctgcagctcaatataaacaacgatgtatttctttgtagcagtatgtggagtcagaatgggttttccaatctgatttaatccctgagcagctatgttaaaagttaactttttaaaaaagcccaataaaaaactaaatactgtattaaaactctaccacaatgttacagggataaacttattt

SEQ ID NO: 324313 - DNA, 911 bp, Homo Sapiens
ctggggagagcgcgtagtcacaagtacggataaatcggcgcctgtccctcgaggcaggcccggtgaacaccctaatttcccttgtgggattacagagtcctcccgcgacgccaaacaaaagaggttttgaagaacgcttctggaaggatcagaagagggcggcggccagggtttattttagtgtgttattagctcggcatagcagcggaaagggccgcaagttatgcgtatgtaggggtgggaagagggcaagcgggaaccaagagggccattgtaaaaactcccagatggagagggataaggggcagggccaattcccagatgaaagtcatgcaggataaaaaagcagtttgggcaaatgttttgtatccagaagtaaaaattcaagtcagtgaaggcattcaaccaggaaagattattttatattgataacagttacgggctatggaggggaaagctttgcaaagcaacaacaggcaaaacagaaagcaaaagctattagaaggaagattagctatggaagaaaaagaaggctgtagaggaattttagacaattattatgtttcaatcagcaaagaacaaacaggataaatcttaaaaagtggtcttgttattgttacagaaagtgatcattctttacactacaagggaaaactcaaaatctacaaaagagaaatttcacagacaacaatctctactatatccatacgtggggaacagaacaaaaaaactaggtctagactagaagacagagagaaaccatgtcagaccagagcacattgatggctcacggtgagtgacccatggcctaaaggtgcctgtttagggcccaggagccactcacacaggcagagcagcttactccgtatgaaccaccaccagcacccctccctgcccggtgatgtcacccc

SEQ ID NO: 324314 - DNA, 891 bp, Homo Sapiens
  misc_feature (32)..(32): n is a, c, g, or t
  misc_feature (260)..(303): n is a, c, g, or t
  misc_feature (425)..(549): n is a, c, g, or t
gtcctaagtaactttcttcaaaaagggtaaanttaatgaaaggcccttcccttctaaaaccagatagggggggagatagaatgctctgagtattaaaggcatctcttgcaagcccactgataactttgttgacagagcacacagaagaaaatagcagttaccaggttacctataggtgaaatttgtttccacgtaaagaaccactgggtccaggctcatggagtatgactcctgagagaaactcctgttactctgatcannnnnnnnnnnnnnnnnnnnnnnnnnnnnnnnnnnnnnnnnnnnattaaaaatgaatattcctgggctcccaataaactctccagggtgggattacgttgtctttactgataatgttcttaactaaaaattcttagttataaaatcacaaatttcggccgggcacnnnnnnnnnnnnnnnnnnnnnnnnnnnnnnnnnnnnnnnnnnnnnnnnnnnnnnnnnnnnnnnnnnnnnnnnnnnnnnnnnnnnnnnnnnnnnnnnnnnnnnnnnnnnnnnnnnnnnnnnnnnnnaagcctgatttactcttaactggatataaccagaaagagttctgcgcacaatgatatatctgcattgaatctaaaacacagacttcatcatacattctcacctaaatttctctgatgacccagagtaaggcaaaaggtttagcatatgagagtgaaaggatttgaatctcactttctgtcaaactttagagctctgttaaccatggttagtatcaactatgattttaggcaactttgcttatagtaaaaataactcgttaattgttacgtatctggattgggatgcactataaataaatggagtcttcaagctttaggctttcctgagtgctgtgccgatat

SEQ ID NO: 324315 - DNA, 1066 bp, Homo Sapiens
  misc_feature (107)..(116): n is a, c, g, or t
taacctgaaccagcaaaaccttagggtttgccatttgagcctacacattccactggaatttccatggcaaatattccaaccctggcttgatcaacactgctcaaagnnnnnnnnnnttatacaaaatgtgcaaattcagaggttggcaaaattctgaagcttagcgaggtaaacaaaaatattaacaccatgaaaacttcaaataaattaaacctatctttcttcttccccgagattagctgcaaattcagaaagttctctttagaggtgggtctgatgcttgcagagccctcagacttcagcacttagatgagatggagaccgtgggtagggccggagttgctttgctaattactcgagtgcaggtttggtccactccgcgctttgacaggtcgtccctgccccgtaatctgctcattcatgactgtggagagttcgctgagcatgtccttgtagtgggacctcagttcttcctggtactccagctggtcctctttgatgaggcgctcattcacgtcaagggcctgcccacatgcatctgcaaattgcctgaagatctccttcaaaagctttacttggttgtcagggtacttctttgcattggtttcttcaagaaaagctcgtgcataggccattggcccagcattaaccttcacgctgacacttccttgcagtttgagctgcagtctgatcatgtccacttcttccattgtgcaaagctgattaagctcagaaaccttcttggacatctcgtcaattgccacttcaattggattcagttctgtgctcgattggctaattacttgtattctcttcttcacgtaggggaacaggtgactcgttgtcaggatcgtccgccgcttgcactgctccgccaccccaccgtgcttcttgcccgacagcgtgaagggtgtctcgaagacaaagcggttgatgttgtggtgcatttcgaaatctgtcttccggtcttcgatttccttttcctcaaagaacggcgtcacataggtcacctggatgtaggcatatttggggtccaaatccttggggtttaccttgttggaatccc

SEQ ID NO: 324316 - DNA, 606 bp, Homo Sapiens
  misc_feature (485)..(497): n is a, c, g, or t
  misc_feature (499)..(505): n is a, c, g, or t
  misc_feature (519)..(520): n is a, c, g, or t
  misc_feature (556)..(557): n is a, c, g, or t
gggaatcctattgattattcaaaaattcaggctgatttgtcttttatcagaggtaggattctgttttataggtatagaatctactttatccttccttttgaatagttcctttagacctgtgaaatttcttcactacatttaatagttctcctatttcccgctcccccatatcaattttccttttgtctccggggctgagtaaataaacatgttctgtcacaaatagcagcaccactttggattgattttgctctccaggacatcagcacatggccctgatcagcactaccacatccaaacataagtcactgaaaaacacttaatatttatgagttggtaatgacaagggacattgtataaagtactatttgctagattcatgcctcaaaagttattataaacagacctttattaaacacatcttgaaagatgtagaagtccctctatagtctagtatagtttacaatagaagttgtaagaccctnnnnnnnnnnnnngnnnnnnnaacatgggtcggcnncgcctcggccccttcgaagaaagcttttctagaacnncattcggtttgggcgccgcggggccccagtagggtaaagtggaacatgg

SEQ ID NO: 324317 - DNA, 913 bp, Homo Sapiens
  misc_feature (723)..(723): n is a, c, g, or t
  misc_feature (795)..(795): n is a, c, g, or t
  misc_feature (872)..(872): n is a, c, g, or t
tttgtttttagatatttttcctataggtttctgctgtggagccgtactcactgcagaccctgaaggaggaggagcacctgctttctgccactcagtggcctcagctgccattcttctcacatatgcatcatccacacacatcaagatattttccggctttatgtcagtatgaatgatcttgcacttactgtgtaagtaatctaacccttgaaggacctgtcgaatgatactcttcacacaacgtactgggaggccttgatagttggatttgatgatccacttgaggagatggtggccaagtacttcgaagaccatgcagacatgtatcccattcatgcctgaaatcttgaagtcgtcaatgagctggaccaccatgtctttgtttgggtcactgggatcactttctcgaacacatttgaggcaattttatttcatccaaggctgtctccgtataatgctgggcactttttacaactttcattgcaacaaatcttttcccctgcatatcccagcacagccagacagtagagaagtgcccccatccaagctttctaataacatgataccggccattgaagaggtctccaattttcactggatgatatccacctttgcagtagtccgcagggtcctcttgctcctcatcatctgatccccggatctcctcctctggctccgggggtgtggggtcttggcaaaggtggcggttgtggtggtggtggnggtggaggaggaggaactaaaggagctttctgttgaggctccggctttttcggatgtttctctcttttcggnctccgctttcgggcctgaatggccagcactttccgggagctcattcgacgcggcggaagcggggcggggggttcgcncaggcgacgcgggcgccgagacgagctggctgcagcctcca

SEQ ID NO: 324318 - DNA, 426 bp, Homo Sapiens
  misc_feature (271)..(271): n is a, c, g, or t
tttgatacatgcatatatttaataatgaaacaattcatcaacagcaaaaagaaagtagaaaaattcgtaagacctcagggctgtggaagagaatgggacatcaaggaaaaaagatatatatagcaaccaacccagaaggctgcatgatgagtgaagcaaaggcaagtttggctaagatagtattatatgctctgaaaagagaatggctggataggtacccacttatgtgactgcttactagcaggcagccttactgtatgcctcatgggantgggaggcaaaaagccaggggaaaggtggggaggggagaaggaagagaactgtataaaacccagggtaaacaaatgagtggggcagaattacagagagaggactctaaagtcttttgtttccttgaaagtctaaaataaaccttaagtttttacc

SEQ ID NO: 324319 - DNA, 252 bp, Homo Sapiens
actgcgcccggtctccactgctttctaattccaagggatgcgatctgtttagagcctcatctggtgactctaatccttatgaccagaatgtgcagggattctgactgcatccacactgtggaaatgtaacagctttagcctgggcacagaaggcttttctctttcctgttctttcctgaaccagcaaacttcagggaccctgactgggactcccgctgggagggaatgaagcccagctcctagggacttatt

SEQ ID NO: 324320 - DNA, 348 bp, Homo Sapiens; identical to SEQ ID NO: 63301

SEQ ID NO: 324321 - DNA, 430 bp, Homo Sapiens
ggggtaaattacaacttacattaaaggcagattctttattggctgaatgtgctgtagtagatatttaaaatatcacaaacattcatgattgcagtttttaaacttagctcacagttgagttagatacaacagttaacatacttaggaaagacaattcttaacagctttatcaagcacatttgtgaaagattaaactttcatttccagttaccatgatgtccccccatacaccaaatgaaccaacacatttatttattttaaataatggaaactgtacatggctacactgtgctctaaaattacttgcattaatgaggacattaattttagcatttaaaaaaagagatttaaaaataaccatagaaaaacttgaaaaccctgacaagccgactacaaagagaattcctctctgaaaattttcagatgcgcc

SEQ ID NO: 324322 - DNA, 1064 bp, Homo Sapiens
  misc_feature (912)..(961): n is a, c, g, or t
  misc_feature (998)..(1012): n is a, c, g, or t
gatgtttgttgttcaagatgaatgacacactcaagttacaaaaatggggccttaaaagaagcacattgtacaatgaacaagcagattggagttaagaacactgaaacactaacccgctaccacgagaagagacggagggggtacaggaagggaaggaaggggctaccaacacaggggtcagacggaactgaaagggaggctaacttggtaaggatggaggaaaggcaggtctactccagggctgatttctggatgccggttcctgggcacccttgccttgtacttgccaccccctccaacttcacccacccccattccaacctggtcattctgggtggtgaaagacaccccacaccagaatgggctgcgccaatcaggtctttaccaagtagggtgggtcaccttgccctagtgcagccctggatttggaagggtgatggtggaagccagtgggacaagagggcagaaaggagttgaaagttcaggcccctgctcttcccaaagacttcctcgcccattccccaccctgccattatccaaaggctctctacgagttgccgagagaggcccccagtcaccctgcaattatataaataaataaatactgagcccctgggtttgggggacatattgggggaggggcagcaaggatagaggacaggaaagagaggaaggggagggaggcagaagggaggggtcacagacatagtaaatagttgtctccatcccagcaacacttctctctggatttttctctccttttgtttgtttaacaaggagctaacaattcaaggacaaatacttaaaaatatacattattttttctttgtttccgcctttgtcatcgtcgtcttgctttggagactgctgaggtcaaagtttaaaccgcatgaaggacttgcggcttggagnnnnnnnnnnnnnnnnnnnnnnnnnnnnnnnnnnnnnnnnnnnnnnnnnncccaacatataaaaaggtagcggagttgtctgtgggnnnnnnnnnnnnnnnaagtggttaaatctttggtttgtttcttttttctcttggaggcctttatccc

SEQ ID NO: 324323 - DNA, 887 bp, Homo Sapiens
  misc_feature (38)..(38): n is a, c, g, or t
tatttccatttattttactttgagtaataaaaattttnctatctcatacatgatcgaacacataagttgctttaaaattaacagtcacaattgaagaaacaatggtttatttttctaatcaagtgaccaagctgctgaatcataaggcctcaacaaatgttgcatcttattatttcactgaacaataaggaccttctattgtgattattcctggtaaatagcaattttgtttctccagcggtttccatttgccaaacagtcatgacagatggttgaacatggtggctactgctttcagggggattctatcagatgagtcctcatttccaataaagcagctgttggcaatctttcatcaaaagttcatccatcaggacttctctatcgtggttggccaaggagtcctgctttggctgccagggcttcattctgctgaatatgatattcctgaaatctcatggatattctttgtgtcatttttaaatatttctgtaagcaatgttctgaacaggtggtctcttcaggttttacttctcttgttgtgaagtctttaacacagtccaaaaagcaggtctctgtaagtttattgtaggtccccagaaattccttaaactgttttatctgatcagattctggtatttgtgcagccatattcttctggtacctttattagtcaccttttctgatgcatgagtttcctttctgttctggaaaagtagttgtccaacctttgcttgaatgtctccaataaggcctgattcttacttaagcacgaggctctcgcatccgacatcagtacaaggctgggggttgttgggggacggttgagccttgggagggagggtcagggtctggacaggagccgcggccgccagatgggaaagccc

SEQ ID NO: 324324 - DNA, 409 bp, Homo Sapiens
tggcggccgcggctcctgtccagaccctgaccctccctcccaaggctcaaccgtcccccaacaacccccagccttgtactgatgtcggatgcgagagctgtgcttaagtaagaatcaggccttattggagacattcaagcaaaggttggacaactacttttccagaacagaaaggaaactcatgcatcagaaaaggtttcagggatataatcagaaggtgactaataaaggtaccagaagaatatggctgcacaaataccagaatctgatcagataaaacagtttaaggaatttctggggacctacaataaacttacagagacctgctttttgggactgtgttaaagactttcacaacaagagaagtaaaaacctgaaggagaccacctgtttcaggaacattgcttta

SEQ ID NO: 324325 - DNA, 540 bp, Homo Sapiens
  misc_feature (179)..(179): n is a, c, g, or t
  misc_feature (445)..(445): n is a, c, g, or t
  misc_feature (514)..(514): n is a, c, g, or t
gatttcctcgcgttataacgaatcggcgtctaagggtttaagtgtcacttgacattactgctcccacgtgttctttcccatctggcggccgcggctcctgtccagaccctgaccctccctcccaaggctcaaccgtcccccaacaacccccagccttgtactgatgtcggatgcgaganctgtgcttaagtaagaatcaggccttattggagacattcaagcaaaggttgggacaactacttttccagaacagaaaggaaactcatggcatcagaaaaggtgactaattaaaggtaccagaaggatatggctgcacaaataccagaatctgatcagataaaacagtttaagggaatttctgggggacctacaataaacttacagagacctgctttttgggactgtgttaaaggctttcacaacaagagaagtaaaacctgtaggngaccacctgtttcaggaacattggtttacaggacattttttaaaaatggacacaagggttttccctggngttttcggggattttctttttcggcg

SEQ ID NO: 324326 - DNA, 628 bp, Homo Sapiens
tagtattgtgagtagagggagaaaatgaccttatgttttcccccacgacacaagtcaccgtcattatggctttcatatcaagtatctgtttccctttgttccaattatttgaccaaatttatgttcagaggttagacttgcaaacatcaaagcaccacaaatgtgtgtgacatctagtgacactgggttgaaaaatgccaatataaataccatatatcaaattaccattgtttcacaccaggataaaaagaggggtggtggcagtggtgttggggtgggaaagagttgttcctggaaagaaatgaagaaaagagcagaacccaatctcaagcagcccaagtggtgaagttggatgtatgtgaccctacgatctctcgggtaggttgccagagggccgtccgctaatacaccttggcaaagaaaatgggaaccaagcgcagtggctggcatatgcaacagtgcgttgatggtaacggcagattgggaacaactggtttctgttgagcttggggccacacatgttccaattctccagaagaaacgttcccacacacaatggaagtgtcaagagcagccggggtgggtcagtactcttcctgctgcgggggctgctgttcgtgggcttgct

SEQ ID NO: 324327 - DNA, 885 bp, Homo Sapiens
  misc_feature (212)..(230): n is a, c, g, or t
  misc_feature (465)..(465): n is a, c, g, or t
cccaggccccctggaaaaaccgttccacaggaaaggataggggttaccaaggcccaaaacttggaattcaaaaaaattaaattaatgccaataacccaattaattcggttaatatctattcccgcagaaatagtgtagggggtagtttataaagagggcttttttaaaatcatcccactcatcatatctggcatttcaaaagtatcatcttnnnnnnnnnnnnnnnnnnntctttttagagcataaagcataacaggttgaagtggtttcaaaaaagctacttctagtgttcttcagctttctattatggcagcatcatcttgtgatgaagacactggctcacttggacacacggtcagcatgcataaatacatctcagtgatgatcaagttactgccatctacaggaccgcttgcaaataagatgaagagagctacctcagtgttagcaagcaaaggcttcganggtctgtactactcaaaaccactccctaagggtatggccaatgcacagtttgaatgttagggaacacacccaggtaatgttaaagattcaccagttttccccttggaattaattctaataaaatcttccacagggtaaattaaaaataaatttctctccccttttactcttcattatttttagtctcaaaagcctcatatactgttccaatgaaacaagaattggctctgaaccaaaaccaaaaagaagggaagaaaatccagagtattctatgatgccctgttaagtattagcgtgtggcttccacaagaaagttgtcaaactgtgcaaattcaaaggagtgagttccaattgcagcccagccattctttggaaaattcacagggatgtctgtccacagagacttgtcattcagcatgc

SEQ ID NO: 324328 - DNA, 1151 bp, Homo Sapiens
  misc_feature (54)..(54): n is a, c, g, or t
agggccatccaaagggcaggtaaccatcaggatccatttcgtgtcatacatccnggcatgggagcacaagatggtgcttttgggataaagggcattaaaaaaggcctttggcttgatgtggaaagcgggtcagtaaagactccagttctgcacaatggaatcttccaagccaagccgctttccacaaatacaaattcagtctatctttctttctggaccagtctgggagcatcgacaaaatctttgccattgtaaagaatgataaaaaatgttccaatgcttgcaactccccagaagagcacataggccagtgtttctgtccaagtgtcaccagccataagcaaacagataatgcacattgaaaaggcaacaaccatgataataggcaaagccaggaattttccagttccttggaacacttaaagggactatgagattctaattcatcccctgaatagtttccaagaaataagtttatggaatcttttctaaatccatcggaaaagttgttcttataatatcgtatcattgagttccagccatccattataagtcccaaatgagttctctttccagttctggtaaagtcagtcttcaagggcaccagttcccgcatattgcttggcacaagcatttgcgttgtcagcccaggcatttttgtaaatcttctcaaattcatcttgttcttcaagcttttgtcccacatgcaaaactcctagtctctgaagttgggcctgaagtgaacgacgagctaacaaactctggatcacattggttctatctagacaatccatgcaattgcttcggaacacgccttcctggtttgccaccacctggccagcagagtccactagaaaataacttaattcatcttgcatttctgctacctgatccaataaaatacttagtcgatcccatctcatatttttacattccttatggaagtcaaaggcaatgtatctcatcattccacttcccaaggaagacaccattgttgcaaatgtctgctcaagtggcttctccgagcccttctggttaatcagattgattataacttgttttccataaataattacttgggaatcaaaatgcctttggaaaccgtccatgtgatttgctactttgctgatctgtggcagtggtttgtaccc

SEQ ID NO: 324329 - DNA, 1474 bp, Homo Sapiens
  misc_feature (1455)..(1455): n is a, c, g, or t
cttgtgtcgtgtagcgccacccaggtagaaaatcaacttaaatactatctctcctctatcaggacgtattgagaacgagactgttcgtcactacgatcctgcgtaccacccacttcctccagtctgtagtgaaataattagagaaggaacaaggattgggcgaagcagaagaccttcacctattgatcacagacattcagcaattccacagtgaagatgaatcgtctcttcacctcagagatggagcagtctctcacatgggagcaagatccggagaacaaaactcaggctccttgtgtaaaccgtctcacagcgccactctgccgaagttcccaattccaactactcgaagcgagtcgacgaagccccacattctcacgcaagagctcccagtactgtgcgagatgggcatgctgctgagaacaagtgatgtcattagtacaacgaacggacatatatgacacgaattgctgatttgacatagcagaattcagctatcaaggcacatatgactaatcttattgagcccagaggagagcaaggggatggactccgggagttgaacaaacaagaaagtgcaagtgacatgacttctacttttccagtagcacagtctctaacaccaggtagtatggaggaacggattgcagaattgaatcgacaaagtatggaggctcgtggaaaactactgcagttgatagagcagcagaaacttgttggtttgaatctttctccaccaaatgtcacctgttcagttacctctcagagcatggacttgaaggagcaaagaggacaacttgaggtatctattccaggcagcaggaagccccagaaagctcaaaatgtagtactgtctctcccgtcagcgggataaatacaagaagatcttccggggctactggtaattcttgttctccactaaatgccacctcaggaagtgggagattcacacctcttaatccaagagcaaagattgagaaacagaatgaagaaggctggtttgctctttctacccatgtatcataagtgaagtcaagtctcactgagtttgttcttaataatttattacttccctttccctgctctgacttttaagtttttatatccttctttcagataaaactaccaagatcctgtgaattagtactaatgaaaccgagaaataaagcaattattttttgacttttctcaaataagtttttcacaacccactgacctacagttccctgtgaatgaaaactttgactgtagagaaattaaaggtttgtattttaatactttcttaagaatttaaaggggtttttttattaatacatttttaacctttatctttaatccaggtttttttgagggttaagatattctaactggaacccataatttattaaatttcccggaagacataatttgccttgcaggtaacctttccataaaattccctcgggggggtttgcnaaacacccaacgaccacat

SEQ ID NO: 324330 - DNA, 1053 bp, Homo Sapiens
  misc_feature (139)..(147): n is a, c, g, or t
  misc_feature (420)..(420): n is a, c, g, or t
  misc_feature (996)..(996): n is a, c, g, or t
  misc_feature (1021)..(1021): n is a, c, g, or t
aatctttttttaatttggcccccagaattgaaaaggggaggagttgaaaaaaaccctttaagggggggaaattcccatatttttttgttaaaaaatggggttaaagaaaattgtttattcaaaaaatggctttctgggnnnnnnnnntggctttaggttaaactgggccaagggccaccatggggaaaaaggaaagtttcttacctgaataaataaagggaaattcccattcccattttaattttggggcacaatttattctcaagaatcaagaaccctagggtgtagccccggggccaggggagtcagggtgatgcagagaggagggtggtacctcttgtgtggaggccaaggactgcagacagttcagccacatcaggtgggttgttcatgtgaattagatggaccttgagttctctntaatgctcatgttgtattacattgaaaccctagcttcaacactttaaaaagttcttattagcaagtaaattacagattgaacttctgaattgtttgcagccattttttattccaaacatgtatgtttttgtaaacctgacatttcccaaacagtgcaagtgaatcagaagtgactgcttagactttaatacacgtgacattgtgaggcagcacaacctccccccacccaccaaaattcctcagtggaaatgtacatggatgcatcagtaaagttctggaaatgcagatagcgtgggtgcctgccaagcaattaatcactcgtaaagcttttaaactcactctgccagtcacaccgtgcacattagaattaaaacaacaacatcaacaaagaaaaaaccttaacacagtctgaaatctagatcattgtgctataaagcattgcacgatgttgggaaatttgttcactttattccccccatgtgctgaaaattcagaagacatcctagaagtttcattttgggccctactgggctctgtattctcccttcagccactctttgaatattctccactggngtatattaattattctatatatcanaatatcagctaaaagtgtggcatactaaagca

SEQ ID NO: 324331 - DNA, 735 bp, Homo Sapiens
  misc_feature (202)..(202): n is a, c, g, or t
  misc_feature (262)..(293): n is a, c, g, or t
cccgggcttaaaatttttggggatataaattgggtagagaagaacggggaatttttccaattaatttttggggccagggcttggttctttgaacctccctcccccttccaggggattccgccccgttctgggcctccccaaaagtggctaggattacaaggcgtaagccacccatgccctggccagatgatgtatttaaatnatcataccaaacttctgtgtatttatataaagagagactgttaaaagacttcataatatnnnnnnnnnnnnnnnnnnnnnnnnnnnnnnnnctttacgcttaccattgctgcatattgttgcagtataaaacacacacttatcctgggatccatgagaatacggcaagaatgtccctgcgtaaactgtaactttgaacagcatttaaaaaataaaaatcaaattaagtgcctttgaggccacttcttcccagttgccagttttcttaacccggtactaaaatactgccacacacagctgcatgtctgaggatcatatttaaatatttaaaatgcatctacagtctgtcttagttttctttatatttgggaaaaattttgaatcttaagtgtgaaaatgtaatcacaaatgtctttaccaggaataaaaacacatctagggtagccagcaaatttaaagcaaataaaatattttgtagtcacagactaatactgaggtctgtaaaaagagttgaatgaataatagacagacacc

SEQ ID NO: 324332 - DNA, 584 bp, Homo Sapiens
  misc_feature (41)..(42): n is a, c, g, or t
  misc_feature (45)..(45): n is a, c, g, or t
  misc_feature (47)..(47): n is a, c, g, or t
  misc_feature (537)..(537): n is a, c, g, or t
  misc_feature (545)..(545): n is a, c, g, or t
gcacttttgtggtagaactgattcttaaggcaggcctgaanngtntnactaatagaaacacagcctttccaatcctctggaacatattctgtctgggtttttaatgtctgtggaaaaaaactaaacaagtctctgtctcagttaagagaaatctattggtctgaaggtttctgaacctctttctggttctcagcagaagtaactgaagtagatcaggaaggggctgcctcaggaaaattcctagatcctaggaattcagtgagaccctgggaaggaccagcatgctaatcagtgtcagtgaatccacagtctttacttcctgcctcataaagggccagggtctccccagtaccaagtcctttcctcatgaagttgtgttgcctcaggctgtttagggaccattgcctgtcttggtcacatgagtctgtctccttactttagttcctggggcaatccttgcttaaatgcttttgttgattcaacaaggggcccgaggctttaggtttttctatttaagggtctctggccccagggatnggtggttntatatcttgggccaaataaatttatttttccctggatgg

SEQ ID NO: 324333 - DNA, 1526 bp, Homo Sapiens
  misc_feature (243)..(360): n is a, c, g, or t
  misc_feature (934)..(1020): n is a, c, g, or t
  misc_feature (1253)..(1254): n is a, c, g, or t
  misc_feature (1256)..(1256): n is a, c, g, or t
aagaatgtaacagtaatattttgaattggtaagttagaactacctaatattttccaactacattatttttatgaggctcatttgtaaaatttttaataataggaataacttgcagttgaacttgattctgttcactgtcacacttctaattattcatttcttcatttatggacatatataatttatttcttggctagcttgcttacatggttaaatttttctttctacatctgcaatgtatcnnnnnnnnnnnnnnnnnnnnnnnnnnnnnnnnnnnnnnnnnnnnnnnnnnnnnnnnnnnnnnnnnnnnnnnnnnnnnnnnnnnnnnnnnnnnnnnnnnnnnnnnnnnnnnnnnnnnnnatgagctgcattgtgcttttaatgatctaaggacactgattagcttctcaactagttctctttctaaaagatcaattttatacaaataagttttctaaaatgtaaataaagtctgttttctttctccagggaattaagaacaacattgtgctgcccttattagttcctaattacagattaaaaatctgtatctttgaactctagatttacataaatcctggcttccctgcacattttgcccctgtaaattggaatacatgatgattgaaccatctgttatgagaatattacatttcctatttacacaattgtttgtgacagagtaaaaaccattttcatagtatatgttggatcactgttgtcttcatatttctaaaataaatgaattaaaaaatttaaattcttagatgcttatctctatcatagctcagaatgcaacttcaatacccccattcttttatatttccagatttcttttaattaagatataatgaacaaattaagttaaatgaagtctgtattttcatgcaaatatattagtattcattaatatacatttattctttgcaaatannnnnnnnnnnnnnnnnnnnnnnnnnnnnnnnnnnnnnnnnnnnnnnnnnnnnnnnnnnnnnnnnnnnnnnnnnnnnnnnnnnnnnngcactgtaaaataatatgtaaaggacttggaatgttaaaaataaccattcatcattttgctttatattacatctaatatttcctgaaacattttgtaatacccacatggaaagtggagaaagagaaaccttgtgctttttataaacattgcccaggagaataatggttaaacaaatctgttcaaatacatattttaattttttttacaaataaaagttttacattaacatacnnanatcacacgaccaaccccccccattaaaccttgtccggcccgcctcgggccctcgaaaaaacctttctagaaccatttcgtttggccgcgccgggccccgttaaggtaaactggaacattgggccaatacctgcttcccctagggaaaatcccgggccatggacatagtggcctgggaattctcccccaattaaaaaaaccccccgggcggggtaacccgcaagcgcttttctgaaaccaaatctccagaatggggaagtttcctcgaaga

SEQ ID NO: 324334 - DNA, 1245 bp, Homo Sapiens
  misc_feature (18)..(18): n is a, c, g, or t
  misc_feature (381)..(393): n is a, c, g, or t
  misc_feature (444)..(452): n is a, c, g, or t
  misc_feature (503)..(517): n is a, c, g, or t
  misc_feature (587)..(599): n is a, c, g, or t
  misc_feature (691)..(709): n is a, c, g, or t
  misc_feature (712)..(712): n is a, c, g, or t
  misc_feature (714)..(714): n is a, c, g, or t
  misc_feature (716)..(717): n is a, c, g, or t
  misc_feature (720)..(720): n is a, c, g, or t
  misc_feature (733)..(741): n is a, c, g, or t
  misc_feature (752)..(752): n is a, c, g, or t
tgtgggcaagattattanagtaggcatgagtcagcgatcggaggcgcccttaacagggttcgactaccggggagcgtgcaactgctatcggtttgggctttgagctatacctagagctgcggatataagcatgaatatttctcttctcttctcaattttgctggtgggtgccataggcgaagtagctcggacgcagagctgttctccgttttgtgtagcggtaggtgggctcccccgcggcggaagaaaaacaaaaataaagagccggtctgggtgcggcctggtggttttttcgttgcctcgcaccgggtcataaaaaaagagaggcagatggcctcccccctccccgcgaggataagagtggtggggttttttgttgcnnnnnnnnnnnnnaaaaaaaaacaaatcttcttcttcgtgactttgtctctacggggccgcagnnnnnnnnnacggtgggggcttgtgggtgcgcatgaaaaagggaatatagggaaggggcnnnnnnnnnnnnnnnaatggcgcaccccccggggggagggggggcggggctataaaaaggagtgggggggggggataagaggttnnnnnnnnnnnnngcccgaacagggggggcggcggcgaccccgctggcctgggtagggaaagaggaagaaaggaacaacgccggccgggtgtgttgattatagtnnnnnnnnnnnnnnnnnnnggngngnnggnggcccttcaaaannnnnnnnnaaaaaattttntagggcttaaaattctatccagtgtgggggagggggactagaaaataaaaaagtttcaaacagttccatgcaaacatcacatttttcaaatggaaaaacttccaactggaccagaagttcatactgctaatgtacttttcattgaaacaatttttagtaagtacaaatacatggcattaaggttcagaacctaatataggcctgacaatcaagtccttattttctggaggaaggcctcaagtccaataaatttccagtaacaatgtttttacaaatcaatttaataataaggggttttaatttccttcatgtttttgtttttagcattctagtcttaagactagattagaagttagctcaattccccaaaaggcaaatggtttttctttgcagtatgaaagaatccacaaaaaaacctcttccccaaactaattcctaataaccaatctgtgcttaagatgtatctttttctatacaatgtaaacggtaaccc

SEQ ID NO: 324335 - DNA, 972 bp, Homo Sapiens
  misc_feature (87)..(90): n is a, c, g, or t
  misc_feature (93)..(94): n is a, c, g, or t
  misc_feature (99)..(99): n is a, c, g, or t
  misc_feature (103)..(103): n is a, c, g, or t
  misc_feature (110)..(112): n is a, c, g, or t
  misc_feature (116)..(147): n is a, c, g, or t
  misc_feature (150)..(150): n is a, c, g, or t
  misc_feature (468)..(615): n is a, c, g, or t
taagttccctttactaaggggggcccgccgggccaaacggatggttttaaaaaggttttggggggccgaggcggcccgacatttttnnnnttnnttttntttnttttttnnnaaannnnnnnnnnnnnnnnnnnnnnnnnnnnnnnnttnttttctaacgaattacctttactagcaagaataaaactgcaagaaaattaaacgtaaaaatgtcagtcctaaatcatgcacgagtttcagaatatttgaatatttccttttggggcccaccgctgccaaggtggccgcagtttcgggtttcgccggacagggctcactaaaacgtgcctacgccccagggatggacgacttggagacaggggccgggaagcctttgtctcaggtcaccctgcgccaggtttgtcgcctaagtttatgggatggacgggagacaacatttgtaagtttagagttttgggaacgttgttnnnnnnnnnnnnnnnnnnnnnnnnnnnnnnnnnnnnnnnnnnnnnnnnnnnnnnnnnnnnnnnnnnnnnnnnnnnnnnnnnnnnnnnnnnnnnnnnnnnnnnnnnnnnnnnnnnnnnnnnnnnnnnnnnnnnnnnnnnnnnnnnnnnngcctcgctacgacaggggttccgctaccacgcgttggtcgagtgcgggtgcggaactgggatgtccgagcctcctctaccagcccatccgcaaaatgttccctgcgaaggtctggagaaacccggttccccgcgggctgggctggattcgtggcgggtacctagggtcgagctgtcaagttcaatctcaagcttccaacatttattttcctgagcgcccactatgtgtcgatccgcaaaaaacgagcaagagcaggaaccagccaacaagtggttcaagttcatcgcgctctccccggggtaactgaacactgctttagggtgtcacgcagacctggcggtgcgactttcggcgagt

SEQ ID NO: 324336 - DNA, 829 bp, Homo Sapiens
  misc_feature (32)..(33): n is a, c, g, or t
  misc_feature (49)..(49): n is a, c, g, or t
ttcacactttctcccggtttctggtggaattnnccttcccattttttcnttctccatccattagtttttgacttaaagggatggattctttctgtctttgtgccactgctggatgctcccaaaacttatgttcttaatattgtcaaaaaaaatcatcctttatcaagctgagggctttatctggcttggacttatcaactgaaattacatgtttcatgtttctgataatgatcatgaacattcagcatttcctctaatacatcagaagtgataagtttcatcacacgatcacttgggtccttaaattcttctgtaacttcagctcggtgaatttttttcttcatcctatatgacagcaatttgggcattgctgtaaagtgaaatgctctgtctagtcgtagcttcctaaaaatataagctgcatcaaaatgctgtgcatttactaaatcttgctgaaattttaaaacttcatcccaatccttcagggcaactctgatcttttgttttggttgacacagttgggtattatataatccatatagcagatacaaagcaccaactctgatctggaaggtgtatggaggtaaaaaatatcgccaagccaaagctaaagcttcttttgtaaacatgttcttttctaaatttctcattctgccacagaagatagtcccgaacttcatgtttctccagagctccgtgaagtcctcgaagcgtacactgtccgtctcctggaagcggctgagcagcgcctcgcagtcggtctgcaggccgggaggagtccccatggcacccgaagcccgcacgcctccgaagcccgcacgcctctccc

SEQ ID NO: 324337 - DNA, 1075 bp, Homo Sapiens
tgttgacctgtcactgtttattatttcagcactaaaactgaggagcctcaacatgctggctcttcttccctttgtatttgtgtaaggagcactgcactcccataaaaggttttaaaatacaaaatgtacaagaacacacaattccaagtgctgtaaacataactgagaaccagttcctttactaaacatccattttataaaacacaaggtttcaatttgagcccatctgagccttaaagatccattctgaataccaaaaacagggcttcacagccagggccagaagaggtctggtgataatggctggccctgggtggggatagtttacacccgggcagcagcaccacacatgaaccccaaagacatgttctttttaaagctgttttcagccatgttttctctgtgcatctccagtaagcagaaggctacccattccattcctcaacccaagagctagcacagttagagtaggagggggtgcgtactagcacgtgcccagttgctcagtgctgctagtagaaattgatttgcatagtccaatggatgtgtgctttaacaccactatgttgcacaaaaatttaagtctttatctacaaagccaaaaaatattgactcttaacacccaaagcttttacaaagctgatataaaactgccttacatagtatacaaagctctattttaaaatttaatgtttattttaaataggaaagcatttctagtgctacaggcatcaaggtatttagaaggcatcaaaatttggtgcatagcaactctggatcatagaggcttttaattcttgagggcacaaagggtattgcaaggggaactcttgcaataacctcatgtgaggcagctacaccaggggcaaaagggtaggggcaagtctggccatttctctggaatgtcaaccgagaggccaacttcttgcccctccaaaggaagctgtgggcgtccaaccacaggcccagaagcaaatctcactatccacattctgtgacacaactcacttttcaagaaaatttgaaaacacccagctccaagaggggccacagtgatctgctgaagaatagacct

SEQ ID NO: 324338 - DNA, 849 bp, Homo Sapiens; identical to SEQ ID NO: 150594
  misc_feature (71)..(71): n is a, c, g, or t
  misc_feature (324)..(324): n is a, c, g, or t

SEQ ID NO: 324339 - DNA, 992 bp, Homo Sapiens
tgagagtgaaaggaggaggagcctgtggtgtaatcccctgtgcgctttccgaatttttaacgcttagagtgttgcctccccgcgcgacacatatgcaccggtgggaccgctgccttgaagttcgcgttcctgttagggctctcccatcaaaatgtccggatctctgaacggaccgtcaaagggtgaccccttttcatgctgaacaggcaatccttgtgggccccgtatagggatcattacttttaagctccatcgcgtgcgccaccaccacagttagaccatagtggcactggaataatcgccatcaaatattggcatttccagatgtatccattgctagagtctttaatcttgtccttgacactaaactggatccaggctcattgaaagcgatatgaccatctggaccaattcctccgacaaaaagatctattcctccagcttcttttattttgttttcaaaagcatcacattctgcttgtaaatctgcagcattcccgtcaaggatatgtgcattattaggatctatatcgatatgcttaaaaaaattattccacatataagaatggtagctttcaggatgatttcttggaagtcctacatattcatccatattaaaggtcttcacatatttaaaagaaaggtgtccattcttatgatattctattagttttttatagcatcctaaaggtgtactccctgttggtaaacccagtgtaaaatatctgtcctgtccaggtttgaactgaatgatgcgattacagatgtatttggctgcccattcactagccaagtcatagttatcaagaattacaagcctcattacggtgacgcacagcttccagaacaagttcaaaccggcagacccaatggttcttcgacgctggaacagcgggaacaagcaacacccaaccacccgagagcgaccccagctgaccagtggagcgcggacgcgtgggtcgacgatatcccgggaattccggaccggtaca

SEQ ID NO: 324340 - DNA, 596 bp, Homo Sapiens
gcattgtacttattttgtacagttaccttttatttatagcgaaaatgggttttttcatttacagagtaacaaagatttttctttaaataaatgtatttcaacgaaaatgaactgacttaaagaaaaaatattaaggaaataatcacaaagatggtacacacggatcattaaaagatacggatgtatagatacatatgtcacaaatgattaagacttaaaaaatgtaaccctcccaagaagtgggagcctcccaaagtggagaaggcaaatacaatttccatttggggggataaggagaccgacttgcagagaggattagtaggttgccccagaacacacagcaaaggtgtggagccccttgtggtctgaaacattcaggaccctatggcaggaggtgagactgtccaattaattcagctttttttcaaggcatagacccaagactcagacaaccttcaagaaaggggagtttattttggatataaaggcaacaggaatcctgaccaaatggtcagcagccctctcagcagtaggtattttagtattgtgacccaaggccgctgcttagtggctcacgcttgtttactttccaaggc

SEQ ID NO: 324341 - DNA, 898 bp, Homo Sapiens
  misc_feature (162)..(328): n is a, c, g, or t
  misc_feature (473)..(488): n is a, c, g, or t
  misc_feature (530)..(538): n is a, c, g, or t
cgagaggcggatgcgggcgggaagaaagggggagacggtgatcagacggggcgagggagcgggggagtggcgacagagctctacgctgcgcgggcggccagtccacggccgcctaacgggtcgcgggtggggtaaggttagtgggagcgccggccgagagannnnnnnnnnnnnnnnnnnnnnnnnnnnnnnnnnnnnnnnnnnnnnnnnnnnnnnnnnnnnnnnnnnnnnnnnnnnnnnnnnnnnnnnnnnnnnnnnnnnnnnnnnnnnnnnnnnnnnnnnnnnnnnnnnnnnnnnnnnnnnnnnnnnnnnnnnnnnnnnnnnnnnntatggggaaacgaagattagggtggggtggaaagataccggtgtgcgcggaggagtatagggcacgaggagaggataaagtagagtgagtaggccggggggtgggggtatgaccaggaccggagttggggtgattgggagaaaannnnnnnnnnnnnnnnagagagcgggaaatggagatatagttgggacctcgccgtaannnnnnnnncgcgcgatcgcgcaaaggggggcgtagatccctggtgggatatgcgtaaggccccccagggcaatgtggaagatcccattcataatctggacagcccccaaagtcttagattccctcatgaagaagctttgcgtggggcccaccagtgaagacatcctcctgaagagtggttttggaccagattgcatagcaatagggcctttcattggctctgccgggaaagtctcatttactgaatttctgggtgttgtcattttgctctcaaaactcctgagtctccaaggcctcaaatctcaagggctgatttggatgctagctgcggagttcagtgggtgcagtttgtttctcaagcacactccc

SEQ ID NO: 324342 - DNA, 921 bp, Homo Sapiens
ccttgtataaattattttatttattattgtaattagatcttcacaaagttgtcttttcactgtgttttgtcaacgtgaaattaaattgtagttataagcaaaagttggttgcctagggaacaattgtatattcagtttaacagaaataaaagaatatttgtcttaagatgcaagatttgtttttacatagccttttgccatacaattataaaaatttcatttcaaaagtgaaatttttttgtgctgttttagctttaagggttggaatgtttaggtgcaacatcagctccttaaagaaaaagcaaagtgatctaggatatgtctcccttgcaagagggaattaacatttacaattaacatgaaaatcatgtatcagacttctgcaggagattcttcagcataccttatccaaaaattactcactgtcctaatgtatcattttgaagagtcctggtaagtacttctccttggcagcctcaccttcccacatcatggaagtacaggtttgcacatatacacaacatgatgatagaaaatatgatatagtaaattagctttctaaatttcggttctaagtctccttgtcgataccagtagataagtatgcaggcagtaatactactcaaagagatgcagacagcaaagaatatattcaacggttttggaggtagttgagggaaaacaaaagcacttatcagcgttactagaatcaataaggatgttaagctgccaacaactaaattgatgattcgatccttggcggacgtctccccaaacagaggtctgttgtccaggccactggtgccgtaggtcctggtagcaaagtcctccattttggggtttcttcactttccccaagccacttaaaagcaagacagcatgacctcccgaggtctcaggtccacgactgcaagcctcctc

SEQ ID NO: 324343 - DNA, 866 bp, Homo Sapiens
  misc_feature (364)..(471): n is a, c, g, or t
  misc_feature (481)..(544): n is a, c, g, or t
  misc_feature (836)..(836): n is a, c, g, or t
ttggggaagggaacagttcgggggaaagtacaaccttgctgttggctgtggctgcccactgctggcggtttcatctgtttcctgctgccgctggaatcgttggagtaaaagacttctgaaactgtttgaaatagccagataatacagccggccgaggttgagaccctgattctggttcggtttcatgcaccactggtgtggcttccttttcactgcgattgctgtcttgtctagtgaaaacgggttcctcctctttattacagctgttttcactttcttgtttttctaccatgggctctaaataggttctctgggttcaattttctcctctaatttttccctttccttctccagctcacattcnnnnnnnnnnnnnnnnnnnnnnnnnnnnnnnnnnnnnnnnnnnnnnnnnnnnnnnnnnnnnnnnnnnnnnnnnnnnnnnnnnnnnnnnnnnnnnnnnnnnnnnnnnnnctgctccttnnnnnnnnnnnnnnnnnnnnnnnnnnnnnnnnnnnnnnnnnnnnnnnnnnnnnnnnnnnnnnnnctgttcttgttctttttcaagttctttctcacgctcccgttctttttctcgctccctttccctaatttcctctggagatggttgtttttccaggatgccaagcttctcatccaatcgtttcagtttctccgcacaagctgccttcctttgttcttccattcttcgctcttcctcttcacgccgtttacgagcacgttctactgctgcagaaatttctgattgttgtcttcgtctttgcttccatatttcatcttcatcagctacttgctgcttggagggaaaggggcctggncttccaggggactgcctgtcgatctggagg

SEQ ID NO: 324344 - DNA, 920 bp, Homo Sapiens
aacctgttaaactctaaagccatagcttttgttttatattgagacatataatgtgtaaacttagttcccaaataaatcaatcctgtctttcccatcttcgatgttgctaatattaaggcttcagggctacttttatcaacatgcctgtcttcaagatcccagtttatgttctgtgtccttcctcatgatttccaaccttaatactattagtaaccacaagttcaagggtcaaagggaccctctgtgccttcttctttgttttgtgataaacataacttgccaacagtctctatgcttatttacatcttctactgttcaaactaagagatttttaaattctgaaaaactgcttacaattcatgttttctagccactccacaaaccactaaaattttagttttagcctatcactcatgtcaatcatatctatgagacaaatgtctccgatgctcttctgcgtaaattaaattgtgtactgaagggaaaagtttgatcataccaaacatttcctaaactctctagttagatatctgacttgggagtattaaaaattgggtctatgacatactgtccaaaaggaatgctgttcttaaagcattatttacagtaggaactggggagtaaatctgttccctacagtttgctgctgagctggaagctgtgggggaaggagttgacaggtgggcccagtgaacttttccagtaaatgaagcaagcactgaataaaaacctcctgaactgggaacaaagatctacaggcaagcaagatgcccacacaacaggcttattttctgtgaaggaaccaactgatctcccccacccttggattagagttcctgctctaccttacccacagataacacatgttgtttctacttgtaaatgtaaagtctttaaaataaactattacagatatttaa

SEQ ID NO: 324345 - DNA, 448 bp, Homo Sapiens
  misc_feature (421)..(421): n is a, c, g, or t
tttaagtatctgtaatagtttattttaaagactttacatttacaagtagaaacaacatgtgttatctgtgggtaaggtagagcaggaactctaatccaagggtgggggagatcagttggttccttcacagaaaataagcctgttgtgtgggcatcttgcttgcctgtagatctttgttcccagttcaggaggtttttattcagtgcttgcttcatttactgggaaaagttcactggggcccacctgtcaactccttcccccacagcttccagctcagcaggcaaactgtagggggaacaggatttactccccagttccctactggtaaataatgcttttaaggaacaggcattccttttggggacagtatggtcataggacccaatttttttaatacttcccaggtcaggatatctaactngggggagtttgggggaatgtttggggt

SEQ ID NO: 324346 - DNA, 838 bp, Homo Sapiens
  misc_feature (323)..(323): n is a, c, g, or t
tatggggaaattttctctcggaaaaatttgttcaaccatttcggttttttaaggtgggttaaaacaaaggttggggacatacaatggcccgggttcttgggttcatctttccggttccaaattagatccccatgtccccttttgcagccttaggaatctggtctacatattgaggtttgatgatggcttttaggtcatcttctagaatcttggtaaagtaattttgtaattcagatccacggaaataagtcaaaatcttcctgccagtcaggaggatcatcgtactttccaaggtttggcttttgttttcctgctaaaatttntaaagcagttgactttccaataccattagttccaactaatcccaaaacttcacctggacgagggataggcaacctgtgaagtttgaagggcattggcacaatatcgatgtgtggtttctttttccaagttgcttggtagattgacaattgataaggcgccaaaggggcatttcttaatacagataccacaaccaatacaaagagtttcggaaatccatgctattttgctctggggtgtaacctctatgcataattttcccattcgaactacaggacaactctttttgcattcctgtcgacatttcttaggtttacatttgtcatggttgacaatagcaattctcgttaacttgtctgccataactgggcgaaagaatatccagctcttctggagaaaacgatccccttgcggaggggagcacagaggccaaatcagctcttgccttcacttttcagccacacagcgtgttctcacggccaccggccaaaatggcggtgcccagccgccgcacccc

SEQ ID NO: 324347 - DNA, 1229 bp, Homo Sapiens
cgggtttccccatggggaaaagcagccaacctcccttttcaatgggcattgaaaaggaaacgggatagatttcttttcccactgggtttcccacttggggttgttacaagcttcagggatatcgataccctggcccattgcagtagtagatccatttctccccgttttgggtttggagtccatggatttcttcaggccttgcctttccacaaagggcactggattcctgccggggcccctttttcagagtcctcgagcttttccggatactgcacaccacaatcaccacaagcaccagcagcaggaaaagcacaatcatccagggcaaatgctcattgatgtcaaaatgcttgtgtaggttctgtctaggatgtcccctcttggggcccttgatgggcgtgctggacttctcgcccccagtggcctccatggacggcagcagcttcaggatgtgtctgtggtgggggccttgctggtggttgactacctgaaggtttgggagggtcttgtttcacgtcttccttccccctttgctgagcttgtgttgtcagggactggtccctttcctggatgctactcagtacctttggtctaccagaggcagaagagttggattctgttgagttcatgcctttgggaacataagtggaggaagggacttcatgggtttccatgtgctcagggcgtggaaagatggctgtgccaggggaaggtgaggtggagctggagaaggacgggagtgtgccacagacgttgtctgtctccttggtccccggcttgatcaccaccaggttctgactcagacagtctgtgtatgctttgcatttcatcacactagaaggcacatctgagaaggtaccccgagcacactgcttacaccgcacatcctcagtctctgtccctttcttccgcacaccccaacccacaggacacaccgtatggggggcacaggtagcgttagactggaacatgccaggtgggcaagtgcattctcggtcagtcaaggcagcacaaggtaatttctcaatcattggccatgggcatggctgactacagtcatggcatttctctatgccattctcatgcctggtaaaggtccccacagggcaactgctgcagacgcgcaggcttgtgttggtacaatgctcagagacataggttcctgctggacacttgtcacaggttagcacctggccggtggcacggtcaacatggcggtatgtgccacc

SEQ ID NO: 324348 - DNA, 741 bp, Homo Sapiens
ttttggtttttgtctttgtttttaatcatggtcccaaaggcagaaggcagtattttatctactaagtcccacagcttgtgagaggaaagggatgtctgtttcaggcatgttaacttccaaccaaaatctgagatcggcttttttccattgacattcttagcacagcacccaaagaagtataatctagccacagtgtggctataatgaggcacggcttattgcagctggaaatcaattatcctcacgctgaggtggggattctagtgttcctttgactctgtggatactccccaaatggtgtctgtcattcctgtgccatgacctcagcttgcatcctatcagtcttgggggaaggaaaagggagtacagactagtgttacaaggatctaaaggtacccaaggttttacacgtagtctaatatttgaggactgagggctatctaaatacctggaagcactttcttggaatgctaagacggagcagcaagattttctagcctcgggggctgggagagggaagtttggttggttggttggttattatttaccgggagttaatactgagagagtatatgcaaaggctgagggcaccatgccatcttcacagaacaagaccctaacagctacctgacatacaagaaactgcaagttatactgtaagaacacatgttaaggaccgaggaaagtctgctaaggtgctacgtctaaactaagttaacttgtcatgtttaacctccctcc

SEQ ID NO: 324349 - DNA, 523 bp, Homo Sapiens
  misc_feature (486)..(486): n is a, c, g, or t
  misc_feature (497)..(497): n is a, c, g, or t
tatcccaaacttttggtttttgtctttgtttttaatcatggtcccaaaggcagaaggcagtattttatctactaagtcacacagcttgtgagaggaaaggatgtctgtgtcaggcatgttaacttcaaacaaaatctgagatcggctttttccattgacattcttagcacagcacccaaagaagtataatctagccacagtgtgtaattaatgaggcacggcttattgcagctgggaaatcaattatcctcacggctgagggtgggggattctaggtgttcctttgactctgtgggatactccccaaatgggtgtctgtcattcctgtgccatgaccctcagcttgcatcctatcagtcttggggggaagggaaaaggggagtacaggctaggtgtttacaaggaattttaaagggtacccccaggtttttacacgtgggcttaattttttgaggacctgagggggctatctaaataccgggggangcactttcttnggggatgctaaggccgggggcagcca

SEQ ID NO: 324350 - DNA, 425 bp, Homo Sapiens
  misc_feature (12)..(12): n is a, c, g, or t
  misc_feature (21)..(21): n is a, c, g, or t
  misc_feature (45)..(45): n is a, c, g, or t
  misc_feature (65)..(65): n is a, c, g, or t
tttttccattgncattcttanacagacccaaagagataatcatanacagtgtggctataatgagnacggcttattgcagctggaaatcaattatccctcacgctgaaggtggggattcctagtgttcctttgactctgtggatactccccaaatggtgtctgtcattcctgtgccacgacctcagcttgcatcctatcagtctgctcagagtagtcattcccgtcgacatcatcactgtttgagtggcctcctggactctgcacatctatcccatgactctccaggattgctgcttcaatattggctctcctcttgatctccttccttctgttagcaaaccaattatatactttcagggaggtaactctttccagatctgacagctttttgcctggcttctgtataactgcattgcaagcgtttg

SEQ ID NO: 324351 - DNA, 447 bp, Homo Sapiens
aatgacttttggtttttgtctttgtttttaatcatggtcccaaaggcagaaggcagtattttatctactaaggtcacacagcttgtgagaggaaaggatgtctgtgtcaggcatgttaacttcaaacaaaatctgagatcggctttttccattgacattcttagcacagcacccaaagaagtataatctagccacagtgtgttattaatggaggcacggcttattgcagctggaaatcaattatcctcacgctgaggtggggattctagtgttcctttgactctgtggatactccccaaatgggtgtctgtcattcctgtgccacggacctcagcttgcatcctatcagtctggctcagagtaggtcattcccgtcgacatcatcactgtttgaagtgggcctcctggactctgcacatctatcccatgactctccaggattgctgc

SEQ ID NO: 324352 - DNA, 1046 bp, Homo Sapiens
  misc_feature (144)..(144): n is a, c, g, or t
  misc_feature (432)..(432): n is a, c, g, or t
atctactaagtcacacagcttgtgagaggaaaggatgtctgtgtcaggcatgttaacttcaaacaaaatctgagatcggctttttccattgacattcttagcacagcacccaaagaagtataatctagccacagtgtcgtattnaatgaggcacggcttattgcagctggaaatcaattatcctcacgctgaggtgggggattctagtgttcctttgactctgtgggatactccccaaatgggtgtctgtcattcctgtgccatgacctcagcttgcatcctatcagtcttgggggaagggaaaaggggagtacagactagtgttacaagaatctaaagggaacactaggaatcctcacgctgaggtggggattctagtgttcctttgactctgtggatactccccaaatggtgtctgtcattcctgtgccnatgacctcagcttgcatcctatccagtcttggggaaggaaaaaggaattacagactaatgttaacaagaatctaaaggtaccccaagattttaacacgtagtcctaatatttgagaactgagggctatctaaatacctggaagcactttcttggaatgctaagacggagcagcaagattttctagcctcgggggctgggagagggaagtttggttggttggttggtttattatttactgggagttaatactgagagagtatatgcaaaggctgagggcaccatgccatcttcacagaacaagaccctaacagctacctgacatacaagaaactgcaagttatactgtaagaacacatgttaaggaccgaggaaagtctgctaaggtgctacgtctaaactaagttaacttgtcatgtttaacctccctgatcagtcatcatccagggcctctgtcttgatttcgttggctccttgtcgggccaatgccaagatagtgtggttgactgctgccatttccacagctaatgagatggggtcttggtggtcactatggctcgtactgtcatcctgctcagagtagtcattcccgtcgacatcatcactgtttgagtgg

SEQ ID NO: 324353 - DNA, 626 bp, Homo Sapiens
  misc_feature (105)..(113): n is a, c, g, or t
  misc_feature (159)..(272): n is a, c, g, or t
gtgggggggaatcccagcccccttttttatgtccccggggttttctctgggggaaacagcctttggccccagtttccctttcccccaggggcggccccccgcccnnnnnnnnngggtttataaaaaatttttttggggggcgaggggggcccccccaannnnnnnnnnnnnnnnnnnnnnnnnnnnnnnnnnnnnnnnnnnnnnnnnnnnnnnnnnnnnnnnnnnnnnnnnnnnnnnnnnnnnnnnnnnnnnnnnnnnnnnnnnnnnnnnnntagatattaaaattagtttatttttctacttaacttttaataaatgagaagaaacacagtagtctgtctcatatagaacatttataatacataacaatccataaagcctcatggtgaggtaggaacagctttggaaaataacacacagtcatgaaaacatacaaaaagttaggtaaaatgttgcagcactaaagatattttatctgcatctgtatttaatgagatgataactgcatttaactgggccacatctggcccaaaggacaggcaacagaagacacaaaacaacacaacatataagtttcataatcacagaatatactgatacacttcattgtgctgtttcaaggcacc

SEQ ID NO: 324354 - DNA, 479 bp, Homo Sapiens
ccagcattttttggctattttatttctagcccttggaagcttgtttcaagaaaaagacaccatatcataaacatcagatatcagttcactgacatgaaattattaacaatacaactctcaaatggaatctcaagtacttccagtaaacattcagttaagattttgacaaatattttcatcctgcagtctgtctcatactgtcaaaaaaatgtctgactataacgtaatagaactgaggttctaagtaccacacaagcccaggaacacacagctgagtgtcgctccctttcacgcagccaccactgaaaagcacagtgcttttacccccagacatcttgtaaactcctatttagggacactcgctcgagaggaaccagctgcacggcccacttgtagtcaaaggcagcgcaggttgggtcctgttgtcactgaattctcaggggctcagcccccagagcttttataaagggatctctaaa

SEQ ID NO: 324355 - DNA, 553 bp, Homo Sapiens
  misc_feature (62)..(356): n is a, c, g, or t
ggtataaatttgtgtctgtaacctgaatagtttgaaaacttctttaaaaatctcttgtattnnnnnnnnnnnnnnnnnnnnnnnnnnnnnnnnnnnnnnnnnnnnnnnnnnnnnnnnnnnnnnnnnnnnnnnnnnnnnnnnnnnnnnnnnnnnnnnnnnnnnnnnnnnnnnnnnnnnnnnnnnnnnnnnnnnnnnnnnnnnnnnnnnnnnnnnnnnnnnnnnnnnnnnnnnnnnnnnnnnnnnnnnnnnnnnnnnnnnnnnnnnnnnnnnnnnnnnnnnnnnnnnnnnnnnnnnnnnnnnnnnnnnnnnnnnnnnnnnnnnnnnnnnnnnnnnnnnnnnnnnnnnnnnnnnnnnnntactcttgtatctcaatatttttaaaccacaggcctaaataaaactaattttgctcaagttttctcaacctagggaaaaagaactatggttccatattcaaaataaatattatagacccttttcctaagtaggattttgtggtttactgattgggtaatttgatcattaaaattatgtgaaatctgcccgggcacac

SEQ ID NO: 324356 - DNA, 951 bp, Homo Sapiens
  misc_feature (107)..(107): n is a, c, g, or t
  misc_feature (219)..(219): n is a, c, g, or t
  misc_feature (274)..(274): n is a, c, g, or t
  misc_feature (292)..(292): n is a, c, g, or t
  misc_feature (343)..(343): n is a, c, g, or t
agccgtttctaacagtgggtacacgcgcccctctgtggtaaaccttctgccggaagaaaaaaagggtggttccgacaccgccgcggctctccgagggtcccgaggcnaccggccttctaaccgcggagaggtcccacaatagtcgcccgtgttcccgccgttaaccgcgctgcaggtaatacccacaaggataattccgccctattagacctttttctntttttttggtaaacgctcatatgcatactagcttaaaaaaaagtttatcggccantacgttgacggttatacntttagagcattagctaggatacacactgaagcacttggtcaaaccaataantatcgtaaatacgctctctcaattagcagagaaacagtgaatccgtaaatcagagacacacatcacttcacaagcatggccagccagcacaactacccccaaaacgaacaaaacaagagacagcagtttcagtttacatccttggaaagatcaggagctttggaaaacgcgtggtaaacatgtctgtttctccttctacctccactcaacctgagctgcacccggacactttaaaggaggcatgtgtccagaggctgcatccagggatgcccagagggagcctgccctgctaaggcctccctctcaagagggcgcatccccaggcagaggagactggcctgggttatcgttacctccacggcccagtagagtgtggaaaaacatgaggtgcccacagacaatggctgccagcgagtaaagggaaagaaaccctgaggtaccatgattcttttctcttacttcctcaaatgctactgatctctccccaagtacaggctcaacagaaaaatacagtggtttgaggaccccaagaagtcagcacacaggccaggggccagctccaggctgggtctgtctctcccaccttgggaaacccagcgctaaaacaa

SEQ ID NO: 324357 - DNA, 943 bp, Homo Sapiens
atgcactcgaaaactactattctagaacatgaggcttcttcagcaacttgtgcactctgccattaataaattaaatttttcccctctagaaagccttaactatggcggaaactttttaaccttttatattttaataaataaaacattgtagtcccatttcttagtgtttgaaaggtgtgtcagtgagtcggccatgtctccatgtgtttcagacctgttcatcttattttatgatggtatatttcataagtaatattcccttacatgcaatggagctgattaaaattaatccatttcaatttctccatattggaacttcctcagctaccagatttctggtttggagaagtgctggaaagatttcaaagcctattcagttgtgtatgtggggatacgacagcaactgtgataccttgtagaatatgagtgatatgcaagctgtgttttttaattgttttaaaatgtaaattatggttatgctaaagtgaaaacctagaggaagctaatgattttatatactttgcacgaccaaatatggtcgtagtatgacgagttttatacattgccagagagttctgcctcctctgaaataacattcgcactgtagattgcatttcggcttttcctcctttcacattcttttttgctttacacttcacgtcttcgcacctgccctacctcccatcctttcaaagaggtttctttcacgttccagaattcagattgtcctgtgatttctttttacatcagtctacccatttctgcaggcagcccttgaagccctttgtgttgattccaaagtgtttggcaaagaaattgccagttggaacccctgggtagtggggggtggttccttcaaaaaaacccggggggaaccccctttccacaaaggttttcaggggaatggaaaaagggctttaggaaaaaaaccccccatttttcc

SEQ ID NO: 324358 - DNA, 544 bp, Homo Sapiens
ttgttttttcttcgccgcttctcgtttttctttgtgaacaggactgttttcaccattgtagaaaacatctactttctcttgtaggattttccgagctagctttctgttctgatcaactgatcttgtctgatggcactttacaacgatgcctgaggggatgtgcttcagcaccacgcagttgctggttttgttggttgcctggccccctggaccgtgtcctttcacaaactgctcttcgagttcattctcatccaaggaaagcagtgcagggtagtccttcttgcctgccatctggaccggagtgacagctattcctggggataacaacgtcagcttctcccaaagccggagtccccatggcgccgggcatattcgggtcagtggtgtaggaaaatgaaataaacccacggtgctcataaggaacgtggctctgctggctgaggacctggtctcaggacccgactcgtgccctcaacgttctagggatatccaaatcacctcagcggaggattcgcaatcgcgatccctgatctgcgcacgcccc

SEQ ID NO: 324359 - DNA, 1342 bp, Homo Sapiens
  misc_feature (510)..(510): n is a, c, g, or t
  misc_feature (535)..(619): n is a, c, g, or t
  misc_feature (623)..(624): n is a, c, g, or t
  misc_feature (628)..(695): n is a, c, g, or t
  misc_feature (1139)..(1139): n is a, c, g, or t
  misc_feature (1184)..(1184): n is a, c, g, or t
  misc_feature (1322)..(1322): n is a, c, g, or t
gtggttgaattaatataaaggtcgtttctaccgggtaggtagtgtgcacgcacaacccgcgtgttgtaggtcttgtcacgggtagggtagtcgatatggcctcgtggggggcagagacgggcgcccctcgggaggtggtagtaacgctattttgccggagcacgcgaggagaaggggatgatgcgaagggattttgctcacacctatcacctcggaggagaaggggtagatctgcgcatcgtgtagtttagtcgtcttgagccgaggtattgatgttggagacacgatgggacgggagggtgttgggaggagcgccggagaggggggtgacgcgggcgcgccggcacgtagtaaacgagcgctttcttttcttatgggtatatgttagctagccggcgtgtccgcggagaacggagagaaaagaggtgagggcggcgggcgcagaaaagaaaaattccagagcagggccgcttgtgggtcacggaaagtcaccaagatccacccttccanctcttgcccctgctctcttcaccgnnnnnnnnnnnnnnnnnnnnnnnnnnnnnnnnnnnnnnnnnnnnnnnnnnnnnnnnnnnnnnnnnnnnnnnnnnnnnnnnnnnnncttnnttcnnnnnnnnnnnnnnnnnnnnnnnnnnnnnnnnnnnnnnnnnnnnnnnnnnnnnnnnnnnnnnnnnnnngtagaaatttcactgtatttttataaacttgaagttatctgtaacactgtttattgatcaaacgaaggacttgctgctatctaaaatttcataaacaccattaaaaattcaaaattgatattatactgaaccttaaattttcaatagttcaaagagacagtttttacatgtatagcacacaatagatgaaacttaatagcagacatctctagaataccaatgacaagtccaccaagatgcatacaaaattacagataagcatttctttcactgtttttgttgtgcagggaaaaacatttatagaagaaatagaaactcagctggtgaatttcagatatcatcatcatcttcttcatctgagaaagatccccgctgattagatgcactggctgaagcagcagcagctgggcctttgtgggcagcttgctgcatttgaagcatttnctgtggggcaatcggccttgtttgctgctagcctttgcaatattnctggtgggctgtctcataactcttctcaagatgcccaagggttttccaacgagacttgcctttcttcttttaatgcttaccgggttacactcttgcagaacctttttactacctggatggtagaaacccaatcccacnttttataggcttggtataca

SEQ ID NO: 324360 - DNA, 474 bp, Homo Sapiens
aaaagtactctaagcagaaggttctaacgtttttattgattagatttgtgtacagtggtaatccttccatcatacaggtaatatataataacattcaaaaatctgacattaaaataacttattgactaatgctaatattaacacacaatagttctatctctattaataataaaaaccaaaccactgagtttatcttagaaaacttaaattcaggccattattttacaatttggaagtctgagtaatccaacttcaagatgactttttcattgttgaagtttgctttgtcgatgtgtgatttaggacttcctcttgtttcaagccattcctgcatatgacgcaccttggagatgggaccttgcaattgtccttgcactgtgccccggtcagtgttctggacccagcctaccaatcccagctttttaccctcagccctccttgtcttccccaccggctgccaggatcactccggga

SEQ ID NO: 324361 - DNA, 223 bp, Homo Sapiens
  misc_feature (114)..(136): n is a, c, g, or t
ggttttttacaagattcatttgttaactatgatacagatcacataagggcttttgttttttacaccattcccattgagacaagtacaatactttgtagcaaatacatgattttnnnnnnnnnnnnnnnnnnnnnnnacctcagtcagagatgcctcagccttcattgagggctgaccatgcactaatcaggttggagcctcaaaaaacccacgatgtgttttt

SEQ ID NO: 324362 - DNA, 1106 bp, Homo Sapiens
  misc_feature (1015)..(1015): n is a, c, g, or t
ctttagtgaaggctgaatgaggactttggaatccagacttcccccaccgcgggtctgagaagcaggtttttgtaagattgtgcttgctgtattcctcactttcctggtaagagacactggttatgcctctggacccctttcttccgccctggggtcttgagatacccagaaaaagagtgagtttatcagcatattacttaagctgggaaatactgctgtaggttcctttgctgcatccatttggctgtaactttcagctatacaacccaatctatcatcagtgtcagggaaaatatgggggatgatgcattacagcatgtgacccctggagggcactgagagcctactctgtagaaaatttttgcacaacctctttaggttatggtttaggaacctcacatcctatacagccagaggtaagtggcattctcagtgggagaatgatacagatttctcttccattcactgattgagaactgcagtgacaaagctgttttggattcctctaggatctgagtgtggctctatacaaacacttcctctccctacctgacggggaaacctgctcagatgcctcaagagaattccgtctcctctgctgcgacatagatccagtcctggtgaagcgagccgaaaaagaatgtccttttcctgatgccttgacttttatcaccctggacttcatgaatcaaaggacccggaaggttctcttgagctctttcttaagccaatttggacgttcagtttttgacattggcttctgcatgtcaataaccatgtggattcatctgaatcatggagaccatggcctatgggagttcctggcccatctttcctccctctgccactacctccttgtggagccccaaccctggaagtgttaccgggcagctgcaaggcgtctccgaaagctgggactccatgattttgaccacttccactcccttgccatccgaggtgacatgcccaatcagattgtgcagatcttgacccaggatcatggcatggaattaantatgttgctttggcaacaccagttgggacagaagccttctgctcttcagggcaaaacaaaccatagagactcatccaatccctgaatcact

SEQ ID NO: 324363 - DNA, 859 bp, Homo Sapiens
  misc_feature (411)..(607): n is a, c, g, or t
gcgtgccacaaaaatgattttatgttgaaccagaaaggaacagcaatcaagacaatagtcagggccgagggttggcagtgtgacttaagtaccggggattgaatttgtccaggtgcaaggagtgacataaagagaatcaatttttcatgtccaagccaagctgatacagatgatgatacttatcagtgattcccatttacacaggcttggattgcttttcagatatcagatttttggaactattttataaatattttaaaggtgatggagccactggagtgtaggtgaattggtgcccctccccttttcttttgggcgtatcaagcatataatcaatgacaggaaaagtgaaaggtttttatgagagttttgcattaaaagaaaaccaacgatcaagtttctacactgcannnnnnnnnnnnnnnnnnnnnnnnnnnnnnnnnnnnnnnnnnnnnnnnnnnnnnnnnnnnnnnnnnnnnnnnnnnnnnnnnnnnnnnnnnnnnnnnnnnnnnnnnnnnnnnnnnnnnnnnnnnnnnnnnnnnnnnnnnnnnnnnnnnnnnnnnnnnnnnnnnnnnnnnnnnnnnnnnnnnnnnnnnnnnnnnnnnnnttttcaaaaacatcctcctgcccccatcattgtcttggtgtgctttttaccattttattaagatagaccagatagtcaacttcccaacaccaaatgcacatgtatgccagcatatatgcgtgtctctttgcaggtatctgcatgttcctggagctgagatggaattccacggtcactggaggacgttagttcagttcctcagcaagtttaaggtcaatatatcagtaccgtaataaaaaagcctgtctgtcc

SEQ ID NO: 324364 - DNA, 753 bp, Homo Sapiens
ccccaaccccggggaatttatatgacaaactatcagtgtcaggatggcagagggaaagagaaagaagaggaaggccaaagacatggggagtgaataaaaagtgggttccggatcgtgcggaacagtccacagggtcatgtacaggtcctcaggagatgaccagtccctttggcatgcaggtccagtgcctggtcttctggtctgcctgctcagacacccaagggcagagagagctggccacaagtaaacctgccaatgacaaactcaggacttaacagaaagacttagttcagttccttggctttgtgctcaggcatcacatagcaggcagcctgcagcctttcttgcctgagagaagagtccagaagagcaggagagtcacctttgaacacactctggcatcacagcagtgaactgcaagcagccactggctcgtgtgcagatgtggccctcaccacccatgcaggcatctgtccggacatccccagtcaatctggccaaaggatgggacatgacagtccctttctagccacagcttcatagtgttgtccattctccagtcttgctcaaactatctatcaccttaaaggttggaagagattggaatccatttccttttcagctcagcaggggacactgattcccaagaagcaagtaacttaacaaggacaggttgggcatctggatctacactgaaggtctttcaagtttcatccactttatgcccagatctcagggcagaaaattcagcca

SEQ ID NO: 324365 - DNA, 877 bp, Homo Sapiens
  misc_feature (13)..(13): n is a, c, g, or t
  misc_feature (263)..(367): n is a, c, g, or t
  misc_feature (650)..(809): n is a, c, g, or t
  misc_feature (822)..(837): n is a, c, g, or t
cttcggcacagtnctattttctatccatcagccatccattcattcatatccatccatccatctatccatccagatgtttattgagcacctgtgttctgggtcctatttgggagccttgttaaccaccaagaccttcctaagccatattgtggtatacagacagatgcaaaaaaaagggctctctccctgtctgatctcatgcagcctgccttggagacaagactctcccagtgctgtgtgcttggagagaggaaagcacacannnnnnnnnnnnnnnnnnnnnnnnnnnnnnnnnnnnnnnnnnnnnnnnnnnnnnnnnnnnnnnnnnnnnnnnnnnnnnnnnnnnnnnnnnnnnnnnnnnnnnnnnggtgtgagcagcgtttccctgggggatgtgatgcagcccacttggggcctcatgcactcagcatctctttattagcaaacacttattgaacccctagtacatgccaggcactgttatgaggtcccggggatactttataacaaaagggacagaatcattcctgctcttgtgaagtttacattgactagatagtaaacaaaataaatgaaaatatgcagtgtgtcagtgctggtaaacccgtggagaaaataaagcaaggttggggtctggggttgggaattgnnnnnnnnnnnnnnnnnnnnnnnnnnnnnnnnnnnnnnnnnnnnnnnnnnnnnnnnnnnnnnnnnnnnnnnnnnnnnnnnnnnnnnnnnnnnnnnnnnnnnnnnnnnnnnnnnnnnnnnnnnnnnnnnnnnnnnnnnnnnnnnnnnnnnnnnnnnnnnnntccttaattttgnnnnnnnnnnnnnnnnaaaaaatttttaaaacccttttttgggggcccgccccccc

SEQ ID NO: 324366 - DNA, 525 bp, Homo Sapiens
  misc_feature (81)..(152): n is a, c, g, or t
  misc_feature (291)..(291): n is a, c, g, or t
  misc_feature (410)..(418): n is a, c, g, or t
  misc_feature (424)..(424): n is a, c, g, or t
  misc_feature (453)..(453): n is a, c, g, or t
  misc_feature (467)..(467): n is a, c, g, or t
  misc_feature (477)..(477): n is a, c, g, or t
  misc_feature (494)..(494): n is a, c, g, or t
  misc_feature (515)..(515): n is a, c, g, or t
atatttcatttattttgtttactatctagtcaatgtaaacttcacaagagcaggaatgcttctgtcccttttgttataaannnnnnnnnnnnnnnnnnnnnnnnnnnnnnnnnnnnnnnnnnnnnnnnnnnnnnnnnnnnnnnnnnnnnnnnctgagtgcatgaggccccaagtggcctgcatcacatcccccagggaaacgctgctcacaccattaccccatttcacagatgaggtaatcgaggctcagagaggagtccatagctagctaataagaggtgggagacaganttgaaacccagggtctctgactccaggggctgtgtgctttcctctctccaagcacacagcactggggagagtcttgtctccaaggcaggctgcatgagatcagacagggacgagagccnnnnnnnnngtatcntgtcctgtataccacaatatggcttaggnaggtcttggtgggnaacaaggttnccaaatagggcccagancacaggtcttcaaataaccanctgggtgggt

SEQ ID NO: 324367 - DNA, 1000 bp, Homo Sapiens
  misc_feature (98)..(98): n is a, c, g, or t
  misc_feature (204)..(213): n is a, c, g, or t
  misc_feature (267)..(269): n is a, c, g, or t
  misc_feature (274)..(275): n is a, c, g, or t
acagcgctcgctggcccggcggcggcgaggggctcggggaaacgggcccggcgaacgccacctgccgggcggcccacgccaagtccgcgtgcgcccgngcgccggcactggccgtagggcgaccgatgcgaagcgaccacgtcagggacccagaaccggccgacgacgcacgctaggaccgcgttccgcttcccccttgggggnnnnnnnnnnaagcgaacggtgttagaaagctttccgagggcccgagcgcggcccgcccagcgnnncccanntctttgcttttttattttctagaggggaattatatttattcacacaaccaaaacatcagacagactcagcagcagtggggagggagggtgggcagggctgaaggtccattcacagcccgtaaacccctcagtctcagggatcgggggtgctggtagtgggactgggagaatagtcttaatctctcaggtgcccacccaccttcccttcttactgggaggaagggtagagctgtctctcaggttataacctctcaggtggaggcctgagccctcagaccctactgcctagtagcttgacaactggtggtgtccccacaagttagggaaaagactcccagccactccttgagatgggtgcctgggatcccccttactgcctcaagctcccatggacctgtgggcggggagttaaatccctgttccatctcgcctgttcccagagtttgaggactttcaccctgtccagttcccagggaaggtgatgtgggagatgaatattgagatttgtgccgtgtctttcagtctctggtacccctgccaagcaagagttgagggcatgcaatgggctgcccagctttgagaccagtggcaaggaagggctggttggggctcaagtctcagcaggtgtgtgtgggggggcgggacctttgcttctccattcgacccccaccctgaactctcagcagcaactccaggagctcttgccccccctgagggaaggaggc

SEQ ID NO: 324368 - DNA, 775 bp, Homo Sapiens
aggaaccttccctgccatttcttgttctaggacaaacgccttttcttactttctgccattaaggacccattgatggttatgggtatttctgccaatacggattttatcccacaggatcactggtcatcaaaaggtaacaaagccaaagcctcttttctttccagactgcctatcagtaattatctcaatggtatcaatttttccatattcctcaaagtaatctctaaggtgatgtccttcagtatcttctttaattccgccaacaaacagcttcttcacagttacatgagcccctggttttccagattcctctcttgctacagcacgttttggctcaactactctcccatcaattgaatgaggtcttgcagccatggcagcatcaacctcagccatggatgaaaaagttacaaaaccaaatcctcttgatcttttgcttgcaggatccctcattaccacacagtctgtaagctttccccattgttcgtagtagttcctcaaactttcttctgtggtttcaaagcttaagccaccaataaagagcttacggaactgttccttttctctctccatcgcggactcagtcgcttcagcccgatttcccgcagccgagcgagatgagagagatctccgcggacgaacacgaaccggactcgtcctggcgctgtagtgagaactgccgctgctcgagaaacaactctgcgaggagcacctccgcacgggacccggcgctgctgctactgccgctagagccgctgccgccgcttttttcccc

SEQ ID NO: 324369 - DNA, 902 bp, Homo Sapiens
  misc_feature (25)..(25): n is a, c, g, or t
  misc_feature (33)..(33): n is a, c, g, or t
  misc_feature (44)..(44): n is a, c, g, or t
  misc_feature (66)..(66): n is a, c, g, or t
  misc_feature (111)..(111): n is a, c, g, or t
aaatggccccagatcttcgttgggncccactantggtaaaatancttatcatcacagggtacagcnggtgacaggtcctgctggcttaataggtcctattcggtcttcctntcagtggcatttctacttctccattggaacaccaatgaaactattacttcggaactggatttctgataatccagtatttacattagaaatgtttttcaatttttataccactgaaaggcttcattatttattgtttgtgatttcctgtcataaaaataatcagggaatagatgtttggctttctctttttccacgtttttgattattataatctacagatccttgaggaagtggattttcttttgcctctgcaaaggagggaccttttcctgatctgctttgcatagagttatctctttttttaaaagcaccatcactatgctgagaacctaaaggatatgaagtatctttagttctgtcatatctagaatacggtctatcacatttgattctgtcttcagcccatacttcagatactgaagaagtacttggtctttcagaacctctatttctaggtaatccactgccttctaaaactgactttgaattttgggagtctctttgaaaacgaggcggtttttcatttcttggctgcctggtatcatttcgaggaggatgtctcagatgattatcttttactccattttgctcagtatttgatgatctgtattgtccctgatgaagctgctgtggctgtgatttaggttcttccacattcaaagttcccattttagattccaagaaatcaaataatgtgcttggtgctgatggccttgcatttcccaggtcctcttcatcttcagatcttattcgccccctgccttttcctctacctctcagaggaggacccc

SEQ ID NO: 324370 - DNA, 507 bp, Homo Sapiens
acaagtttttttagatccagtaatgtcctcagatcaaaggttacttgtttcttattgctaaaagtaatacatcattcttgccaacagaatgattgggaggattttcagtaaaggtccaggtcagaagtcatttagacagggtcccccagtctctgtcagaaccatggtactctgttgtggtgtgaaagtagccacagatcatctgtagattaaggggtgtggctttgttccaataaagctttatttacaaacacaggctgtgggctggctttggcctgcaggctgtagtttgtgatccttgattcagacagtttagcaaggctgaaaagaacacccacacccccttgttacccacagatgggtgggactgtgttggccagaggccgagaggagggtgctcacaggggaacgtacagcatgtagaggccggaaggtgctccagggcaccaagtgtgggaaagtgggacatacggggaagtttccagaaagcatgatgtcacgttggag

SEQ ID NO: 324371 - DNA, 502 bp, Homo Sapiens
ccatcagtcaatcagcaagcatttattgagcacttgttgtattctcagagctccacttggctgtggagagatagcccatgatttaagcccaagttcttacttctacagagctaacttgtgcagagtactggctagaagtgcagtcataaaggagcagtggaaggcattggtctgaactatcacattcattctggccatctggacattggacatgatgcttctgattgtcagacactcatgctccagctccagggatctcccgagggacctgcagggacaaatttcaccacccttcagctccttgggacggcttcttctggaatgacggctattcaaaatcacagtctagctggtcactggtgattggccctgttaggacagccaaggtgaactcaaggccatgaagcgtgtggctgaagggagtgaagaacaggaaggccaggtggacatcagggccctagtagaccaacaggcccacagtgccctggaagctgaggctccc

SEQ ID NO: 324372 - DNA, 1007 bp, Homo Sapiens
ttaaaaggggattccccttcaatcccccttattggctccccatgtcatccaacggtaggggacttttggctccccacaatcccccccggaagcattctttctggggggcacagtaggttttgtccaggtgagtctttccatcactgtccaccatgcaccattcacaatccagcaccccaaaacagtccccactttccagcctctgactgcacctgctgttgacacactggtgaagagcatcttgcaggccagggtcaatagctgtgtatgtcaccggctcctggtggacctcgcagctggggtttcggttctctgcattggtgaggttgccagtgcactcattgacctctagagggcactcacaaggacattcacattcattttgttccattcggtgacagttgagacagagtcggtccaccatgctgcaggcacagaaggcaagagagtcgcaggtttcgttgacaatgccaacaaacgcgttggttcctgggatccttgctaatctgtatttggaacagtggctgccatgcacaaggttcgtcaaatcccccgcaaggctggtgttgaatttataaaacctctggaccgttctgtcactgaagctgttgcacaggtttttctttacaaagttggggtggttgaggatatcatttgctaccaggggctccttgtgggtgatgtgctgctgctccacaggtgcatgtcctttggggtcgatgagagtcgggtgcgccaccagataacccctgtcctccattatgaagcaccttattttgttgccaccatcttggttacagacaggtaataggtccatcagaactttgtagaagtatctgagtgtgaagtcaatgcccatcacagccacagtgtgcccagaagacagctgtgtactggatgaatgaattgtgtgactgattgtcacaacataaccagctcctccaacatctaagtaaggaccagtcaaagaaatcaaccctggattagctactgcatggagataccat

SEQ ID NO: 324373 - DNA, 1286 bp, Homo Sapiens
  misc_feature (52)..(111): n is a, c, g, or t
ccggggatggtggtgtgcgcctgtagtcccagctattcgggaggcttgagcnnnnnnnnnnnnnnnnnnnnnnnnnnnnnnnnnnnnnnnnnnnnnnnnnnnnnnnnnnnngagtgagatcctgtctcaaagaacatacagacatttaaaagggaatgtttacctaatgggtgaatgacaccatcagtaatgaaaaatgttattgaccatacaacacacaaaagtgttttgaaacactagaattctaaatgagtggcctgttctggggctgccgctcctgtcctgagcattactatctcttctgagttttctgtgatcaagaagccctcaatatttcctgcttcaatttcccatatgaaatcaagtggtacctgatttttaaaaaattcaacccagaattcaagttttggactccagtatgacaggagtgttgtcacggctgcaggccattggtccgtggcctgtgggaccaagcctctggttctgatgctctgtcagataagaaattccttagaatccagtaatttaaataacaatacaagtcctataatagtgcaattttggcaagagcaaagaatatcgatggccttttaaaggtcaggcagtgaaaaaaccattggacaaagtgtggactgttgctttgacatagtactagcactatgatgtctcccagaaggaggctggtcgtgtgtccacctcatcatcagcgttatcttctgatgacaacagagaaggatacggagcgacacattttacgttcacataagtagcgttcacatggacatagtgctccccaatgaaagtagagaagatcgctgatatccgggacaccagttcagaaaaggatgggcgcatttcggctttagggtgccagcattttagcattacttcatataaggggtctgggcagtattcgggttgtaggagtcttctcccttgcaacaagtaaacagttatatcaaaggtgtttacgtcaggataaggtggggctcctcttgtcatcagctcccagaggagcacgccaaaggaccacacatctgacttggtggtaaacttttgagtttgcagactttccaaagccatccacttcactggcagctttgcacctgttttgttgtgtacactatagtattctttatcatacatgtctctggcaagaccaaaatcagcaaccttgactgtgaatttttcatccagcatacagtttcttgcagccaagtctctgtggacaaactttttgcttgcaagatatttcatgcctttggctacttgaagaccaaagcccc

SEQ ID NO: 324374 - DNA, 488 bp, Homo Sapiens; identical to SEQ ID NO: 246340

SEQ ID NO: 324375 - DNA, 779 bp, Homo Sapiens
  misc_feature (135)..(135): n is a, c, g, or t
ggaaaatcctggttgaaagcaaaaaggggtggctccctgtggttggtgcaaggtccgtgctttgctgcatggggcatggctgggcttggtcaggcccaacccatatccctgtatttgctttgcagttaaatcctnggtccctcggaagacataacttttggagattccttcacagcttagctcatgaacctgcaccatccttccaaatgtgatcagacccaccagagcatctggaggaagaagactcagggacatctgcagggactctttgagtgcttgaaggtcatcttcctccaggcatgtgtcaaccacatagagaaagatcagaggggactgagcacctcgctgtatcacgtactcaattgtagaaaactggggcatcaattcggcaggttgattcacctcagatatgcctccataagctggaggaaactgatttctttgaaaacagaaattacaggcccaaagttttgctcgataatcaacctgacaaagtgggttgagaacagctttacaagttggcctgctgcaaagcacaggttcatattgtacaggaggtaggtctggacgttctttcaaaggagtaaggagacaagccaggggtacaaccattcttgtagcctccagccggctggaaggccacacgttccaactaaaacgcacaccatcccgttcttcattctgctggatgaactccaggtatgtcgccatagtctaaaagggaactggccggagccgctcacctagctagagccgtcctcacccacagctgcaacccc

SEQ ID NO: 324376 - DNA, 1466 bp, Homo Sapiens
  misc_feature (158)..(165): n is a, c, g, or t
  misc_feature (167)..(170): n is a, c, g, or t
  misc_feature (175)..(178): n is a, c, g, or t
  misc_feature (182)..(185): n is a, c, g, or t
  misc_feature (225)..(225): n is a, c, g, or t
  misc_feature (540)..(552): n is a, c, g, or t
  misc_feature (813)..(813): n is a, c, g, or t
ttgccaaagccctttagtttcattggcccaaggattcttccttggggaaaacccagctaatggccccatgtttcactttacctttctgggggccccgcgcggcccaaacgaaatggtctaagaaagcttcttcgaggggccgaggcgggccgacaagnnnnnnnntnnnnggggnnnngggnnnnttacgaaatcagtagctttattatataggtatatgacttntacgagaagttaaagagtttccatctgaaggacagaaattgttaagaggtaacgtacagacctcaggcaccacatcatttaccctccaataatgaacaacatttctccctaaattcttattgcaccttaacctctccagcatcaaatcttctactctataacctctctttaaacacctccctctaatctcaatttccttctgtttttattatttggcaaaattacgcttaaaaaaataaatatttccatcatggcatatatatacctatgtaacaaacctgcacattcggcacatgtatcctgaaacttaaagtnnnnnnnnnnnnnttatgtaattaaaccagaggataaaataaataaaactcaagttaatttgccacgtagagctgtatggaagtgaggaaggtgctcttacataaacaccctccggcttccacactcatatgtatctgcttcctggtaagtctgaggttgggggaactgcaccttactttttcctctccctatatccccttagtgcggcaatatcagaacccaaggggaggaaaagctggcaaagttgtcatgtgccaagcggccaatccctcntgaaatgaaggtaggtccactcggtctctcctaagcagaagaggatgtccaggaaataaaattaaaaagccattgaagatccaacaaaccgcagccttggggtgctgatggagtgcgtgggatgagaaaggaattaagtagcagcattcagaagcgtcctgggttcatcctgatgaggtctctcccttgttgagggagaggtggctttcccatgccgggagggaggtggaaggaggcacgacttagacattggtggtggtctccttagcaggctcgatgctgttcatctccatgacgccgtcctttccagatctatctgcaccgtgtgcctgcccttcaaaggcccgtgtgatatcctcaaaagtcctgccacgggtctcagggactttgaagaaggtaaaagccaagaaggtaatgaggaagccggtgaagataataaaaacgtaggctcctaaatagtgagcagcggaggggaagagcaatccgactaggaagttggaggtccagttggagcagccggccactgccatcgcagctgggcgggggccctggctgaagagttcggccacaataaaccagggaatggggcctggtccaatttcaaagaaggctacaaagaccaagatagccccaatacagacaaagctcatccc

SEQ ID NO: 324377 - DNA, 977 bp, Homo Sapiens
  misc_feature (247)..(263): n is a, c, g, or t
  misc_feature (306)..(425): n is a, c, g, or t
  misc_feature (529)..(609): n is a, c, g, or t
caagcgagtcaacgacccgcgagcgaccgccccgtcactagaggggggcgggggtccagggccaccaggagctgtcgccgggtgcgcacgcgagagtcgcgggcgggacagggggggtggctaggcgctacgagcgcggagacgatgcggggagatagacgttcaggcgcgcgggcgctggagtcaagtaggcgggcgtggccgaactggggacacgtgtcagacaccggcgggtccggagtacgcnnnnnnnnnnnnnnnnncacaacggaactggcgcaccggcggaggggacgtaggggcacnnnnnnnnnnnnnnnnnnnnnnnnnnnnnnnnnnnnnnnnnnnnnnnnnnnnnnnnnnnnnnnnnnnnnnnnnnnnnnnnnnnnnnnnnnnnnnnnnnnnnnnnnnnnnnnnnnnnnnnntagacctagcggagggcgggaccgggacgaggccgggggtccgccggctttgaggaggaccatggccgggctccggcgcggacggggcggcggggacgggccannnnnnnnnnnnnnnnnnnnnnnnnnnnnnnnnnnnnnnnnnnnnnnnnnnnnnnnnnnnnnnnnnnnnnnnnnnnnnnnnccacgcacgcaaagggagtccccggccgcctttgcattgggagcctggcacctgagcattagaaggtacatttgtaaatgggagcatagttgcaaatatatcagccaagggttcttacagttgcagccatttttaattaaagtaattggtgaaggaatcccaccagggaccaaggccttgagagcagattggacctattgattatgtgtatataaaaaacaagacatcttttaaagcaaagctgggcaaattctctatggaaagggcgccactggcacttgattttgactttccaaagtgcagcaatgtgttccagaacagctcaaatcctaaaaggtgaagttcaagttctttggtggcccagttcc

SEQ ID NO: 324378 - DNA, 1008 bp, Homo Sapiens
  misc_feature (473)..(473): n is a, c, g, or t
ttggctcagccggaattcctttttcccggtggggaccatggggcaggaagcgttttctggggatttttaagggggggcccccaattttcctcaggaggacaatgttccatgcccttcagggatggcttggttcccccaaaatgggagaaaatggggcccttgaaagaggtagatgtgaaggtggcaggatcccagaggccacaagggaggcaggtattcctgtgcccctggatttaccatcgtctgggggggtaaagagggctggagagctggaaaccactgggaggcaagggttcagggctggactcagagcagtcagagctgctggatttcagggccccccaaggggaactgctccattcagttgcaaggcagcagcctgggcggcggcgggcggcagcagcagcagcagtgcttggcagttggattccagcgccttctgccagttttgccatgagctgaaaacgtccacntgctgatcccagatccagctcctggtccccatcgggaaaagtgatgtctgttccacccatccagtcgctcagtcaacatggcgacccctcataggtcgacccagcaagctcaaacccattcaactgttcccaaggcccgccgggcaacactcagaatcagagaacgtgatgaaaccataacctttagagcggcctgtatctgagtccttcatcaggacaatattatcaattttaccaaagggctcaaagatgccccggagcatgtcttcagtgatattgaagtgcagggaacccacatagaggcgcattggtccaccattgcccttttgcaggttgttggccatggctgccagtcggtttttctctgcctgtgaagcctgtacaatgataggcactcccagcaaccgctgcccagtcagcccaatggccagtggcacagactggatttcacagaattccacgtagcaatgcccttagaacgacgtgagttccgatctgagatgatacgtacatcgcgaaccttgcctacagcaga

SEQ ID NO: 324379 - DNA, 713 bp, Homo Sapiens
ttttgaatgatgatttaaaaggctttatttgcagtggaacaagcttaatgctgtattcattccaaatgaaaagaactagactgctgattgtactgtaggataaggaggaaggcagtaaagctgcagtatatccttgaagcgtgtcaaagtggtatggtaaggaaaaggagagttttatctcacaaagccataaacactaaacaacttaattttccattccagaaaatcagcagtcatcaagacagcacttggtaaaacatttaagatttgtgataataacaagtactgcagtggcacgccgtgtggttctccactttgaaaccccccattactgtgaccctgttatatgatttagctacacagcaagtggactctgaggtgacgttcttttggaccaacatcgtcttcttggaccttagtggagtgggatatgctctagagaagcagcagcccatgcactgaagtattggggcacccggctgggagaagaatgggttttcctgtagcgtgcattctgggcaatcctgcacatcaggagcggaatggagaacatgcagaaacaccgacaatgtgaccagaaagatagctgcatattttctgtagtaatccatggcgctcctttctctgggctttttgcaggatgtgttcagggcggttgactgtggatccgaagagggattttagcttcgtcttatgagttctcagtaactccc

SEQ ID NO: 324380 - DNA, 439 bp, Homo Sapiens
  misc_feature (334)..(334): n is a, c, g, or t
  misc_feature (386)..(386): n is a, c, g, or t
  misc_feature (426)..(426): n is a, c, g, or t
ttgaatgatgatttaaaaggctttatttgcagtggaacaagcttaatgctgtattcattccaaatgaaaagaactagactgctgattgtactgtaggataaggaggaaggctgacagaggctggtgggctgagtggcagggaagcagctggacaggtgatgcagttccagagagaagcccaaggtgcccagtgtacagctggtatcggatgagatcaccagggaagtcagcagagagagggggaggggccaaggacagaaccctggggggggctttcgacatgaggtggcctgcgggggaagagaagccagcagggtgcagagaaagccagggntttcccatcctgggaaggttgggatgacaacccaggggttttaccctacttngctttttttccacgttgggagacccacaggttgccttttnaccaaaagcagca

SEQ ID NO: 324381 - DNA, 387 bp, Homo Sapiens
aaggctgcgttcatgtcgcttctcatttattaattcagtctgttctaagttgtgtacagttatgaaaataacaaaaccaaagctggaagcccagaaatatttacactctcttgggtactgaggtcagtctatgttgttgcacagattggttatgtttggtacctcaaagtgtttataattcagacaaaatcagacagattaacaattttatatacagtaaaacaaaagggaaagtcattcaagtatcaaaatacagagacaaagattaaataacattttcattacagttcagtccattgccacaccatgagcaacaatacttctgagctgctttctgctggcctgggcatctcaaagacagacccaattcagactggttttctaatg

SEQ ID NO: 324382 - DNA, 1129 bp, Homo Sapiens
  misc_feature (851)..(851): n is a, c, g, or t
ggtatttgttccagcccattgaatgcggattagtaaaattctggcatccccaatgttgacacatgcagggagggggaggataaagccaacagttcttccttccacctttccaaaagtctcaggattaggggaggtaataagttttgaaaagaaactgaaatgcaacctggaggagagttggacaagccacattttccactcatgggaaagaagcggaccattctgctactttcccaaagacaaagggactcctaaaagggtaactgaaaaatgagcgctatcctcccagactgttttcttctatcaagtactgcatcatcggtaagcactgaatcctacctttcttaattatactagccaatgacttccttgttctcgttctttattctaagatttcccaaaatttgtaatatcaaatccaggctttagtttatttggaaagtggtttcagcacctggaagatgagctggctctggggctctggaaaatcatattcctttatccttgtcccagagaaaagtaggtaggaggtagaaggtttgcttttgtggctctggatggtggagaaaggtaaaaggaaaatgagaataatgggagggaagaagacaggttaaatctgcaagggtagatcaaaggtaaaaataaggtggaaaaacccattggtacttccctttttctttctttacacagttagttagtttgtttttttatagaaaaattagggttctacatttacacatagcctgagaaaatgaattacaggatagtgttaggctcacatgggtaagtaaaaaatctacagaaaaatctagtttcaactgacatggctgaacactgaaaaacttcccagnaagttacccccaaaagatacagagaatgtatagacagggacaagtcaaagctcttcctgttataccctctccctaccctgttacagggctgagcagagttggtggtagatgatcataattcaagcaactattgctttttcttctatggctttggctgaaatgtatatgctgattgattgattattatttgattagtacatatccagatatattcagattttgacatttaatacacagcagaggaggctgcatcagacacatgacaccccgtgacatcc

SEQ ID NO: 324383 - DNA, 902 bp, Homo Sapiens
  misc_feature (55)..(55): n is a, c, g, or t
  misc_feature (488)..(660): n is a, c, g, or t
taccggcaaccaggaggagatccgaaggctccgggagctgttgacccaagcgagnggtcccaggccaaaaccagttggaactggagatccaaaaacttgcggatgggctcagagcagctctgagcagagacctctgcccatccatcaccctcagggacaccactcggctccatggggaggtttagaaccaaaccacaagtcccctcaaggacaaccactatttctatattttttaccagaaaacaaaactctccatcgctgaaagagattccagtgggacatggtgccgtttttctgtttgccttcttgcaacaacagtttctgaattgactttgttttcagatgatgccttctgttgaattctgttattaagggcccatgatgagctgtaacttctcaagaggaaagaacacagtagaaaactagagctggaaggatctaggttgacctgtctgtgattttcaaactgtggtccagagaataggggnnnnnnnnnnnnnnnnnnnnnnnnnnnnnnnnnnnnnnnnnnnnnnnnnnnnnnnnnnnnnnnnnnnnnnnnnnnnnnnnnnnnnnnnnnnnnnnnnnnnnnnnnnnnnnnnnnnnnnnnnnnnnnnnnnnnnnnnnnnnnnnnnnnnnnnnnnnnnnnnnnnnnnnnnnnnncaggttcaagaccaagccctggaccaacatgggggaaaacccattctcttcctaaacaaacatggcccgggtaaatcctgtcatccttggtcgggccgcccttcgggcccttcgaaaaagacttttttagaaccctttcgcttttgggcgcccgcgggtcccccgtaagggtaaggtggaactgggtcactaaccggtgtttccctaaggaagaaccttgggcccaggcaataaggggctgg

SEQ ID NO: 324384 - DNA, 925 bp, Homo Sapiens
gctcattatgatttaatatgatgattgatcatctctgccccgccagcattatcctaagaatagtgatgaaggtcggagaggcccatgcctgtcagagctcaagctcaagtcaccagaagatagaaaatatacttgtacgttactccttttttcattgtaaaattcacacatgtggccccacgccctaacttttccataagctgtcctccatgctccagcctgcctcactgctctacgatttctcagccctggattgttcttccacagatctgctcatcaactctggctcctgaccctctctccttagtgaccccaccccattcccaccccctgcgaaagtgaccccagcttccactatggcaaggttttaggaaggtccaaagggctcttcagtggggtactggcaggcattcagtttaggtggaaggcccgagacacctcccgataggcatttcgaagcaggacataagggaaacaggactccagcatgtccagggtcaggaaggatgactcctccaccaccaagcgcatgagcagagaaatggattctcgatttctggttttaagcttgtcagtctcctggcccagctgcaagaggctgacagaggccaccaccagaaattccttgaggtgagtttcaatgttcttgttgtagagcgtgaagagggcagcagacacctggatgatggctttggtcaagcaatgaatattgttgttgtaaccatccttctcaatgctataaaaggaagaagggtcagtggcaaggagtgggagggaaactgccagaaagatcaagagcaggcaggccaccttatattcctcctcaggagatgaagtatcagctttcagattagcaatggcagccaccaaggctgggtcaatgtcacagcccacacctgcagcagatgccagctcaaagataccc

SEQ ID NO: 324385 - DNA, 1059 bp, Homo Sapiens
  misc_feature (983)..(1004): n is a, c, g, or t
agtcggaaaaatttatatccttgagattatttcctagatgtattctggtgttttatctcttttaacttgctagacttgcgccccctttttacacgtggattttggggggaccaaaagtttatgttatatctctttaaaaatgggggaattttccgagacccgctggtgtttgtttgcggggatcccaagaatatttagctggaagagagagggttataaagtctcgaatggatataacggagacacatgtttctcccctttgaaaatatacccgcgagtgtaccagtgtaaaaggtcacaattaggatcccccttttctaaccggcatctggattgaaaggtgtaaatatgccagaacacgggctactttagttacccgtatgttaaaattctgaggtgagttgggggtatctatattaggggtaagggtattacagaagataattggcttgatgtcctagaagttctttgatcccacgaggtgggtccacgcctgaaagtaaaccacgaatggattgcccacgttaacacatgtaatgcctgcccacggttccctttttaatttgccacgaagcctgttgagtttgtggttcaccacaattaggttcctaggagccaaacccttaaggaattgaatttaattggttgttcaaacgtccaaggcaccacctggttaataaaccgagccacgggtgttttctctcttcctttctaaaaatagtggaggtttcgagaaagatataaaatatgaggaggcacacataatgttaaaattctccacggaattgacttatacttcttgagaatgaattcagtttcaatcaagtttacacttatgttgcttaaaaaaatagaaattattctttatcttgcacaagaattgaaaccacacactgaaatagaacttaatgggggaatggtgagacttgtgactgctttgctgacccttttggatgtcattgtaaataaaggtttctaatttnnnnnnnnnnnnnnnnnnnnnncccacgcgtccgcgacgcgtgggtcgacgatatcccgagcgattcgggaccggta

SEQ ID NO: 324386 - DNA, 166 bp, Homo Sapiens
taaaatgtagtcaactttattctccttaaaccacaaaatagagtctttggttgtacaaacatcactagttacagtctcgccgaggtctcggctggggtggggcagttagttagtcacaggccagaactcctgtggggtctctttaaaatgctaacacccaggttcc

SEQ ID NO: 324387 - DNA, 822 bp, Homo Sapiens; identical to SEQ ID NO: 63441

SEQ ID NO: 324388 - DNA, 1278 bp, Homo Sapiens
gggaggagaggagaacttagagaaggaaggcggcgggtgtcagggctatgagtgcttttaaggaaggtctccatagaaggttcccccagcaaagtagggaggggtactccccgagaggagtcgaggtgccggagcctgctgcctcgccgacgctgggaggagccccgtgtcccgccgcgcttgccaagggttggctgcgcgtgcggcgggagtagaggcgccttgcgcaccaggaagtgactgtttccccgccgcagcaaaccaggccatccgctggccttttagtttgccgcctcaggtttgtaagaggatttattggttacgaaggaaggtggatttcagtgtgttctttggatgtcaggccttaagagaagagtcccactgcacaggctcagatacttcatctccatggtgggtctcttctccaaagcaggactgcttccctggtatgccagaaatccaccaggatggtcacagctctttctgggcacagtatgtaagggagatttcacccgtgtgatagccacgaaatgtcagaaaggacaaaaaagtcagaagaaaccaagccatcttggaccactagatggttcctggcaggaaaggctggctgatgttgtgacaccactctggaggttgagctatgaagaacagctcaaggtgaaatttgcagctcagaagaaaattttacaaagactagagtcttacatccaaatgctcaatggagtcagtgtgacgacggctgtacccaaatctgagaggctctctgtgtcttctccatcctattataccctctcctgtcatcaatggttaccgaaataagtccagcttctctgtgaaccgaaggtccagatggccattccagagactgtgggggttctacctgggaacttggcgagatgggaacgttgtctgtgtgcagtctaatcatctgaaaaacatccctgagaaacacagtcaagtggcgcagtactatgaagtattccttcgacagtctccattggagccctgccttgtatttcatgaaggtggatactggcgtgagctcccaagtcgcacccatagccaagggcacacaatggctatcatcacttttcatcccccagaaaattaattcagggaggagctcccatgtttcaaaaagaagattggaaagggaatttttccttcaagagggtcctgggaagcagcccggtgggccttgaacctccccttttaaacttccagggaaaaagtacccatgtaacccgggtgggcaggcccttccagccaaggccttcc

SEQ ID NO: 324389 - DNA, 873 bp, Homo Sapiens
tgcaaccacaattttgaaattgttgtcacaatttctccaggattaccctcattctcattttccgacttttggccagcttcacatttgtcagattgttcattgcagttctcaggcaattctgatgttgctctgaaggaagaataaaagttaaaaagtattcactgccaccccacttttgggacaggcttggttgcaaagaaaatggtgttcctggcgctgaaggataactaggaaacccatcagggctgagctggatagctttccagagccgaagctgaatggaccagctgtaacaatgctgactgcgcagccgcattatgctgtaattcttgcaaggatgattgtgaaggattctgaggaaacccagggatacccgggagggacaaaaggcctggaaaaacagaactccctgcagcttgaagtccagatgataaaccggcttgtgcaacaagagcggagttgaaattggaactgaatgctgaggcgaatcctgggaggactggagctggggatggggctgtggcagccacaggtagtggtgtgacagctgcgactgtagagggcgcctgcagccccgggaatgagggaagagcaggggtaacgcttggggtattagagacagaaaagcctggataggagggatttgaagatgacagaggtccttgagtaacagagaaaagtgagggaacagcagtggacaggttgagggggaaaggtgctgctgagactggtgctgaagcagaaagccctgagagaacagctgccgttgagctgggatgagggagagatgtggaggtggcagcggtagatgaggtggctattaatgaccctgggagagatactgacggattaagagatgggttgccagttacc

SEQ ID NO: 324390 - DNA, 941 bp, Homo Sapiens
  misc_feature (62)..(62): n is a, c, g, or t
  misc_feature (102)..(102): n is a, c, g, or t
ggccaccggcaagtaatacgcgaccggctgggccggacggccgtaaagtgggaatgatgggnagcgaaaggcgtccccgtgcggcgcggcccactcgcgtgnctcacaaattcgctccgcattcacgcgactcgcaaggattgagatataatgcacaccgcgcggcggcgactaataaaagaaatagacgcgggccccgcgggtagcggcgctactattcaggcgcgactagatgagctggtgaaaacagcgtgttgacggccagatagcagaatttacctagcgcgggttttggggataaaagaaagcgggtacggaaaaaagaggggtgggtaatgataaagggccgcggcctggtaataaatggggcggccgcatgcagtgagtgcaggagcgcttgccgacggactcagcatcgggaaaaggggggcggggaggggaaagcgtgagagccggtgggttagagtggcagcgacgcgggcggcggaaggctcggatgggggggagggaaacaatcaccgtgcggttgtggaatatttttggggtgttggaagtagtttcggtatccccgagaagcaaatgtaacgcctggttcctcgtccacctccaaagcactatatcttctgttttttctctttttgagtgtggaagtggcatttgcagtctcatcacagattctggattttttcaaaggagaagaaatgagatgctggaaatcttttttcctctttttcctcctagttatttgagactgttcattcaccagggaggagtctctgaaaatttcgtgggaatgtttctgaggtctttccttatgtatagaacactttttctttttcttgtcagaaactggagtgtggatttcaaatctgcttgattctccttccattttattccctccgaaagcaccgccacctttctcccaacccggaagtgctccc

SEQ ID NO: 324391 - DNA, 974 bp, Homo Sapiens
aaaagcaccagctgacgttttggaagaatctatccatgtgtctgcctccatatgcatctgggcatttcatcttcagtcccctcattagactgtagcattaggatgtgtggagagaggagaaatgatttagcacccagattcacactcctatgcctggaagggggacatctttgaagaagaggaattagggctgtggacactgtcttgaggatgtggacttccttagtgagctccacattacttgatggtaaccacttcaaaaggatcagaatccacgtaatgaaaaaggtccctctagaggatggagctgatgtgaagctgccaatggatgaaaagcctcagaaagcaactcaaaggactcaaagcaacggacaacacaagagttgtcttcagcccagtgacacctctgatgtcccctggaagctttgtgctaacctgggactgcctgacttcctttagcctggtcccttgctactaccttgaactgttttatctaacctctctttttctgtttaattctttgctactgccattgaccctgctgcaggatttgtgtcattttcctgcctggttgctgagactccattttgctgccacacacagagatgtaagaggcaggctttaattgccaaagcacagtttgagcagtagaaaacaacatggtgtatatctcaaattgcctgacatgaagaggagtctaacggtgaagtttcaccttttcatccagcatcatcttttacatgttcattatcatccgctcttattcttgcatgtttaaacccttaaacattttaggataactctccggggcgctttgaaagcggtgactaggccgcccccaaactcccccttggattgacaagggacgtatcccgcgtgtgcaccggtccgactatcgccgagactgatcacgcgcccactaccgccgcgcctactgtcgttcgattgctcgacacttccgcaggcagccgccg

SEQ ID NO: 324392 - DNA, 1168 bp, Homo Sapiens; identical to SEQ ID NO: 143680
  misc_feature (83)..(95): n is a, c, g, or t
  misc_feature (120)..(120): n is a, c, g, or t
  misc_feature (310)..(310): n is a, c, g, or t
  misc_feature (335)..(335): n is a, c, g, or t
  misc_feature (349)..(412): n is a, c, g, or t
  misc_feature (428)..(436): n is a, c, g, or t

SEQ ID NO: 324393 - DNA, 1180 bp, Homo Sapiens
  misc_feature (161)..(169): n is a, c, g, or t
ttttagaagggggcagttttattttaatcaaatgtagcaataattttaatctgtacatacataaaacaaacagtgcaattataaaaccttgaaggtgacatgcatattttaaggtgcagttgggatgggggaggatgttagcatctccaattttccttacnnnnnnnnnctagttccttatgcaaaagcactgagtcaggaaacttcatctggaatgctgaagttaaaggtgaacttcctgaagtctgcgcgtctaaatatcacaaacaaaatggaaatgaccttctagagcagtttggtagggactagagtaatatggctggctttcaagctggaaatgaatgaaatcagggatgcattttctgaaaaactaaaggagataatgtttgtaactgagtgtcctatttctgtttcataggttgctaaccacatgagcccttccaccaatctttttattcggcatagtttctgaatagatgctgttcaatggagttatttgtaactaggggtggtgagatgcagaaggaaggacctggggaaatggcttcttccttgaagtctgagtccatgctcctcttccactgttcttatggccttttctctgccatggaggcagaggttagctggtgcagaatgtcaggtgctgtcatcattcacaggcccagggatgcagacaaaggtgagtgatgggggtctacctttgcttcttcccacaatacctttctcaagctttcctggccttgcagcggaacttctagaactagaaagtcagttcactgggttcttgactcagaggccaggatgagatgggatgtggcagagtcacaagacacaaagggaaaatatggtaccaattagcctcagagcaggatagagaaatttatatttgcactgatgaaaattcaaattcccaaagtcaatctaaaaaatgaagatttcctttgagtattaattttttctctgtacaagtagcctgtgcacttctgttcagatgatccccagggacactctagggcagtatgctctagatcagctggaacagctctttctggcagtgacattttgatttgaaccccaaagtaaatccatacatgacatcacagttattaaaataatgaaatattactaaccaaatgtaactgcaattcaatcaatgttatatttcacacacaaatttaga

SEQ ID NO: 324394 - DNA, 1069 bp, Homo Sapiens
  misc_feature (895)..(895): n is a, c, g, or t
tgcaccctggccgcgcgttttccgggtggcagattgcggggtgaactttgtatgtgagcgaggcaaattgcggtgaaattttggagaaaggagaattgggtgtaaaacccggggattttcaaagagctttactgttgcaccatatattccccgtaaaggaaaatatttgcggggaccccgccatttctgaatggacccgggaagggtgccgccagggactcaacctcctttctttatataggtccaccctttggaatgttggtttaaaatggtattccgctcgttgttccaaaaatggtttctttaccatcaattatgctatttgacaaaaacagggtatttgtgcagtacagacaaaatattaaaatacattttaagttaggttaaagtgcacagtacatctggataggaaataactgctagctgccaatccaaatttccgttttcaagaaacctccccccccatcttccccaagagtggagggcagccattgccttggttgatgttggtctgtgctgactgcacactgaatcctcctcctggtggtgtcttttcttttgcgtccccctctacatttgtcttacaaactgtggctgctgctgctctaaaaacttccaatggcttttcgaggaggtgaaagtgcagtcagcattcacaagacttagaaaggttaattactgggacatctgtgattgcagcgtgagtgcacatgcatggaactgccttgcagaaggctgccgtgttccgtgaatctctgagagcagcagtgggttccacgtccttggctggttcttctctagcccgtattttgttgcacttgctcccttcctcagccactcagcctcacaaactccacttactgcaccctccccttagcctgccttggtggtgctnccacaggctcacaacgactcacttctgaggtttcacaccagagactgtgaatcttgcaggattttacagactacttggaaaaccaccaaccaccaaattaaaataaaatgagcacatctcagaatcatttcctcttttaaaactggcagttgtaagaagtgctggtttcctgat

SEQ ID NO: 324395 - DNA, 830 bp, Homo Sapiens
ctcatggttatctcggaggcggtctgcccctttgtaagttcatgggtattggagcccctttgggttccaaaaatggccaaggccccctgcaggtttcgagatgtctattggctgacttgtttcacaaaacttgctatcttcttaatgaacgcccccgaaaaatgtatcccaaggacactatgccctggtccatcagctcaaccgaaggccttcggggtgaaggacagcatgtctccaaagcaaggcttcatgatcttctgcaatttctggtatcgctcagtgccgctctccaccatctgcgtgaggagagagataccgtccaggtttataaactcctgggcaaacgtgacatcccgggagaggctggccaagtccttcagggcttccagcttggcatccatactcgaggactggattcgttcatggagctgctgggcgttctgagctggagatttggttaatcgaaggatagtgccattttttatctcattgcggttcttttctgtgatatagaagtttgaactatcggcatgctggagtgcaaaatattcatggttggcaagagaccacccatcacagacttcctttattattgcagacagtggttttttctgatcaatttccatgagtttggggtaggcgcccggccattctatggccaccttgacgatgtccgcgggtggcggcattgtaagtccccaaaatgttcaaagccagtgggaatgaggatcctacagcgtaaacggccacacgtgtctatacctaatgaggaatgacagaaaaagaaagagaagtcactcagtgcagatgcagggtgaattttgcttccc

SEQ ID NO: 324396 - DNA, 819 bp, Homo Sapiens
  misc_feature (112)..(112): n is a, c, g, or t
  misc_feature (263)..(263): n is a, c, g, or t
gctggaggactggagatttcagttcttccttagatttcttcggggtaatttattagaaatggttacataggtttgcttcctaatctcaaagctggtttcccctctccccaanttcagcaactatttattctcccaggaggccatacaagcgaggggccctgaagctttaacatttattaacttcatgtaaaggtctgagcggacctttcaggcccaggcagcgtgtcacttgcctgtgttccttgttagggcctaccaccggngtaggtgcttggaatgtgctgtggattaaaggcttaaatcctgcgggcccctcaatctgatctaaggacatgagtggcttagagaacggcgcaacaaggctaagcgaaagaaaacaaagcggtgtggctgggagtgggctccttccctccgctggtgagggtgcgatcttagactcttgagagaacccgacataaaggccgcgttccaatggcggccttctcccctaccggccaacctgccccgaaaagagcagaaggcaccctgcgggatctgcagatcagcttgcgtctcattctggggcaccgacacggtggaatgcaagacaccccactaccggaagtttctttgatgttaagaaaaacggcggaagtaggccgcagcgcttcctcagtatagtgcctcgagctggctcgcctactttctacggtaaagggaggtgctccacatctctatgcagctgtgcagcgccgcaggttccatgcgcaggctcggttggctaaatgcgctttccagccatctttcagccacccagtcctttcccaggttctcgagccc

SEQ ID NO: 324397 - DNA, 803 bp, Homo Sapiens
acagccatcactgcaatgccacactattccttcaattttaccctctttgcaatcttcaaaccaggacaggagatcattgtgcttcaatgaaggtagatttcttatttgaaatgctccatgtggtataagaagatgtaatggatgtttcttgctccctaacccatatgggtttccattgatatttgttcctatgagttccagtgtttgttctaagagatctgaaagtggcactgcactaatttccaaaagtccagaatcatcaggatgatgttttagtaccagggcaatttcaaattcataattaactacagaggaatgccagcaatactgtttgttgtttttctctactggtacccaaccaggaatgtgtccattttcatcaggcactggggttcccatttatttgttctgtctcctttgctggtatccagcactccggagctggtttgaagtcctcctcaacgttccaaaaaaattctgttgggttttcttttgaatgtagaaaatttttaaatcttttttcagcttgtttgttgggttttctatctagtcgagcccagaggtatggctgatctgatgctcccttttggaggaaggctcctctttcacctccgtcacaaacacacacggcattttccgctgcacggagcccaagcgcttcatgatgagcccaacaagcagtgcgaatggagggcgtgctttcgagcggcgcccggtccagtcgcggagaagccctgaagcagtcacccgcacggctcaggccacgcacactccgcgcccagccaccgcggctgcgccccccc

SEQ ID NO: 324398 - DNA, 882 bp, Homo Sapiens
  misc_feature (457)..(542): n is a, c, g, or t
  misc_feature (720)..(720): n is a, c, g, or t
ccatttacttgttcaatatgtgtctacagcagctgtttgaagtaaaagttttcaaggaaaaacaccattcttggtttataaatcaatcagttcaatcaggaggtcttctccattttgccacacctgtggatcctctatttctgcttctccactacctcataaaggctgataaggaggggaagtttcagtcccttgatcaagttgtggtggataacgtgtttccatattgcatcttgttgttgaacctttctggacttgagaaggcccttctgtgtgcgcctcaccgagctctctactcccccacactctctaattcacaccccattagtaccactattcgagaagctttcacccacgcccccaaaattctttcacttatcttgtctctcctgaaaatcttcctcccctcgccctgttcccctccaccgcgacttgcgccctcctttcttctctattnnnnnnnnnnnnnnnnnnnnnnnnnnnnnnnnnnnnnnnnnnnnnnnnnnnnnnnnnnnnnnnnnnnnnnnnnnnnnnnnnnnnnnacaaaacctcgacgcatctctctctcaccctttatatctccctatcttgtccccacccattgcacacttccatgctttcatacccccaccgatttcacgccgcaaccgccaccacccctatcacccacgcctctctgtcgtaccagatactcccacttcactccccccagtcaccatntcgcttctaactgacgcttcatccactacagctaaccaccgttaccccctgcaccttaaccttctcaccctaccacgcttactcgtctctccgcgtactatactgtaaccctgtaatacgtacatcagccccttaacactcgaaatcgccacgtttctgttg

SEQ ID NO: 324399 - DNA, 846 bp, Homo Sapiens
  misc_feature (12)..(12): n is a, c, g, or t
  misc_feature (24)..(24): n is a, c, g, or t
  misc_feature (42)..(42): n is a, c, g, or t
  misc_feature (48)..(48): n is a, c, g, or t
  misc_feature (55)..(55): n is a, c, g, or t
  misc_feature (81)..(81): n is a, c, g, or t
  misc_feature (88)..(88): n is a, c, g, or t
  misc_feature (645)..(655): n is a, c, g, or t
aaccaaaaacanaaacccccgggnaactgtgaaaggaacccngaaaanaaccccncctggcacctgcccctgccctccttnccccccngcaaggcagtggggtgggattccagagtgcctagtctgcctcactgggagaagaagagttcctgcgcatgcaagccctgctgtgtggctgtcgtttacatttgggaggtgtcctgtatgtctgtacgttggggactgcctgtatttggaagatttaaaaacctagcatcctgttctcaccctctaagctgcattgagaaatgactcgtctctgtatttgtattaagccttaacacttttcttaagtgcattcggtgccaacattttttagagctgtaccaaaacaaaaagcctgtactcacatcacaatgtcattttgataggagcgttttgttatttttacaaggcagaatggggtgtaacagttgaattaaacttagcaatcacgtgctcagagcttttgcctgtcagttgtgtgtgtcccttatagtcccttcccccacagctcttgctgaaagagtttgccttgttttgttttgttgttttgtatttagccagaggatgccaaaattagtcttctcaaagctttgagtagagtaagtgtgggaataagccagnnnnnnnnnnnctgtttctgtaacttaaatgaacgggtttttttcccttgtatgccacttgtcctaacatgtccttaaggtgtttaacctgcctctgacctggcttgcaatgcataggtgaggagaagcagagagcttgtcatatgcaagtcctgtcaagaaaacaggtgggcatggtggctcaggtttgtagtctttgggt

SEQ ID NO: 324400 - DNA, 770 bp, Homo Sapiens
agacgaacaagagtaggaggagagtcagaaatgtcagaaacacagcggacaactccagcaatctgtccacaaagcaactccctgttggtctagcagggtctgggaaggataaaagtaacaaatgccagctcttgttggatcgccttcttccctttaccttggaaccatcataaagaaaaaaataattccaccacgaggctgactttgcctctgtggaggtagaggtggccatctactgtgcagtcatcctcattctcttcatttaggtttttttttccggtatcacttctttctccctagctgtgaccgttcctctatcccccaatccagtgaatctggacgtggtaggtttcagtgttttcagtcacaactgccacttggttagttttcactcagcatggaaagttccacttcccttccttgcaggttcttcagtttcatgtatatttccatgcctcttacaactcagggagaaactataacaaagaatcctagcagaaaagtcaaatccattcctctggtttcctgagtatcactgtggctgtctgcagaaccacctcttcaagctcctctccaggaaagccaaaagtgggagatgcatgctagagctggtgttctaaagaaatttctagcttgtctagttcaaacccatcctgaagactcttattaaacgttttgaagtttccagttcaaacatcagtgccttggctctgcgcgcgcggcagagaggccttaggtcacgcgccgccccgcctacctccccctccccc

SEQ ID NO: 324401 - DNA, 1035 bp, Homo Sapiens
  misc_feature (50)..(50): n is a, c, g, or t
  misc_feature (95)..(95): n is a, c, g, or t
  misc_feature (314)..(314): n is a, c, g, or t
  misc_feature (1017)..(1017): n is a, c, g, or t
tagttactatctagcgggcgtatgatgtaatcttctcaggagcgctgganatacatgggtgagatagatataagtatgtgaatgctgcgaggganggaaggagggggagtgttaatataaccgcgtgggtcgtctggagagcgcgtgctggttcaaaataagggtaggacgctgggcaaagggcaggtggagaaggatgagaggactgggagttacggatgcagcgtgggttgtgttggattgtgaatatagggagggtgacatggtggtcgattcagtaatccggggtaagagtcaggtcagaggaaaaaggngagaagggtaggtgatgaaggggaggaggagggagaagtgtatagcgcgtgagggtgaagggcatgtactggagaaagtgtagaagtgcagaggggagaggagctgaggcagcatcgtgaaaggttgtatatggatatgaggggggaaggtgtgagcagaggatagggaggcggtgaggttctgcgtcgggcgagggggtgtggataagtacaggagagcgaggaagcagggaaggtagtgtgggagcgcgagggtgggggggaggaggaggtggaatacagaatggcagggctgaataaggggaaggaagaggggtgaaaaggggagaaagcagggagggagggagagcaggaagacgagcggagggctgtagagaaaagttagtgagaggtacagtacaagcgtatgagcgagtctgtctaataaaaacagtagaaccaggctcaagtgcacaccctgtgttacaaacacatcacatatcaggattataaatcatagaaataaagacaaataatggcatgaagggcatgatagtttatttttaaaaattgtaccacactgatcatgatgaccagcatacacatgataatggcttttctcttgggtttaacattgcagtagttttgcatactgcaatgtttcaataggaccaagaacgttagagaataaagatcttagatgaaaatgaaccctaataatttntagtgtcctcccccatcc

SEQ ID NO: 324402 - DNA, 849 bp, Homo Sapiens
  misc_feature (821)..(821): n is a, c, g, or t
catgttggcaccttgtccctgggttgttctagtgggagtaagtggccagaacagcagagtttaagaaactcaaactctttcttctttggatgggaaagccactgggggactgaatccttcctgggactataggatttatgtttccaatgggagacccccacaagtggaaaagagcacttctcccctccctcccccaaggccaaaggaaagcaaagaagatgtctataatgaagaacatctatacatatacccggagtttttccttttatttacaaagcagtaaaccaaattcctgtgtgaacataaatatccaatataatataatattgcgtatgccatttcccccctcaaatatgacttcaattttggccagttgttctgacttaagccaaaaattagtttcatctatatgaacatatgatggtaagtaacctatttattaccttaaaatgtttccccacataaaggaaatggtagagagtaaggggaaaagagaaataagagatgtgataaaacctattccaccatctttatcttcatccacagcatgtcctagacattcagtgcctgggccagtctctatagtaaacttggggctgatctggaaacgtctccacttagctctgtaagggatgggcacccttcagggtgtttccaggatgaaactttactggaattcaacccaagtgtcctggaaaggaaattggaagaagttactccaagagctggaactttaaaacaaggagtagctgaagggtgaggcatatcctatcttgactttctgagcactctggtaccatgggatgtctgtacactggccntcgccaaagccaagaaagccctggtagg

SEQ ID NO: 324403 - DNA, 959 bp, Homo Sapiens; identical to SEQ ID NO: 63522
  misc_feature (732)..(732): n is a, c, g, or t
  misc_feature (789)..(848): n is a, c, g, or t
  misc_feature (873)..(873): n is a, c, g, or t
  misc_feature (890)..(890): n is a, c, g, or t

SEQ ID NO: 324404 - DNA, 864 bp, Homo Sapiens
ttttaaccatccaaaaactttattgagtctatatcagaatcagcctccaggccttctcatgtcactttcccatcactctgttctttgctgttccctggtggttctgactacaagggctaggccttaggacatctggttttctttcttaccccagtccagctcgctgactatccttagcccctctaatcctacgatccccccaacctggagccttggtaaggagttgtgaggttttcagacttgtccatccctccctcttcctcaccccaagctccaggcctctaggcttcagatagatcctccttgggaggtgcttctcctggtggggcctcctcaggtgctggcctgcaggcaacccctccctgtagccatgctgttttcagcatatctttcagcccactgggaaagagatagccctgggtctctcctcccgcatcaatgacccctccaagcccctccagtgctgtttgcaggtaccgcaggccaaggagcaccagagcctgcagtaggaaggtgacagccagcatgctacccagtgtgcctgccaagtcctgcaagtgctccagcagcacctcatggcacccttgggccccgaggttttggttgggtttgtcggggaatcgaaacagggggtgggccgtaggagtctgaaagacggttttgcaggcaagggcggggtgagtgggggttgcaacaggagaaagggaccccatcagtcaggtataggccttctacattgctctggatccggtcagccaccatcgggtcaccgggatccaggtaacggctgctgacccactggaccccaaaccaatccttgtacccgtggcgcccgcagcagtggtacctcagttgcagctcatc

SEQ ID NO: 324405 - DNA, 138 bp, Homo Sapiens
agaaaaaaagatgcacatttatatatttgaaggaagggtagcacatacagatggggattatgagggagtcaaatacatttgtctttttattcacgcttgttgcttctttgttctgaaatataaggaagataaggtccc

SEQ ID NO: 324406 - DNA, 1203 bp, Homo Sapiens
  misc_feature (56)..(99): n is a, c, g, or t
  misc_feature (498)..(510): n is a, c, g, or t
  misc_feature (642)..(650): n is a, c, g, or t
  misc_feature (676)..(723): n is a, c, g, or t
cgtgtggaaggtatgggtgcgtgggtgagcgagcaacgggggtggggagaaaaaannnnnnnnnnnnnnnnnnnnnnnnnnnnnnnnnnnnnnnnnnnncgcgtcgcacggggggacactgcgcgcgcgtgtcggttcgtcttctaaggagaaattcacgacgggcgggggccacatcgagaaaaggtaaaaatttgtgcgagaggtcaggacagccggtccgcgtctgtggagagagtacactcttgtgggggaagcggctggcccagcagataatgagggcgggccgctagagaaagggatgggcgcgatgcgggggggcgggtgtgtataaaagagagagagagggtggggggaatgaactgcggcgccgcgggagagaggtgtaaatggggcggtgggacaggacaagggggtccgcaaaacgcccccgtcgtggatagatttaacggcgggcgaggtgtcacacgtaggggaaacgcggggaagatatggacnnnnnnnnnnnnnattcacgcgggacgggaaggccacgggggacaccgaaaagagaaagaggggtgggtgagagagtgtttttaatagggcgcgcaagggagggcggcaaaaggcgtagtttcaggcgctaagtccgttcgggtnnnnnnnnntatgggaaaaatgccgcgcgcgcgannnnnnnnnnnnnnnnnnnnnnnnnnnnnnnnnnnnnnnnnnnnnnnntggtcaaagttaaaaggcgcatcagacacgcgtagctgttgttatttgggtgcacaaacgtatagggcccctcagtatgccctccggggggcgtggccccagcaatccaaagctgacagccttgggtgtaggtatgaggggtgggaatggaggggggagtgtctcttgataggtctggagtggggtgattcctgcaaatgaagaactgggtggggaacagaggttggggtggcgtagattctcagtatgcggagcgatgaaaaaatcagataaacaaatgagggggtacaatatgcttttacaaccctcctccaagcttctgccttgctgggggaaggcttccagtttttcctgggctggggaggtcccaggatagccccttccttcatcctcttgccctacatgttgaaaaagaatactgaggtactggttctggtaacctgaactcagtccccactaataccatcaccttccaaactg

SEQ ID NO: 324407 - DNA, 493 bp, Homo Sapiens; identical to SEQ ID NO: 142410

SEQ ID NO: 324408 - DNA, 674 bp, Homo Sapiens
gccacttgaaggaagccgcatcctcatagacggggctcgagggcagcctctcctcggttggctgaggtgcgggcgacacagggggcgtttgcgttttggctctggcttgctcctccagcttcctcctggcctcttcctgctcctgccgctccttggccatccgctgggctctctccgcctccgccttccgcctgtcctcctgctctttctccttagcgaggttttcaaagttagctctgatgttacttgttttgctggtcacagcttcgacaggtactgtcttctggtaggcagaggacacctgggtgacatcctcaaaggttgacgcattcttatccatccgatccttctgcaccccatacttcccgccgaatcctttggagtagtcttgctgggactcgtgcttggccagcttctccttgtaatcaaaccccacagcagcggagtcctgcctctccgactgaacaccgaatttgcctccaaaaccagtcttataatctttttgggattcatgcagctgcaatttctcctggtgatcccagccaagggcacatttgtcttgtctgtctgtctgcacaccaaattttcctccaaaccctttcacatagtctttctgggactcgtgcttctccgttttgccttgatactcaaagccaacggcgctcttatccacc

SEQ ID NO: 324409 - DNA, 1334 bp, Homo Sapiens
  misc_feature (42)..(117): n is a, c, g, or t
  misc_feature (253)..(264): n is a, c, g, or t
  misc_feature (372)..(553): n is a, c, g, or t
  misc_feature (607)..(645): n is a, c, g, or t
  misc_feature (723)..(761): n is a, c, g, or t
  misc_feature (823)..(868): n is a, c, g, or t
ggggggaggggataaggacgcggacataaagagcgatatgtnnnnnnnnnnnnnnnnnnnnnnnnnnnnnnnnnnnnnnnnnnnnnnnnnnnnnnnnnnnnnnnnnnnnnnnnnnnnggcgggcgcgaacgggtgaagagagggatacgcgttagcctaaagggcgactagggcgcgcgcggtcaggcggggaacacgatgtagcgggcggagggggggatataggggcgggtaatgtcaggagatagaaaannnnnnnnnnnntaataaatcggacatgatgtgtctgcgccgcgaatgcggcggcggctagaggggggaggtccagataggctcgggcgctcgggaaatacggcatatggggtgtaaacnnnnnnnnnnnnnnnnnnnnnnnnnnnnnnnnnnnnnnnnnnnnnnnnnnnnnnnnnnnnnnnnnnnnnnnnnnnnnnnnnnnnnnnnnnnnnnnnnnnnnnnnnnnnnnnnnnnnnnnnnnnnnnnnnnnnnnnnnnnnnnnnnnnnnnnnnnnnnnnnnnnnnnnnnnnnnnnnnnnnnnaagaagggtaagcgggaaaagggtggacaggggaagcggttcggcgcaattgannnnnnnnnnnnnnnnnnnnnnnnnnnnnnnnnnnnnnncgaaagaagagggatcggggtagaggaggtgatacaaaaacccggaggcgacgggcgtatatgggcgagcgggacaannnnnnnnnnnnnnnnnnnnnnnnnnnnnnnnnnnnnnncgaaacggaggtgttgggaaaagtttgggaggaggaggcggggaggcaaagattttgttggnnnnnnnnnnnnnnnnnnnnnnnnnnnnnnnnnnnnnnnnnnnnnngagattgggtaggattgggggttagggttctctagggtcattgtctctttattgacgtaatccacatatctaacaaagagagcgacaaagcaacagcctatcagtgccaccgcagacgctgtgatcaccacgacgacaacggtcccggctgtgttgaccagaaagcccaggccacctccgaccaggatctgagccagctgcaccatgcatgtgagggtggcgcagtccatgcccttccctctcacgctgttgtctgggtcccctcctggggcctgctgcctctccttttcttcctcgcggtggtactcagtaatgaggttaaagggcacagtgtacagggtgctggacattacaccaaacaggctgcacaggaccagggtggagtagacattcgggaagagcccaataaatcccgtccccaggccaaacagcaaatatcccgtgaagtaaagaccctttaatcccc

SEQ ID NO: 324410 - DNA, 304 bp, Homo Sapiens
  misc_feature (235)..(235): n is a, c, g, or t
  misc_feature (257)..(257): n is a, c, g, or t
  misc_feature (276)..(276): n is a, c, g, or t
caatacaatctatattatctcatatatagatttcttcctcactttatttgctcacttctgtcacgcatttaaaatgtcacagagaccaaaatagagtggctttctggtggaactcatggcagtcatacaacaagatacaaaactaggagactctgtcttctcatacatcatacaattaatttttcaagtattctttatgtacaaagagctactctacctggaaagaaagttaaanaaaaaaagacaaggtagggttntgcatcctaaggaggaggnggggatgggagcggtcggggcaccatgt

SEQ ID NO: 324411 - DNA, 1219 bp, Homo Sapiens; identical to SEQ ID NO: 150633
  misc_feature (43)..(101): n is a, c, g, or t
  misc_feature (159)..(159): n is a, c, g, or t
  misc_feature (169)..(180): n is a, c, g, or t
  misc_feature (378)..(378): n is a, c, g, or t
  misc_feature (647)..(663): n is a, c, g, or t

SEQ ID NO: 324412 - DNA, 1146 bp, Homo Sapiens
  misc_feature (137)..(147): n is a, c, g, or t
  misc_feature (194)..(239): n is a, c, g, or t
  misc_feature (372)..(469): n is a, c, g, or t
  misc_feature (545)..(554): n is a, c, g, or t
  misc_feature (602)..(711): n is a, c, g, or t
actatatatcgctccaaccagacttggggggtgttttctacggggagaaaaaaacccggggccgctttttttctccttaaaggggggtttttttgtgagaaataatattattttttgttttacaccaccaaaccccnnnnnnnnnnntttcccccccttttttaattaaaaaggggcgcccaaataggacaaannnnnnnnnnnnnnnnnnnnnnnnnnnnnnnnnnnnnnnnnnnnnnagggcccaaggggtggatccccggggggtttcagttctcacaaccccgttgggagggttcccagtcggccgaaaggtttaaaaaattccacccttcctccaaaaagggcccggtgggggggaaatttaaattnnnnnnnnnnnnnnnnnnnnnnnnnnnnnnnnnnnnnnnnnnnnnnnnnnnnnnnnnnnnnnnnnnnnnnnnnnnnnnnnnnnnnnnnnnnnnnnnnnggggggaatccaacccttgttcttgcccgggttttttttggaaaaaatttggccccttttccttttcttttggggnnnnnnnnnnaaaaaaaggttttaaaaaattttttgggggcggggggggcccccaagnnnnnnnnnnnnnnnnnnnnnnnnnnnnnnnnnnnnnnnnnnnnnnnnnnnnnnnnnnnnnnnnnnnnnnnnnnnnnnnnnnnnnnnnnnnnnnnnnnnnnnnnnnnnnncagaaacgtgtattctttttcttttaatagtaaacctctttacaacaaatatagtgaaagagttttcaaacaaaactcataagaatctcgaggactttgtcttttcttattgtgtagaatactaagaaagcatcaccatacagcacgaaaagaaatattgaaaacaaatcaacagcctcacacttggactcgccctgccccaggacccaggaagagccccagggagtgtgggtgattgtcaggtgtgggggtggggcacctccatggcccatcctgcccctcccttcctcttcctcaccacctccctccctctgggagaatggggaagaggagagaatccagattctccattccagcctccctccccccatacaaataccattccttcttaccaactggctttaaggggattccaaagagtcagttaaaaatata

SEQ ID NO: 324413 - DNA, 1096 bp, Homo Sapiens
  misc_feature (508)..(535): n is a, c, g, or t
  misc_feature (628)..(637): n is a, c, g, or t
  misc_feature (784)..(784): n is a, c, g, or t
ccctcctctcaaccccatgcccagtcagggtgcaaggagcaaggacggggccaaggtcgctcatggtcactccctgcgccccttcccacaacctgccagactaggctatcggtgctgcttctgcccactttcaggagaaccctgctctgcaccccagaaaacctctttgttttaaaagggaggtgggggtagaagtaaaaggatgatcatgggagggagctgaggggttaatatatatacatacatacagcagtatatatctttttgtaaataaacaggaactgattttctgcctccatcccacccatgagggctgcaggcactacgaccaaacatttccccgtcattccctaaaacatcgctcggccgccctccggcccttcaaagaagcttttccaaaacacctccctttgcccgcgcgggccccaggagggtcaagggacaccgggcccatacccttgtttcccgaaggaaaaacccggggccatgacatacgggcttgcggatnnnnnnnnnnnnnnnnnnnnnnnnnnnngggggcaaacgcccccgcggtttttgagaaaaaatcccccaaaggggcgccccccgcgggggcttttttaccccggaccctccttttaccccnnnnnnnnnntcccaagcgggagaggctctcctccgcatttcttgtaaggtttcgcgcggccccccttctgccccctgtgttccctcccctctatttttcgcgcacacaatgcgggggtccgcataacgcttttacctctcacgcccttttctcccncgcccgacaacactgggcggacaaccaatcctcctctacaaccaatgccgtctgtttcggtgcaccaacccccccgttttatatgttgcgacaagcgggcgattcgcctgcgcttgcccccccgcccgttcgaccctctccctcctctgcttaaaacgtaaagaatgactccctccccccacacctgcgcgccgccacccatcgccgtgcagcccgcccaaaacactaaaacccccttctcgttgtccgttttgcgcggcgcatcacttgcctcgcgccctgccccgttttacgcccccgcggggcgggcga

SEQ ID NO: 324414 - DNA, 359 bp, Homo Sapiens
  misc_feature (34)..(34): n is a, c, g, or t
acatgttatttttgtttttgcgttggtagggagnagcaacgctccttttaatatccggatgtccagagccacagcctgtgtgttgagccccgggtagggctgctggccggaggctgttggcttccagcagcagcacgacgtggctttttgaaaggagagcccggagagtggcggccagcaggggcccagccccatgggccgcgtgcctggtcccagctgcggcgtccctctggccagctacaaagtggaatgcttctcgaagggcacggtcaggaggcgggcggccgcctcgtccaagaaccagcacagtttcccggtgtggggctggaccagggcggcgggcagcgggttttcccccg

SEQ ID NO: 324415 - DNA, 1477 bp, Homo Sapiens
  misc_feature (678)..(678): n is a, c, g, or t
  misc_feature (691)..(691): n is a, c, g, or t
  misc_feature (694)..(694): n is a, c, g, or t
  misc_feature (728)..(728): n is a, c, g, or t
  misc_feature (808)..(808): n is a, c, g, or t
  misc_feature (868)..(868): n is a, c, g, or t
  misc_feature (907)..(945): n is a, c, g, or t
  misc_feature (983)..(1000): n is a, c, g, or t
  misc_feature (1010)..(1010): n is a, c, g, or t
  misc_feature (1031)..(1039): n is a, c, g, or t
  misc_feature (1092)..(1092): n is a, c, g, or t
  misc_feature (1097)..(1097): n is a, c, g, or t
  misc_feature (1102)..(1102): n is a, c, g, or t
  misc_feature (1104)..(1112): n is a, c, g, or t
  misc_feature (1116)..(1125): n is a, c, g, or t
  misc_feature (1139)..(1176): n is a, c, g, or t
  misc_feature (1220)..(1224): n is a, c, g, or t
  misc_feature (1226)..(1226): n is a, c, g, or t
  misc_feature (1283)..(1283): n is a, c, g, or t
  misc_feature (1368)..(1368): n is a, c, g, or t
gggccgttggggcggaggctgcccttgcagcgccgcaggaactcggccaggtgctgatcggtgaggtggcctggggagggcagaggcaaggttaccagggcaccatgcaagcggatgtcggcactggatgggatgtacttctcagccccgctgagcccctcatttgtgcccagcattttgtgtgcacacatggcctcattggctctcagtcccgagagatttactaaaccccaattcatagaataggaaactgtggctcagaggtcatctacctaaagacacattaagccagaatttgacttgatgggatggcttacaagtcctgcctgatacctacacaccatgatgccccacccctgccaggcttggatcggaggagtgaacctgggctaagagtttggcattgcaggagctcccagagagactgccttccctacactagaagtccccacaaaggcttctgagaccacaaaatacaaggccagacctagagtgtccacagcaggcctgtgctgcccgcctcaagaggtggccgactgctgctagcggcctgccgccacgtcagcagcccagggcacagcgctcgaggtgtgctgttaggctaagagggtgcagggctagacacgaagcttaaactattcatcttattaaaaataaaacccttatataatagcttcnccatggtggggcnggnttggaagggaacaaaccctagaaaaaatttggtnccttttgccgggcccggcctcggacccatccaaaaaacctttttctaagaaccattccgtttgggccccccgggcccccnaaagtaaacggcaaaatggggcataacccgtgtttttcctcttcaaggaaaacccccgcngccacacagaattttaaagggggggtggttggtttcctnnnnnnnnnnnnnnnnnnnnnnnnnnnnnnnnnnnnnnngggcggggggcggcgcccaaaaaacctaggtttgttcnnnnnnnnnnnnnnnnnncacggggccncccccccggccttcaggacannnnnnnnnctttaaaaaaaaccacgggccgcccccgcgcccggcccccgggcctccttttnctccntcctntnnnnnnnnntatnnnnnnnnnnccggaaaagtaccnnnnnnnnnnnnnnnnnnnnnnnnnnnnnnnnnnnnnnttagagggcgaagatagtcattccccctaccccaccaaaacacnnnnnanaggaggcggggaaaacactgtgcctttctaccccctattacattctaaaccccatanccccaacaatccacccactcggcaatgcccctacccgccgagacgtatcgtgtgggaaactccccggcagcggcggacgaaattnccccccgcaagagggccgagagcggaagacaacctcatcccgtttcgcgcccgcacattgacacccccacccttgtttctcctcgcccccatgggggcgggtgactcct

SEQ ID NO: 324416 - DNA, 725 bp, Homo Sapiens
  misc_feature (221)..(221): n is a, c, g, or t
  misc_feature (251)..(251): n is a, c, g, or t
tttccagaatttcacggccctccctggggccaatgtttgtcttttgatggaccgaatattcccgttggggggcgggaggcctgcccttttcaggcgccgcaggaacttcgggccaggttgcgattcggtgaagggtggccctatccccccacgggttcccagatccacgtcgtaaagagtcccggctcccggggtgaagtcccggagccccacaacagaangtagttcctcaccctcttgccctcctcccnccaggtaggtcttggcttgaaccaggaagtcctccgttatgtcgaccatatccacctctctgaacagcggcaggagcagccgcttggtgatcctcccaatgccagctccacagtccagggcacaggacgttcctgtcttgttcgggccttccctcaaaaacctctgcaagaaacttccgggagctgttgatgtcgatgctggagatgtggccataccccccaagcatgccggtccaccgtgggtgggatttgtttccagtaggtcttggccttggaatagaattgcttctcgtcttctatcacctcgctcgtcatgctgtcaccaaccacggctctactcaagcaccacgatcagcaaccgcgactctctccgggcgggggctcccgggaccgagagaagaagatggggaagaggaagggagggcggcggcggcggagacgccacaagccaaccgcagctccgccagaccaccc

SEQ ID NO: 324417 - DNA, 423 bp, Homo Sapiens
gttatttggggggttggggggttttttaacggggaggagtgaagagagtgaggtttggggatccttctcggagagagaaaggcgggcgtcgtcccttgtgccccgcgcaggccgacgcgcttagccgattccgcacgttgggcaagtgggggcacagcgtccccgggcactccggtcccggcaggtcagcctctcccgggcagcgctcacacccagtcctccgagcctggggttccacggccgaaatgcctgcgacagagaattagagatagaagctcgtgaatgtccctttcttcgaagggctgggaccccgggcgggccgctggccagctcgcccgcagcccgttgccatgtgctccctgttgctgctcccggtgattgacaggccggcgcacagtcggcgtgtcagccgcgaaccaaagt

SEQ ID NO: 324418 - DNA, 290 bp, Homo Sapiens
accgctgtcaacagacagtttattctatatacaaacacaattttgtacactgcaattaaatagaatggaatgagcgctcctccgcattcctccccgagtgactggtttggccgccggcccactccatccccgagtgggactggaccacggccctggctgctgccactgatgttggcgcctgcaccccacgtccctatgcccgaggcgcaagctctgctctcccggggaccccaggcctggcgcacacgcggggagggcggggccatggagaaggcactgcagggagcacc

SEQ ID NO: 324419 - DNA, 831 bp, Homo Sapiens
  misc_feature (86)..(110): n is a, c, g, or t
  misc_feature (135)..(292): n is a, c, g, or t
ggggggaaaccaccccttttctttcccccgggttttttgggaaaaataataccccctttcccttttctctgggggggcggcccccnnnnnnnnnnnnnnnnnnnnnnnnngggggcggggggggcgccaaagaannnnnnnnnnnnnnnnnnnnnnnnnnnnnnnnnnnnnnnnnnnnnnnnnnnnnnnnnnnnnnnnnnnnnnnnnnnnnnnnnnnnnnnnnnnnnnnnnnnnnnnnnnnnnnnnnnnnnnnnnnnnnnnnnnnnnnnnnnnnnnnnnnnnnnnnnnnnnngactgtggcatcattctgctaactttattctttatacacagtttgggtaaagtaagaaccaaacactgcttccactccccctatcctcactccactttggggactttaaaaagtgactaatagttggtactcgtaaggattccccaagactgcagaatttagttgtacagcataactgtgcatttgatctctgaaagaaaataagagaccctctaagaggtggtgaccttagaagaatgaggaggggtcagggggtcttttaccccagttcagcctcacaccagcctgggagattttcccacctgcaacgcaaagcagcctgtaaattacatatagccacaatacacttaaattgagtcaatcaccgtggaaaatgggaactaaatacatcatcaggtcttcattgaaagaacttgagtggtcacctgtgattagctcttctcctaaactaaggctgctgtgacccttaagctggcttttaaaaatgtattcaacatacctcttagaaaacttaggctgaaatattttttaaatgactg

SEQ ID NO: 324420 - DNA, 576 bp, Homo Sapiens
tcacaatgattgtactttattgatgtgttacaggaggtaaggactttctgcttaaaatatttaaagtttacatgtgcacacaaacaaacacaggttcccccacccatggggaagggcgagatgactctgaataaaggatggaggagaagaagagggtgtagacggagggcccttgacccctacaggggcagcaggataaggaatagagtggggcagaaggtgggttattaagaagcatcttgcttactgacatgaagccacgtgcccagcgagagcccagatgaggcctcattggcgtagaggaggccctttggagggcaggcacacggtgcccaactagccagccaaggccaacgtcccaggggtagggcggaagtggggtggcgtgcacagggcacccagcccaggcctctgctgcccccacctccctccccaccctctgagagaaaagacggtttgggcctcagccacggacctgacgccgttaccggcagcgtctcctgaaactacagagatacaatgtgtatcaacagggtgatcgcttctgacccactgaggcagacagctagaggtgct

SEQ ID NO: 324421 - DNA, 599 bp, Homo Sapiens
ggggtgaggaaatccccaggcccttagtccatgggcccagggatttttcctagggaaatcagtctatggacccatgttccctttacccttattggggcccggggcgcccaaagggaaaggttttagaaaagtttcttgaggggccgaggcgggcccgacagggggggtgttttgttccttgtggttaatattattccctgccaatagcattttccatctaacacatttaaattctcacagcataattgcaaacatgtacatattggttcccacgagaaatctgcaggtgacatttcgggatgtttggagtcaatcagataaagcacattatgccagaaaccataagaggggagctgggacctgggactgtgcagaatgaaaagccacggctacgggaagcataagcttgtgctgcaacggcatgtgcacatgacctgctgctcctggccctctacgaagcatgcccagcaagggaacctcctccgtccctcctccacgtgcttccttcctaaggctgagagctcaactgaagaccttccccaataaatgacagatggctcttcagtcaggaatgcagttagtggtttcatgacagaccc

SEQ ID NO: 324422 - DNA, 327 bp, Homo Sapiens
ttattttttaattcaagagaagtcaatatttattagacaataaaataattgttccaaaggatatttctaaataacttcaaagaagttaccacaaagttaaaaaggaatatcttccatgttaagtttgtgataaaataatttaaacacatgattgactctacaaatcttttttacaaattacttcagaagttataagaggaaatgtttttctttttcctctgctatctcttatttttttccttcctacttctgatccccttaatatacaatattattgatgtaaactcaagaattcatggtaaaaggcatctttttgcttcacagacc

SEQ ID NO: 324423 - DNA, 1451 bp, Homo Sapiens
  misc_feature (222)..(222): n is a, c, g, or t
  misc_feature (286)..(286): n is a, c, g, or t
  misc_feature (672)..(682): n is a, c, g, or t
  misc_feature (840)..(840): n is a, c, g, or t
  misc_feature (844)..(959): n is a, c, g, or t
  misc_feature (1392)..(1392): n is a, c, g, or t
cacatatatagatagatacgtgtgtccagcgtgcgcgaatagagacacacggtgcgcgacatatgatgttgtcctgcgttgacaggcggcaggtggtgtagtctacggtgcgacgttacgaccggtagtggttatattcgtcagtcaccagacacacgattacgcactgacgaggtgaggaggagttactctagcccaacgtgctctcgggatattaataanctgtgggtgggcgacgacaccggtgtatcatagaacgttctgtctttgcgcgcatggcaggggncgttgtgcgcccgctttcgatgcataatgtattattatttcgcccgtcattggggcggtcgcagtttcgtgttactatcgcatctcccgctcctccagcgggattctctaaaggagtaggcttccagtatatggcatcttcggggattgtggcggcgccacctgttctggccgggcgagggctcgtctgaggctatgggtcccccccacaatttttgctgcaaagagagtgcgctgagacgcctgcggctgtaaatttgttgttttggaagagggaggtcgccgaagcaccccgctgtgtgagagctcccgcgtatatgtcctcgcgaaaacctcgtctttgggagttgtgtcttgaacccggtggggctttgcctcccgggcggnnnnnnnnnnngcgaggaaattccaagccggctgcgtgaagggccccgggattaccctggggaaacccgaggggaccatgtgttactttgcgcgtggggggcccccccgtgccaagggaaaggttcttagaaaatttcttggggggccggagcggggctcaccaaggtnttannnnnnnnnnnnnnnnnnnnnnnnnnnnnnnnnnnnnnnnnnnnnnnnnnnnnnnnnnnnnnnnnnnnnnnnnnnnnnnnnnnnnnnnnnnnnnnnnnnnnnnnnnnnnnnnnnnngcaggtaaaagaaaagactttattaataatcagtgggtgggaggtgagggtgtgcaacgcactgcaagcgcccagttcctcggaggacggcgcgtggctcagtccaggctcatgtcctcctcttcgtccttcttgtccttcgtgtcgccctctttctgctcgggcttggcgttgttctgcatggctttggcaaacgcttccacatcgcccttgttggcggcctccacagcctctgcaggcagaccgaactggcacatgagggggcccagctgccccgaggccaaggctgcgctgaacatgcccagggcctgcttggaactggggcgaggtcagggtattctggatctcatccgcggtctgcggctacgacttccccagattggcaagttagggaaagcaggcgctcctgggacaatccgcgttggcgaggatngggagccattatctccggcgttaaacaatttggccaggtccactttgcttggccgcctg

SEQ ID NO: 324424 - DNA, 284 bp, Homo Sapiens
  misc_feature (249)..(249): n is a, c, g, or t
  misc_feature (261)..(261): n is a, c, g, or t
tcgaaaaacaaactggtttttattctaaacacgtactagggcagcatgctggggggcctctcctgcctccagaggtgcccctgctccccactgtggccctctttagacagagtaggagctcgggctacccacatgcagcccagcccttaagcacccaaagggcctgcctgtgccccactctctgcctgggctagggaggccaggaccctcggagtgggcaaggccacccttccatgggtcaccagggtntcaagtgcccanttgtcctccaaccaacaagtgac

SEQ ID NO: 324425 - DNA, 1390 bp, Homo Sapiens
  misc_feature (1345)..(1345): n is a, c, g, or t
cggatctgtatgcacttttatttaacattattccatataattctccccccacccactttatttataggatactgcaaaagtgagaaggagataatagatactttgctctgaatttggcatccagagttaacatttctcccctcactcccttggctggtgtcatagttattagaatcagcagcctcttaactaattgcggtttcataggatatataaatgtttcaagccattattgctgaatggttctttagttattaacctagacccaaatcaaagaccagttggatttatgatattttttatttgttcttgcagccaaagtgccagtttctttaatatgtgaccaagaacacaaggagcatccatatggccaaataaatacactgaattttagaaaaacatattactttgaattcaaattgtcgtgaaaaccagaacagtgtttgtccatgttgcatgtaatgaaaataaatccctgctctgagaaaaacccatcgtgaaaaaacgcgtccgtaacacgacccatacctaagcaaagagcgttgatgagccgccgtcgcccctcccgagagccttgctagatacaggcactcgtagccgcaccgcaccggaaggcgggaggagcggggcgccaagccccggtctcgccgagcgcgcgcgctcgcggctaccccccggcctcacggcccgccgtagaccaaggcacccgttagatgaagggcaccgccaaacgagacagcgcgggcaccgcgtgcgcgcagagatcacggcgtcggcgaggcggttggggccatacccgacaggccgcagcaggcgacgcagtgctaggcagagggacagaacctccgcgcagcccaccagagcgtgaaggaaaacatgcgcgcgctgcgccccgcaagcgcggcccgaccagccaggacgcacgagcaagaacgcccagccgacgtacacacccgcccgcaccgaggcgtacgccacgccaagcacggcgtggacgaagctcacaccggcgctgtaaaacgacgctccgagaggaccgggaacacgcaggtaggggcgcgcgctcaagactcgtgcaggcagtaggcagcgacagcacgcgagtacgacgacggtggagacgaagctgctgactagacggcaacaaccgcgcagcgacacgcgcacgaacggcatagaggcacgccctgcagactcagtagcgcaatgagggtgaggacagcagcagtcgatacgcgtgtagtccatgctcgacgacgcgcatcagcggtgcgcagacggcagcgccacgaggagtgattctccagtgtttcgcatacggcggctaccagacacgggcaccganactgagaacattcgtgtacgcagcgcatcagcgtggtcgtctcga

SEQ ID NO: 324426 - DNA, 437 bp, Homo Sapiens
gaagtagtggtatgtgttagtaaaaaactcagtaagaagcagagaaaactggagtcctatttgcagaaccactttgtggattggaagaccgcaagtatgagtatctcatgacccttcatggagtggtaaatgagagcacagtgtcctgatgggacatgaaagaagacagactttaaaccttatcaccatgctggctatccgggtgttagctgaccaaaatgtcattcctaatgtggctaatgtcacttgctattaccagccagccccctatgtagcagatgccaactttagcaattactacattgcacaggttcagccagtattcacgtgccagcaacagacctactccacttgggcttaccctggcaattaaggattcttttaaaattgtcctgtgggggggaggccattttcagacaagacagggaggaggattt

SEQ ID NO: 324427 - DNA, 633 bp, Homo Sapiens
  misc_feature (277)..(280): n is a, c, g, or t
  misc_feature (289)..(289): n is a, c, g, or t
  misc_feature (292)..(292): n is a, c, g, or t
  misc_feature (576)..(576): n is a, c, g, or t
cctatggcaaagctatgggagcagatacagcaaacccatattgtcatcacacatttcttctcttgtatcaggagaacctggttgcttctaatgacaggtctctctttttttgcaggatagaatccaattgggtaggagaataagagaagggaaaaggatcctttcgagatcatgctcccatctattaaaagatacataagctttgccaaacttaaaaccaggagcatatcatcattgcacaaaacacatccctaataagggctggatcactcttttnnnnctcttttcnttntttttctctcctgtcttgtctgaaatggcttccccacaggacatttttaaatgattcttaattgcagggtagccaagtggagtaggtctgttgctggcacgtgaatactggctgaacctgtgcaatgtagtaattgctaaagttggcatctgctacatagggggctggctggtaatagcaagtgacattagccacattaggaatgacattttggtcagctaacacccggatagccagcatggtgataaggtttaaagtctgtcttctttcatgtcccatcgagnacactgtgctctcatttaccactccatgaagggtcatgagatactcatacttgcggt

SEQ ID NO: 324428 - DNA, 364 bp, Homo Sapiens
  misc_feature (275)..(300): n is a, c, g, or t
cctatgtcaaagctattggagcagatacagcaaacccatattgtcatcacacatttcttctcttgtatcaggagaacctggttgcttctaatgacaggtctctctttttttgcaggatagaatccaattgggtaggagaataagagaagggaaaaggatcctttcgagatcatgctcccacttctattaaaagatacataagctttgccaaacttaaaaccaggagcatatcatcattgcacaaaacacatccctaataagggctggatcactcnnnnnnnnnnnnnnnnnnnnnnnnnnctctcctgtcttgtctgaaatggcttccccacaggacatttttaaatgattcttaattgcaggg

SEQ ID NO: 324429 - DNA, 1217 bp, Homo Sapiens
  misc_feature (76)..(76): n is a, c, g, or t
  misc_feature (473)..(481): n is a, c, g, or t
  misc_feature (1023)..(1059): n is a, c, g, or t
agagtattccactcccaccgtttgttgtgtttttataaaagaggatgccgccccattattatgtgcggaccacttntttcttcggcacgcgccccccccttttgtgcacccccggcggggccaaaatatatttatatccccacacgggcggtgcaacaagggggggctgaaataatcgcgccactcggaggttatcaccaaaatgttctctcacacacccggtgtatctgtagaagagggtttttccacaatgtgtgggcgcagaaaacatcctttacgagggagtgtttcaagccactgtttttgtggcaaatatatattgccgcgagaggccggggtcgccaagtatattaatagtggagagaggtcacctatcgggcctcccgcgcgtgtatatgagtcccccgggaaaggcccgcccccggagcttcccctctgggagtattgtttctaaagaagccatccggcggttnnnnnnnnnggcgtgttttttgttttgggggcagagctcccgaccccctattttatgacccgcggttttccttggggaacacacctatgagccccgttcccgtcttccgtatggggccccggggccccaaaggaaaagtgttcgaaaaacttttttgagagggcccaaggggcccccaaaaataaaattttaccagggcgagtgagtggggttacagttgtagagtgtgaagttatttcatttatttttgttttctgtgggttctaggctcatcaaggggtggtgtgttcatttttgtaattattttaggccactgggcatttattcacacggagcagcgtggtcctcagtgccccgctggccagcaggcacacaggggcacggcgctctgcctgcagcagtagggtctccgtccgcgcgtccaggctgcaggctgtcttccgcaggtcctgcagggcgcgctgcatgaactcgaaggcgtggcagtccacgcatgggcggctctgcgcggggacggcactcccgcgggctcggcgcgggcccgggcgccnnnnnnnnnnnnnnnnnnnnnnnnnnnnnnnnnnnnnggcgcggcggtgacatcggggaccggcacgcgggcgggggggccatgccagcagagggagcgggccgcccgcggttcaggaccccgggaccagcagcgcggggaccccacgcgtccgcgacgcgtgggtcgacatatcccgtacttccggccgtacca

SEQ ID NO: 324430 - DNA, 402 bp, Homo Sapiens
  misc_feature (346)..(346): n is a, c, g, or t
taggtggaaagacagaggcaactgaggcagaaacacagtcttttctacttcataagaacgtgaatgaggcagacattacaaacaaatcgctcttcaggcaattccagcagctggctggtgaatccacatgatgagtttccaaatctctccactgaggaggacatgaaagcagaaacactgggaataaataacataaatacatcccctccagggaaaggcagagaaggtgcaggtaggtgcagagggaagagaagaaaaagccgctggccacgtgacacatgttgaaggtaaacacagaaagtataatgaccaaaatactctgaggtaggatacctcccttatttcntctgacaaaggcaacaagtaaaatggggtgttgaaaagtataaaaattaaacaccc

SEQ ID NO: 324431 - DNA, 872 bp, Homo Sapiens
ttttttttgctagtttagtgtttgcatttattttaaaaatacacaaaatagaaatttttacatcaaagtgtgataacctcacttacacattgttccatacttacctggttttgtttgcatctttctgcaaacattaaaaggagatggatttgattctgatttttttgctatggttcatgtaaacagttgagactgctacataaagtaggttgttgtcaaaggtgaagtggccacagaatcccaagaatagaataattcaatttggtttaatgaaattggtggaggtcttagcagatagataatccaagactaaatattgtcttctaggcattttaaaaattaagaactttgaggttttcttcatgttgtaaacataacttagaccttgttggcattaagtttacaaaagaaaatattaaaccatgatttttatcatcctgcccatgtcagtatacactctctttattatgagaatgaaaccaaataataagcaaaatacatcaggaatttcaaattgtactgcaaagaaggtcccagctggtctcttctgggagtgatctaactaacttaagctgaccctgtgactggctgaggataatcccttctgtccactgcaccgtgcaatgccacaggtcatgagatggtcagttcctcttgctctgtgtcgtctgaagcaagtcgaggccctacttctggttccgcccttcttccttgggcttagatttgctgggttagtagtttgctactattgtcaagactgtactgtccctttaaggtaccacatgccaccatagcttacacagcagtcctttagtactttatccacctcctgtttactgagatcttctccacactcttgagtcaaccgagcc

SEQ ID NO: 324432 - DNA, 913 bp, Homo Sapiens; identical to SEQ ID NO: 134179
  misc_feature (228)..(241): n is a, c, g, or t
  misc_feature (252)..(252): n is a, c, g, or t
  misc_feature (274)..(333): n is a, c, g, or t
  misc_feature (346)..(402): n is a, c, g, or t
  misc_feature (414)..(416): n is a, c, g, or t

SEQ ID NO: 324433 - DNA, 196 bp, Homo Sapiens
taaagttaaagattcttttattaataaattctccctcccctccaaactctccccaaaataaatatctcctccccgctttggggagttgggggggtctgtatcttagggccagccctcctagtgggccagccccctagtgttaaaaataggtccctaaccccccagggtgacccccgtggtggaatttcaggacacc

SEQ ID NO: 324434 - DNA, 666 bp, Homo Sapiens
  misc_feature (56)..(56): n is a, c, g, or t
gcatgttgggattaatttaatggggatgggggggttgatgacactactgcaacccnccccccgccccaaggacaatgacagtattctgaagggctccagcctaggtggcttggctacagtagtatctcttccaacctgggagctagaggatgttcccaccattccctcccaaggcctgggtccaagcatcctcccatccttcccccaggccttctggacccaggctttcagttaggtggtggtggcagcagaaaggaggcagagacagcagtgagggtccaggtttactctttgggaatagggaaggatgaagagaaggggtggatgggatgggggcacccctcagtagtcagctgtgtaatctgtgccatggagaccccggcacagcagtgtgaactccttcaccatctccttcacccgcctcttgttcactcgctcgcgaaggatctgctggctgaaggtatccttctgttcagggctgaggcgggcagaggggaaaccaggtggctgcagggcctccttgatccacatgctcaggaggctgaagcagtgcttgttcagggcgaacaggatatcggcaaagcagtccatgaggctgcgggaggccttgcccccaatggcctccagcactgctatgagcagcatacgaccgtcttccctcgtgcc

SEQ ID NO: 324435 - DNA, 1252 bp, Homo Sapiens
  misc_feature (336)..(452): n is a, c, g, or t
  misc_feature (477)..(519): n is a, c, g, or t
  misc_feature (695)..(709): n is a, c, g, or t
  misc_feature (916)..(934): n is a, c, g, or t
  misc_feature (1033)..(1085): n is a, c, g, or t
  misc_feature (1140)..(1150): n is a, c, g, or t
ctcttggtaagaggcatttgttaaaagtgcaagcttactcctgcttctgggtatgtgagcaacattcgggcgtgtgttctccctctcattttagtctgacttgactattgtttttcctttctggcgcatgaatccatacatcattcctggaagtgaggcaagactcttgcatctctacaaagtagttttgtcaatttgaattcagggaaaagttggtcacagcctgcaaatgacttcatttggaagtctgattgtttcagttgcctgacaaatactacactttacaaacaatgttaacgctgtgattccttcattgttttaagaagttaacctagnnnnnnnnnnnnnnnnnnnnnnnnnnnnnnnnnnnnnnnnnnnnnnnnnnnnnnnnnnnnnnnnnnnnnnnnnnnnnnnnnnnnnnnnnnnnnnnnnnnnnnnnnnnnnnnnnnnnntttttgggcagcgtggtgggggatnnnnnnnnnnnnnnnnnnnnnnnnnnnnnnnnnnnnnnnnnnnccttgtcggcccgcctcggcccctcgaggaagctttctaagaccaattcgtttttggcgccgcggggccccaagtagggaaaagtgaaaccatgggcccaatagccttgttttcccttaagggagaattccctgggcccaatgaaccataggggcctttgggatttcctacacccnnnnnnnnnnnnnnncgccccccggggcggggaaaacccggaaggcggttctcctggaaaaccaaatatcccaagaatgggggaagttttccttggaagggggtccaattttaccctggggggaattcccttattccccaacccaggggggggagatctccccacaaaggcgcggaaagggccttcccaaaaataatttcacaaaaatattttatacgcggnnnnnnnnnnnnnnnnnnntgtggccccaaactctccattttccgggacagaagaaaaaccctgggctgtcggtgaaataattttctctaattttaaaaagaggcctattttttcttnnnnnnnnnnnnnnnnnnnnnnnnnnnnnnnnnnnnnnnnnnnnnnnnnnnnncgggggggcaattgggaagtgagaaacaccccctggaaaaaattccccgccccannnnnnnnnnnaaatatttgaaggtccaaccccctgtttggggccccgccccccttttggccgcggctatataaaaaaataatttttttgggccccccccagtgggggtgtgg

SEQ ID NO: 324436 - DNA, 787 bp, Homo Sapiens
  misc_feature (118)..(143): n is a, c, g, or t
ccttaggaaaaacagcttatggacccatgttccaattacccttctggggccccgcgcgcccaaaacgaattggtcttagaaagcttcctcgaggggccgaggcgggccgaccatgttnnnnnnnnnnnnnnnnnnnnnnnnnntaaaagattttattagaggaaataatctagtagataactttcttacttccacaaaaacaaagtttctcaaggatacaaaccaatggatttatctgtgaactcggtcccagaatagaaactagcaaaaagtcagtacagtactcaaaaaatacttttgtggtatgaaaaaagggcaggtgcagatgtagaactgtaccatcttcagtttctgttcacaattgttttaaaacaattctcatctatccagtctgctctcccacgcctcagatgagggaagccaatggtcaatgctctgtgatagcccaagtaggatccaatctaggtaatccctgtccaccttagctctgtcctctgagggatttgccaggttgcaccacaatagttctccattctctttagtctgaacttatgctgtaaacccaaggcctggcacaggggtatgcaggaaagtttgagtgaatcagtcacaacagctctagtacagtactgcatcgatatgctctggagacctgcagcctatttttcccagagaaataaagtggagtggagatcagaagccatggcttcccccctacctcctctggtcagtgcaggctctggctcaaatactgaagaaacatgttggccagttgcggcaagttccc

SEQ ID NO: 324437 - DNA, 316 bp, Homo Sapiens
  misc_feature (130)..(168): n is a, c, g, or t
ttgcgtgtaaaatatgttttattgttctttaaaagggttcagggtttggttttaaatcaggctgcacacctttcaaatcaatctgacatctctctatgtcaaactggcttcagctagcaatacttcattnnnnnnnnnnnnnnnnnnnnnnnnnnnnnnnnnnnnnnncagttttaagaacaattaacattagtctttaaaataaaaggaaggctaatgtttcatgttgctttatacatccttctcctcaatacagaaccaggaatgtaattttcctaactcaggcaggcactgatactgatggacactgcgcgtg

SEQ ID NO: 324438 - DNA, 348 bp, Homo Sapiens
  misc_feature (75)..(75): n is a, c, g, or t
ttcttgtttgtagcttcctcaatctgttgctgtaacatcccctcgaactttggggtggtatctctcggacttccnaaatccatctgttcaagcaagttctttcgcttcttcaagctgtttctccacatttgcaaccatctgtttcttttcatcaggcgggagtcgtgggaccctcgcaatcttgctggtgatctctgcagtgagcaccgcgaagtcctgctcgtaaccttcgaagtcggacgacatggcggctccggaacgagtagcccaggccaaagcctaggtcagggaaagggcctcgaggggcagcgaggggccccgcggcttaggaaccccggaaggtccccc

SEQ ID NO: 324439 - DNA, 514 bp, Homo Sapiens
acagcgcttgtgggcgttcgggaagagtccgcgggcacgaagaactgtcctcgggtggagcatgggacctttattcgttaagacatcaggctccagatatgaactttcagcagaagcgcttgccgggagcaaagggacagaaaagctgagatgaacagtgcctggcagcaatcacagccgggcaagggtgctccgagcctcgcatcccccggccgggggcagctggaggtgcctcagaaggtgcattctgcttcctgcaggggcttgaaacaccaaggcactccagggatcctggagtcaaagcagcagccccggttgttgcactccttgggggtgacatgggggtagccgcagtccaccctgtccttggctggcacggcacactggtttgcagacaggcccacgtactcctcagcagagctggaggacagcaaggccaggaccagccccagcatgcagagcgctctggcagccatgaccaccgtgggctccgggacgcagctcaggactcccc

SEQ ID NO: 324440 - DNA, 479 bp, Homo Sapiens
ggagcagtggtataacgcagagtcccattacggccgggaaatcaatttctgtacagttagtaattttaataatgtggcccttttcctagtccctgcaacctgtttcataaagtgcaatggggaaagcaggactgttgagcccttttggtgttgcgagttgaagttcaaggtttctaaaatgttgtcttgtattgaaaggagctaatgccattataaatgttactagttttcacatttcctaagcagcctagagtacagggtgagcatttttagatctcctaatgtattgtgccgtggaagtactgtgtgtgaatagcagtagtgggggcaaaagcaatcttctcatttggaaatgttgtaaataattttattatatagtgttttggatgtatttgttgtagaaatggaccagtgaataaagagaatctaaggatttgtacaatgtgaaataacgtgttaaatacatgtcattgtcatag

SEQ ID NO: 324441 - DNA, 422 bp, Homo Sapiens
  misc_feature (135)..(135): n is a, c, g, or t
  misc_feature (398)..(398): n is a, c, g, or t
  misc_feature (407)..(407): n is a, c, g, or t
taccaataacataactttatgttctatgacaatgacatttatttaacacgttatttcacattgtacaaatccttagattctctttattcactggtccatttctacaacaaatacatccaaaacactatataatanaattatttacaacatttccaaatgagaagattgcttttgcccccactactgctattcacacacagtacttccacggcacaatacattaggagatctaaaagtgctcaccctgtactctagggctgcttaggaaatgtgaaaactaggtaacatttataatgggcattaggctcctttcaatacaaggacaacattttaggaaaccttggaacttcaactcggcaacaccaaaagggggttcaacagtcctggcttttcccctnggcactttntgggaacgggttgcg

SEQ ID NO: 324442 - DNA, 681 bp, Homo Sapiens
attgggcgggagggaatgtctcagaccccgtttgggtttcatggggcccacgggtgttgtctcctaggggagaggcaaaccttatgggcgcccagtgttgccaactttatccttacagagggacccggcggcggcccaaaacgaaatgggtttaggaaaaggttccttcgaggggccgtaggcgcgcccgacaagatttagagcctctcggtcccggttattttaataggctcaactggaagactttaatgtacattatgctcttggaagaacatctccaaggaaacaagtggaagcaaaagtctcaaccagcagggattctcattcaaaaacatggtgtgagccccagtcttggaaaaggatggcacagggactgtgatcatagtacaacagtttgatgtcagggtggcagggcctgtgtacttgtctagagaggaaccctgccacacagcacgaaggactcccgaggaaccaggagctcattactccggtgactgacagctccacagcgggactgggaagatttaggctgaccaggtcttcttcagcacttggaaggcacaaaacttcgtaaaggccttaagaagcctgctctgggcagaaacctttctggttgttgttgactctccaggtcatcagaaacagtcacggtggctctggtgaggaaggggagggtccccc

SEQ ID NO: 324443 - DNA, 745 bp, Homo Sapiens
  misc_feature (153)..(153): n is a, c, g, or t
  misc_feature (159)..(159): n is a, c, g, or t
  misc_feature (163)..(259): n is a, c, g, or t
gggggagagatacccaaagccccttgttccctgttcccctgtttggcccgcgggaccccacataagaaccgtgttttaaaatttctttttgggggccgcgggggcaccaccaaagagttttgaaaaagtttttttagggcccaggcgggccgnaccaantttnnnnnnnnnnnnnnnnnnnnnnnnnnnnnnnnnnnnnnnnnnnnnnnnnnnnnnnnnnnnnnnnnnnnnnnnnnnnnnnnnnnnnnnnnnnnnnnnnttgcagaaaagaaatttattaccaagctataaattagaggcggcggggtgggcggggggagccgagcagtcacgtatggggcatctgccctttttctctgtcctcctgggcctggattttgagttcctcatccaggcgctcctttgcgcggaccacctttgactgcaggtagaaggagccacccacggatttatcattcaccttaaataagtgttcatagttcttctggacctcctcagggctcagcttggacacgttgagaatctgctgtgcctcctggaggctgaggccggagaggttggaagcggctgcagaccggtgtccagcgcgtcctcgggcatcagctgcggcccggctggctgcaaactcctgccgcaaggcccgtgcaaaggccctgcccaccacctgcacgcccatcacaatgatctgggccaggtacttggccatggcagccgctctgcctccggggctcaaactccgactccc

SEQ ID NO: 324444 - DNA, 321 bp, Homo Sapiens
cccagtgagaagccgtgacaagtcttaatgtgccatttcaattcaaaggaggggagggaggaaatgttcttgtttgttcgctcatcaatatgatgaggtctcgtgtcccaaaccacattcaggcagttcccgagtctgcttttgaacaggacgtgcgggtccagactgtggccggcccagtggggtgtgtggttcccggccccgcacctgggacgctgccggtggggtgggggcgggtgggcgggtggatagacggacaaagcagcagcctggtgtgcagccgggctcccggccgctatgtgctcccggtcgtctgccccc

SEQ ID NO: 324445 - DNA, 597 bp, Homo Sapiens
  misc_feature (585)..(585): n is a, c, g, or t
atttttgaaaatggattcaatttttattaaataatgtaaaggattttcttggcactattcacattctcttgcctgagtaaaacaagccgcgtttatctgcattggtagcagagggaaagctactggagcaaacgctaagtgaatgggttcccgtgccgagggtgtcctcattcttgggctctgtcaggcctccccttgtctgcaggactggacaggccaccctccccaggccctgcccttgccgcgagcgtgtccttccatacagacaacagccttgctgggtcacctggaggagctgcgctctttgctgacacagtcgtcctgggaggtggtgtccccgtttcccaccatgctgcacgtcctcctcttcttcctgcggtgcactgtcccatcgccctcggatccagactcgcactctgagtcggagtctgacgaactggagctggaggagctggaagagtcgctggagctgtcggaagctatccctgtggactcctgaaggtcaaccgagtctgcgaggactgccaactcggggtgctcttgcttcaaaatcctataccatttccttgataactttggtctccncctgtgccgaat

SEQ ID NO: 324446 - DNA, 1389 bp, Homo Sapiens
  misc_feature (264)..(264): n is a, c, g, or t
accgtgttgtaaattcggcataccttttttcaaccctttgatccatcagtgtttaaccttcgccgagccccaaccgctttgtgtctcacctgaaagcccaccatattaagacgcttatccgcggttgatgccaggccccaccatttttcgtgcgcaacacccaactcacagcttgtcaaggtggacccaaaattaagatgcccacgcacattatactgtttctccttttggtttttcttaaagtagatttcttaactgatgatntctcttaagtggacataatctcaaggaatgcattctgaagtaagacacctggaggatgaatactaagaacgttttcttgggtttaaagtttccccacactttctagattttgcatagtacagagcccagccgtatttctaagcagcacgctgttattttctgacattgtttttctgagaagactttttacccagggaaagtcataattttagcttaccaattggattccagttgttttattatatacccttcattagttccaagtatgcttctgaataatctaaaacctctcaaatttgagtttataagtataatgaccattatctttccatatcccctgaaagaaagtcgatacattccaggtttataatgcacaagcctttacagaggtggggctgggatgtggaaaaggggaagaggagaagagaacaaggacctgtttgtatcatgccatggagaactacagttctgaattcagggaagggagggaagatagtctttgtaaaaatgagagttttttaaaaagataagtgacattcagtctagtaagacggtttcttgttcctttttgatggaagctaacactgggtggtcaggctccgttacttccgagtccccactgcccaggagaatggatcgcccttcgtctagggcaaaaacatccgagttctggttttggcatgaatgtttaacaacctcattgggagtggagaatgttttgtcacacaagttgcatttgtagggtttgtttgtttgcaccagcatgttgtccatctgactcccttcttcaaatgtgcagagttccagagtctgtttgtccaccatggtgtaagtgtcgatgctctggttgaggcacacgtggcgggcagcctggttggccctgcaaaagcttttgtcacaagtgctgcacttgaaaggcttcccggtgtgtatgtacatgtgttccctccagtggcttttctggataaatttgcgtccacatattgtgcactcgtacttccgcctcttcacctccctctcctggtcggcctgctccaggttgtcaatgtcagcaatgtctgagggggttggggtttccgactgctgctgcccatcgatgatgggagaatcagagatgtgctgccc

SEQ ID NO: 324447 - DNA, 503 bp, Homo Sapiens
  misc_feature (52)..(248): n is a, c, g, or t
gcccgggtttttttgggaacacgtttggccccttttcctttccttttggggnnnnnnnnnnnnnnnnnnnnnnnnnnnnnnnnnnnnnnnnnnnnnnnnnnnnnnnnnnnnnnnnnnnnnnnnnnnnnnnnnnnnnnnnnnnnnnnnnnnnnnnnnnnnnnnnnnnnnnnnnnnnnnnnnnnnnnnnnnnnnnnnnnnnnnnnnnnnnnnnnnnnnnnnnnnnnnnnnnnnnnnnnnnnnnnnnnnnnccgttttaggaaaaatagtttaatggtaggtttgtaacctcttttctagatgaggtccccttctcggtggaacccccacaccagtgctcttcccatgcctgctgggaggtagcagcccctctctggagggcacccacccattcccaatgcccctgccctcctgggaggccagtgccgtgtctaggccttggtggggccatcgctgtaagtttttataaaaagtgggcagaattctctactggcctctttcctccc

SEQ ID NO: 324448 - DNA, 1160 bp, Homo Sapiens
  misc_feature (282)..(293): n is a, c, g, or t
ccggtccactgggggcccttcgatcagtggcctcccgcttcgtcctggccgctgtgctgaagagaagccaagtgttgttggtgtttttctctcccaagtgttttcccatttcagttatcagaaggtcatggccgtggggaaagtggtgaagatacccctcctggcttggggtgcacctgcttgtgcagtcagcatgtagctgcctttccattttattctctactgggctaaaaattgcagctacaagtgttaccatcttgaagcagtccacttccattcaannnnnnnnnnnnaattttagaataacagtgtccccataccaaaggaagcctgctagctcatttcatgtataaatttcccatcttcaaacagtttaggtgtatttgttgctctggtcacattctgcataaaagaaatcctcttaagcctatggttaagaaaagccttgaagtttatattcagttaaaatatatgtcggtggagatagccagtgcttctaattttgacttagtttcatacagtaaagcctaaatgtgaaacgcacacgctggaagatattgttcctatcaatattttgctttttataacaagggtttgttcatattgatgccatttttgcaggatttcttcgtgatttctgtccatatgaaaatgctgacattaaacattaacacatggagaccgtgccctgtggccctgccgtggctgccagcatggtctgtgtttccttgtggattcacctgtggccctgctgtggccaccagcatggtctgtgtcctcgtggattcactgcagctgtcggatgcgagtttctgtcataatcatttgtttcctgatacaattgttcttattcttttccaaaactgtaaaataatctcctccctcaaatgcaaaggttgtttttgttctgtttctgttttctttgaaataaaattataacgctaacggggcccccctcctatatttacccgcctcccactgttcggctcgccctcgggccctcgaaaaagcttctcccagaccattccggtttgcggcgcgcgccgccccattcaggccaatttggaaccatggggcccatcagcctggtttcccctaggaacaaaccctcgggtccatggaacctagggcggctttgggactctcctcccacccaaatc

SEQ ID NO: 324449 - DNA, 614 bp, Homo Sapiens
  misc_feature (119)..(128): n is a, c, g, or t
  misc_feature (135)..(289): n is a, c, g, or t
  misc_feature (295)..(358): n is a, c, g, or t
  misc_feature (371)..(504): n is a, c, g, or t
ccacagggcccaaagggggtttttcccccgggggatttagggtccaaaaccccttttggaaggggttcccccgcggcaaaaatttttaaaaaattccccccacttcccaaaaaggcccnnnnnnnnnntaaattnnnnnnnnnnnnnnnnnnnnnnnnnnnnnnnnnnnnnnnnnnnnnnnnnnnnnnnnnnnnnnnnnnnnnnnnnnnnnnnnnnnnnnnnnnnnnnnnnnnnnnnnnnnnnnnnnnnnnnnnnnnnnnnnnnnnnnnnnnnnnnnnnnnnnnnnnnngccccnnnnnnnnnnnnnnnnnnnnnnnnnnnnnnnnnnnnnnnnnnnnnnnnnnnnnnnnnnnnnnnngggcccccaaagnnnnnnnnnnnnnnnnnnnnnnnnnnnnnnnnnnnnnnnnnnnnnnnnnnnnnnnnnnnnnnnnnnnnnnnnnnnnnnnnnnnnnnnnnnnnnnnnnnnnnnnnnnnnnnnnnnnnnnnnnnnnnnnnnnnnnnattaattgattcagatttattaatttactaattgatcaccctacatttacaggtgttagagtagatatccttaagaataaacataccttatagaaactttaatcagcccc
